United States Patent Application Publication US 2023/0026259 A1 - sequence listing, part 34

SEQ ID NO: 119857 - DNA, 781 bp, Homo sapiens
  Payload ID: 3502
  Gene Symbol: CMTM1
  Gene Name: CKLF-like MARVEL transmembrane domain containing 1
  ENST ID: ENST00000534143
  CDS Start-End: 1-394
aaggaaagccaccacacgcccacccccaaagcccacactcccaccccccacgccctctgcacacactgaatccaaactcttaaatgagatggcgatcaaagagcgcgtggagggccgagccaaagtcccgtacaaattcagggacagcctcaaacgtttctccttctcgcccactggaatgttgaagatcctgagactgagtcttatcttaggagcattagcttgtttcatcatcacccaagccaatgagtcatttataacaatcacaagtctggaaatctgcattgtcgttttttttattctaatatatgtgctaacccttcaccacttgctgacctatttacattggcccttacttaatgccgagtacaggaagcagacaaagcaaatatgagcaactttaattgaacatgtggaagacccttttagttatggagaggtttctcaggggaaactcaaatctctgtccgtggaaattttcaagaagggaagcggtaatcgtgtgttgcatcgatgcgtttgtggtcaccacgaagatgaggaccaacttgaaaagattcctgggagtcgaagttgaaaggaagctttcccccgccaaggacgcctaccccgaaaccggccccgacgccccgcagaggcccgcctgaagccagcccggcgccctagcagatgcacgtgtctgtcgaatcgctgcctccgagcccacccccgagctcgcatgctgtcacccattccagcctaaatgtgaccataaaattagggctgctgcttttatcgagaa

SEQ ID NO: 119858 - DNA, 565 bp, Homo sapiens
  Payload ID: 3502
  Gene Symbol: CMTM1
  Gene Name: CKLF-like MARVEL transmembrane domain containing 1
  Uniprot ID: Q8IZ96
  ENST ID: ENST00000533078
  CDS Start-End: 122-220
agagccgggtgcacgcgccggggaggtagccaacagccgttgggacgcgacgctggttcccaggggagagccagccgctgccgcggcactggttcagacggccaggccctagggacccaccatggatcctgaacacgccaaacctgagtcatccgaggcaccttcagggaacttgaaacaaccggagactgccgcagccctgctgtgttcctttcagtagttgccatcttggccatgcaagaaaagaaaagaaggcatttactctatgtcggggggcggtaatcgtgtgttgcatcgatgcgtttgtggtcaccacgaagatgaggaccaacttgaaaagattcctgggagtcgaagttgaaaggaagctttcccccgccaaggacgcctaccccgaaaccggccccgacgccccgcagaggcccgcctgaagccagcccggcgccctagcagatgcacgtgtctgtcgaatcgctgcctccgagcccacccccgagctcgcatgctgtcacccattccagcctaaatgtgaccataaaattagggctgctgcttttatcgagaa

SEQ ID NO: 119859 - DNA, 749 bp, Homo sapiens
  Payload ID: 3502
  Gene Symbol: CMTM1
  Gene Name: CKLF-like MARVEL transmembrane domain containing 1
  Uniprot ID: Q8IZ96
  ENST ID: ENST00000528324
  CDS Start-End: 122-466
agagccgggtgcacgcgccggggaggtagccaacagccgttgggacgcgacgctggttcccaggggagagccagccgctgccgcggcactggttcagacggccaggccctagggacccaccatggatcctgaacacgccaaacctgagtcatccgaggcaccttcagggaacttgaaacaaccggagactgccgcagccctgagtcttatcttaggagcattagcttgtttcatcatcacccaagccaatgagtcatttataacaatcacaagtctggaaatctgcattgtcgttttttttattctaatatatgtgctaacccttcaccacttgctgacctatttacattggcccttacttgatcttaccaacagtatcattacagctgtgttcctttcagtagttgccatcttggccatgcaagaaaagaaaagaaggcatttactctatgtcggggggcggtaatcgtgtgttgcatcgatgcgtttgtggtcaccacgaagatgaggaccaacttgaaaagattcctgggagtcgaagttgaaaggaagctttcccccgccaaggacgcctaccccgaaaccggccccgacgccccgcagaggcccgcctgaagccagcccggcgccctagcagatgcacgtgtctgtcgaatcgctgcctccgagcccacccccgagctcgcatgctgtcacccattccagcctaaatgtgaccataaaattagggctgctgcttttatcgagaa

SEQ ID NO: 119860 - DNA, 590 bp, Homo sapiens
  Payload ID: 3502
  Gene Symbol: CMTM1
  Gene Name: CKLF-like MARVEL transmembrane domain containing 1
  Uniprot ID: Q8IZ96
  ENST ID: ENST00000531885
  CDS Start-End: 122-307
agagccgggtgcacgcgccggggaggtagccaacagccgttgggacgcgacgctggttcccaggggagagccagccgctgccgcggcactggttcagacggccaggccctagggacccaccatggatcctgaacacgccaaacctgagtcatccgaggcaccttcagggaacttgaaacaaccggagactgccgcagccctggatcttaccaacagtatcattacagctgtgttcctttcagtagttgccatcttggccatgcaagaaaagaaaagaaggcatttactctatgtcggggggcggtaatcgtgtgttgcatcgatgcgtttgtggtcaccacgaagatgaggaccaacttgaaaagattcctgggagtcgaagttgaaaggaagctttcccccgccaaggacgcctaccccgaaaccggccccgacgccccgcagaggcccgcctgaagccagcccggcgccctagcagatgcacgtgtctgtcgaatcgctgcctccgagcccacccccgagctcgcatgctgtcacccattccagcctaaatgtgaccataaaattagggctgctgcttttatcgagaa

SEQ ID NO: 119861 - DNA, 979 bp, Homo sapiens
  Payload ID: 3502
  Gene Symbol: CMTM1
  Gene Name: CKLF-like MARVEL transmembrane domain containing 1
  ENST ID: ENST00000528441
  CDS Start-End: 1-394
aaggaaagccaccacacgcccacccccaaagcccacactcccaccccccacgccctctgcacacactgaatccaaactcttaaatgagatggcgatcaaagagcgcgtggagggccgagccaaagtcccgtacaaattcagggacagcctcaaacgtttctccttctcgcccactggaatgttgaagatcctgagactgagtcttatcttaggagcattagcttgtttcatcatcacccaagccaatgagtcatttataacaatcacaagtctggaaatctgcattgtcgttttttttattctaatatatgtgctaacccttcaccacttgctgacctatttacattggcccttacttaatgccgagtacaggaagcagacaaagcaaatatgagcaactttaattgaacatgtggaagacccttttagttatggagaggtttctcaggggaaactcaaatctctgtccgtggaaattttcaagaagggaaggtgtaagcttcctgcaaagctgcaaaccactgtacctgcctcagtcaggcctgcccactatgggcagacctctcgctcagcctgcagaacccagctgggacttacttccaacctccaccagccctgctacatacccctgttccagcattaactaccaggcaccaaaacagtaggcattagtgcctttccaagaggcaacggtaatcgtgtgttgcatcgatgcgtttgtggtcaccacgaagatgaggaccaacttgaaaagattcctgggagtcgaagttgaaaggaagctttcccccgccaaggacgcctaccccgaaaccggccccgacgccccgcagaggcccgcctgaagccagcccggcgccctagcagatgcacgtgtctgtcgaatcgctgcctccgagcccacccccgagctcgcatgctgtcacccattccagcctaaatgtgaccataaaattagggctgctgcttttatcgagaa

SEQ ID NO: 119862 - DNA, 581 bp, Homo sapiens
  Payload ID: 3502
  Gene Symbol: CMTM1
  Gene Name: CKLF-like MARVEL transmembrane domain containing 1
  ENST ID: ENST00000529506
  CDS Start-End: 235-447
agagccgggtgcacgcgccggggaggtagccaacagccgttgggacgcgacgctggttcccaggggagagccagccgctgccgcggcactggttcagacggccaggccctagggacccaccatggatcctgaacacgccaaacctgagtcatccgaggcaccttcagggaacttgaaacaaccggagactgccgcagccctgctgtgttcctttcagtagttgccatcttggccatgcaagaaaagaaaagaaggcatttactctatgtcggggggtccctgtgtctcacagcggtaatcgtgtgttgcatcgatgcgtttgtggtcaccacgaagatgaggaccaacttgaaaagattcctgggagtcgaagttgaaaggaagctttcccccgccaaggacgcctaccccgaaaccggccccgacgccccgcagaggcccgcctgaagccagcccggcgccctagcagatgcacgtgtctgtcgaatcgctgcctccgagcccacccccgagctcgcatgctgtcacccattccagcctaaatgtgaccataaaattagggctgctgcttttatcgagaa

SEQ ID NO: 119863 - DNA, 493 bp, Homo sapiens
  Payload ID: 3502
  Gene Symbol: CMTM1
  Gene Name: CKLF-like MARVEL transmembrane domain containing 1
  Uniprot ID: Q8IZ96
  ENST ID: ENST00000533666
  CDS Start-End: 122-208
agagccgggtgcacgcgccggggaggtagccaacagccgttgggacgcgacgctggttcccaggggagagccagccgctgccgcggcactggttcagacggccaggccctagggacccaccatggatcctgaacacgccaaacctgagtcatccgaggcaccttcagggaacttgaaacaaccggagactgccgcagccctgcggtaatcgtgtgttgcatcgatgcgtttgtggtcaccacgaagatgaggaccaacttgaaaagattcctgggagtcgaagttgaaaggaagctttcccccgccaaggacgcctaccccgaaaccggccccgacgccccgcagaggcccgcctgaagccagcccggcgccctagcagatgcacgtgtctgtcgaatcgctgcctccgagcccacccccgagctcgcatgctgtcacccattccagcctaaatgtgaccataaaattagggctgctgcttttatcgagaaca

SEQ ID NO: 119864 - DNA, 880 bp, Homo sapiens
  Payload ID: 3502
  Gene Symbol: CMTM1
  Gene Name: CKLF-like MARVEL transmembrane domain containing 1
  ENST ID: ENST00000530141
  CDS Start-End: 1-394
aaggaaagccaccacacgcccacccccaaagcccacactcccaccccccacgccctctgcacacactgaatccaaactcttaaatgagatggcgatcaaagagcgcgtggagggccgagccaaagtcccgtacaaattcagggacagcctcaaacgtttctccttctcgcccactggaatgttgaagatcctgagactgagtcttatcttaggagcattagcttgtttcatcatcacccaagccaatgagtcatttataacaatcacaagtctggaaatctgcattgtcgttttttttattctaatatatgtgctaacccttcaccacttgctgacctatttacattggcccttacttaatgccgagtacaggaagcagacaaagcaaatatgagcaactttaattgaacatgtggaagacccttttagttatggagaggtttctcaggggaaactcaaatctctgtccgtggaaattttcaagaagggaaggatcttaccaacagtatcattacagctgtgttcctttcagtagttgccatcttggccatgcaagaaaagaaaagaaggcatttactctatgtcggggggcggtaatcgtgtgttgcatcgatgcgtttgtggtcaccacgaagatgaggaccaacttgaaaagattcctgggagtcgaagttgaaaggaagctttcccccgccaaggacgcctaccccgaaaccggccccgacgccccgcagaggcccgcctgaagccagcccggcgccctagcagatgcacgtgtctgtcgaatcgctgcctccgagcccacccccgagctcgcatgctgtcacccattccagcctaaatgtgaccataaaattagggctgctgcttttatcgagaa

SEQ ID NO: 119865 - DNA, 995 bp, Homo sapiens
  Payload ID: 3502
  Gene Symbol: CMTM1
  Gene Name: CKLF-like MARVEL transmembrane domain containing 1
  ENST ID: ENST00000479381
  CDS Start-End: 1-394
aaggaaagccaccacacgcccacccccaaagcccacactcccaccccccacgccctctgcacacactgaatccaaactcttaaatgagatggcgatcaaagagcgcgtggagggccgagccaaagtcccgtacaaattcagggacagcctcaaacgtttctccttctcgcccactggaatgttgaagatcctgagactgagtcttatcttaggagcattagcttgtttcatcatcacccaagccaatgagtcatttataacaatcacaagtctggaaatctgcattgtcgttttttttattctaatatatgtgctaacccttcaccacttgctgacctatttacattggcccttacttaatgccgagtacaggaagcagacaaagcaaatatgagcaactttaattgaacatgtggaagacccttttagttatggagaggtttctcaggggaaactcaaatctctgtccgtggaaattttcaagaagggaaggtgtaagcttcctgcaaagctgcaaaccactgtacctgcctcagtcaggcctgcccactatgggcagacctctcgctcagcctgcagaacccagctgggacttacttccaacctccaccagccctgctacatacccctgttccagcattaactaccaggcaccaaaacagtaggcattagtgcctttccaagaggcaatccctgtgtctcacagcggtaatcgtgtgttgcatcgatgcgtttgtggtcaccacgaagatgaggaccaacttgaaaagattcctgggagtcgaagttgaaaggaagctttcccccgccaaggacgcctaccccgaaaccggccccgacgccccgcagaggcccgcctgaagccagcccggcgccctagcagatgcacgtgtctgtcgaatcgctgcctccgagcccacccccgagctcgcatgctgtcacccattccagcctaaatgtgaccataaaattagggctgctgcttttatcgagaa

SEQ ID NO: 119866 - DNA, 899 bp, Homo sapiens
  Payload ID: 3502
  Gene Symbol: CMTM1
  Gene Name: CKLF-like MARVEL transmembrane domain containing 1
  Uniprot ID: Q8IZ96
  ENST ID: ENST00000533915
  CDS Start-End: 122-397
agagccgggtgcacgcgccggggaggtagccaacagccgttgggacgcgacgctggttcccaggggagagccagccgctgccgcggcactggttcagacggccaggccctagggacccaccatggatcctgaacacgccaaacctgagtcatccgaggcaccttcagggaacttgaaacaaccggagactgccgcagccctgagtcttatcttaggagcattagcttgtttcatcatcacccaagccaatgagtcatttataacaatcacaagtctggaaatctgcattgtcgttttttttattctaatatatgtgctaacccttcaccacttgctgacctatttacattggcccttacttaatgccgagtacaggaagcagacaaagcaaatatgagcaactttaattgaacatgtggaagacccttttagttatggagaggtttctcaggggaaactcaaatctctgtccgtggaaattttcaagaagggaaggatcttaccaacagtatcattacagctgtgttcctttcagtagttgccatcttggccatgcaagaaaagaaaagaaggcatttactctatgtcggggggtccctgtgtctcacagcggtaatcgtgtgttgcatcgatgcgtttgtggtcaccacgaagatgaggaccaacttgaaaagattcctgggagtcgaagttgaaaggaagctttcccccgccaaggacgcctaccccgaaaccggccccgacgccccgcagaggcccgcctgaagccagcccggcgccctagcagatgcacgtgtctgtcgaatcgctgcctccgagcccacccccgagctcgcatgctgtcacccattccagcctaaatgtgaccataaaattagggctgctgcttttatcgagaa

SEQ ID NO: 119867 - DNA, 934 bp, Homo sapiens
  Payload ID: 3502
  Gene Symbol: CMTM1
  Gene Name: CKLF-like MARVEL transmembrane domain containing 1
  ENST ID: ENST00000533953
  CDS Start-End: 84-800
gttgggacgcgacgctggttcccaggggagagccagccgctgccgcggcactggttcagacggccaggccctagggacccaccatggatcctgaacacgccaaacctgagtcatccgaggcaccttcagggaacttgaaacaaccggagactgccgcagccctggcaagtagcggcagcgtagtgagttctgtacccaaggcacagcgcaacatctcagcgaagaccgcaccccggaagcaccccgcagtctcaattcgcagtgcgcagtccgcagccgccgcacgtccccaaggcagtgagggcaccgcaccctcaaggaaagccaccacacgcccacccccaaagcccacactcccaccccccacgccctctgcacacactgaatccaaactcttaaatgagatggcgatcaaagagcgcgtggagggccgagccaaagtcccgtacaaattcagggacagcctcaaacgtttctccttctcgcccactggaatgttgaagatcctgagactggtgagcggagagctggatcttaccaacagtatcattacagctgtgttcctttcagtagttgccatcttggccatgcaagaaaagaaaagaaggcatttactctatgtcggggggtccctgtgtctcacagcggtaatcgtgtgttgcatcgatgcgtttgtggtcaccacgaagatgaggaccaacttgaaaagattcctgggagtcgaagttgaaaggaagctttcccccgccaaggacgcctaccccgaaaccggccccgacgccccgcagaggcccgcctgaagccagcccggcgccctagcagatgcacgtgtctgtcgaatcgctgcctccgagcccacccccgagctcgcatgctgtcacccattccagcctaaatgtgaccataaaattagggctgctgcttttatcgagaa

SEQ ID NO: 119868 - DNA, 726 bp, Homo sapiens
  Payload ID: 3502
  Gene Symbol: CMTM1
  Gene Name: CKLF-like MARVEL transmembrane domain containing 1
  Uniprot ID: Q8IZ96
  ENST ID: ENST00000528484
  CDS Start-End: 122-238
agagccgggtgcacgcgccggggaggtagccaacagccgttgggacgcgacgctggttcccaggggagagccagccgctgccgcggcactggttcagacggccaggccctagggacccaccatggatcctgaacacgccaaacctgagtcatccgaggcaccttcagggaacttgaaacaaccggagactgccgcagccctggaagcagacaaagcaaatatgagcaactttaattgaacatgtggaagacccttttagttatggagaggtttctcaggggaaactcaaatctctgtccgtggaaattttcaagaagggaaggatcttaccaacagtatcattacagctgtgttcctttcagtagttgccatcttggccatgcaagaaaagaaaagaaggcatttactctatgtcggggggtccctgtgtctcacagcggtaatcgtgtgttgcatcgatgcgtttgtggtcaccacgaagatgaggaccaacttgaaaagattcctgggagtcgaagttgaaaggaagctttcccccgccaaggacgcctaccccgaaaccggccccgacgccccgcagaggcccgcctgaagccagcccggcgccctagcagatgcacgtgtctgtcgaatcgctgcctccgagcccacccccgagctcgcatgctgtcacccattccagcctaaatgtgaccataaaattagggctgctgcttttatcgagaa

SEQ ID NO: 119869 - DNA, 1054 bp, Homo sapiens
  Payload ID: 3503
  Gene Symbol: CMTM2
  Gene Name: CKLF-like MARVEL transmembrane domain containing 2
  Uniprot ID: Q8TAZ6
  ENST ID: ENST00000268595
  CDS Start-End: 152-898
gttggcattcggtggtcctggcagttagctgagcacgccctctgagccgctcggtggacaccaggcactctagtaggcctggcctacccagaaacagcaggagagagaagaaacaggccagctgtgagaagccaaggacaccgagtcagtcatggcacctaaggcggcaaagggggccaagccagagccagcaccagctccacctccacccggggccaaacccgaggaagacaagaaggacggtaaggagccatcggacaaacctcaaaaggcggtgcaggaccataaggagccatcggacaaacctcaaaaggcggtgcagcccaagcacgaagtgggcacgaggagggggtgtcgccgctaccggtgggaattaaaagacagcaataaagagttctggctcttggggcacgctgagatcaagattcggagtttgggctgcctaatagctgcaatgatactgttgtcctcactcaccgtgcaccccatcttgaggcttatcatcaccatggagatatccttcttcagcttcttcatcttactgtacagctttgccattcatagatacatacccttcatcctgtggcccatttctgacctcttcaacgacctgattgcttgtgcgttccttgtgggagccgtggtctttgctgtgagaagtcggcgatccatgaatctccactacttacttgctgtgatccttattggtgcggctggagtttttgcttttatcgatgtgtgtcttcaaagaaaccacttcagaggcaagaaggccaaaaagcatatgctggttcctcctccaggaaaggaaaaaggaccccagcagggcaagggaccagaacccgccaagccaccagaacctggcaagccaccagggccagcaaagggaaagaaatgacttggaggaggctcctggtgtctgaaacggcagtgtattttacagcaatatgtttccactctcttccttgtcttctttctggaatggttttcttttccattttcattaccacctttgcttggaaaagaatggattaatggattctaaaagcctaaa

SEQ ID NO: 119870 - DNA, 904 bp, Homo sapiens
  Payload ID: 3503
  Gene Symbol: CMTM2
  Gene Name: CKLF-like MARVEL transmembrane domain containing 2
  Uniprot ID: Q8TAZ6
  ENST ID: ENST00000379486
  CDS Start-End: 161-748
ggcgcgggagttggcattcggtggtcctggcagttagctgagcacgccctctgagccgctcggtggacaccaggcactctagtaggcctggcctacccagaaacagcaggagagagaagaaacaggccagctgtgagaagccaaggacaccgagtcagtcatggcacctaaggcggcaaagggggccaagccagagccagcaccagctccacctccacccggggccaaacccgaggaagacaagaaggacggtaaggagccatcggacaaacctcaaaaggcggtgcaggaccataaggagccatcggacaaacctcaaaaggcggtgcagcccaagcacgaagtgggcacgaggagggggtgtcgccgctaccggtgggaattaaaagacagcaataaagagttctggctcttggggcacgctgagatcaagattcggagtttggacctcttcaacgacctgattgcttgtgcgttccttgtgggagccgtggtctttgctgtgagaagtcggcgatccatgaatctccactacttacttgctgtgatccttattggtgcggctggagtttttgcttttatcgatgtgtgtcttcaaagaaaccacttcagaggcaagaaggccaaaaagcatatgctggttcctcctccaggaaaggaaaaaggaccccagcagggcaagggaccagaacccgccaagccaccagaacctggcaagccaccagggccagcaaagggaaagaaatgacttggaggaggctcctggtgtctgaaacggcagtgtattttacagcaatatgtttccactctcttccttgtcttctttctggaatggttttcttttccattttcattaccacctttgcttggaaaagaatggattaatggattctaaaagcctaaa

SEQ ID NO: 119871 - DNA, 454 bp, Homo sapiens
  Payload ID: 3503
  Gene Symbol: CMTM2
  Gene Name: CKLF-like MARVEL transmembrane domain containing 2
  ENST ID: ENST00000569316
  CDS Start-End: 149-304
ggcattcggtggtcctggcagttagctgagcacgccctctgagccgctcggtggacaccaggcactctagtaggcctggcctacccagaaacagcaggagagagaagaaacaggccagctgtgagaagccaaggacaccgagtcagtcatggcacctaaggcggcaaagggggccaagccagagccagcaccagctccacctccacccggggccaaacccgaggaagacaagaaggacgctttgccattcatagatacatacccttcatcctgtggcccatttctgacctcttcaacgacctgattgcttgtgcgttccttgtgggagccgtggtctttgctgtgagaagtcggcgatccatgaatctccactacttacttgctgtgatccttattggtgcggctggagtttttgcttttatcgatgtgtgtcttcaaagaaaccacttcagag

SEQ ID NO: 119872 - DNA, 2159 bp, Homo sapiens
  Payload ID: 3504
  Gene Symbol: CMTM3
  Gene Name: CKLF-like MARVEL transmembrane domain containing 3
  Uniprot ID: Q96MX0
  ENST ID: ENST00000361909
  CDS Start-End: 356-904
ggccggggacaggaggggtggccaagaaagtcgcaagaaaactccggcccccaagaaaaagagagggcatgggttgcggagccgacatcacggccggggtctttgctgtttagacgcctgggttcccggatcccagacacgcgcacgggcaggaagttagaccggagacagcgagtatagacagcccttctggataggggcagacgggtgggagctccgaaggggtgccggggcggtgatcgggaggtctccagcggcccgaaccagggtgaagaagaagcccgggtttccgcttccctccgggcgcgagaagaggggagccaggccgagccccggccctaccgccgccgccgccatgtggcccccagaccccgaccccgacccggaccccgagcctgccggcggctcccgtcccggccccgcggtccccgggctccgcgccctgctgccggcgcgggctttcctctgctctctcaaaggccgcctcctgctggccgagtcgggtctctcattcatcacttttatctgctatgtggcgtcctcagcatctgccttcctcacagcgcctctgctggagttcctgctggccttgtacttcctctttgctgatgccatgcagctgaatgacaagtggcagggcttgtgctggcccatgatggacttcctgcgctgtgtcaccgcggccctcatctactttgctatctccatcacggccatcgccaagtactcggatggggcttccaaagccgctggggtgtttggcttctttgctaccatcgtgtttgcaactgatttctacctgatctttaacgacgtggccaaattcctcaaacaaggggactctgcagatgagaccacagcccacaagacagaagaagagaattccgactcggactctgactgaaggcctggcgggtgccttggcaacctgagccacacaggcctccacccctgcgcctcacaggggtcgctggcgttggagcggaggcctggacttctgagttgcagagggggctgcggacacagcaggccccctacagcctcaggttctgcctgagcccagcctaccaggcttgcccctcagctcagcactgttgaccacgctgcgtatgagggcatcttgggtatcccactccttctccccatttctgtcccacaggccttcagccctttaacgtctctgccaaaaaccagcacaaggagacaaagcagagccttgtctgtatctgggcagcaggtgttccatgctgctaggtggcgggggtcgggggtcttctgtttcactaacaggaacaaagacagaaaccatgacagggctgccccgccaggccccggtgggtttgtctgcacttggtgctcctgcccacaccagccactttggtgacaatgacccttccaagaatctttggttcaaggagcaccagttccctcttcattcttgaagcagggagaaattgacctttgccttgtcgcccaggaagtggggctcggcacccataactaacacctcccacccttggaaaccatgtcttctgggggtgagatgaccattctgggtctaagactgtttcaaagaagagctcatagactgactggtccagaagacagagggtacaacagtggcatcacagtgacagtgtcatggggagctgggcgggcccagccaaaccctccttcttcctagagcccagccagcaggcaggagttcctggaccctcaggacagtgaacttccagacctcagggcaggtctatgggccactgcaggagatgagaccagccttctgtgttcacctaacgatttatactgtgtatctgtctttgatggaattttgtaactttttatatttttttatgcaaaagcagcttcttaacagatggcattttctgtgactctaggcctcacaaaagagccagagttctggacccatgtttggagcatttgtagccttattctcttgcgtgtgaatctcttaccctgaaaaaaagccataatgaattaagccagactgaccacttgcttggagtgtgtgcttgaaaaaaccagagcaatactgttgggtattgtatcaggcttcagtacaaactggtaacaccaatgtggatcctgacagctttcagttttagcaaaaatacacgtgaaatctgactaccatttaa

SEQ ID NO: 119873 - DNA, 2330 bp, Homo sapiens
  Payload ID: 3504
  Gene Symbol: CMTM3
  Gene Name: CKLF-like MARVEL transmembrane domain containing 3
  Uniprot ID: Q96MX0
  ENST ID: ENST00000424011
  CDS Start-End: 527-1075
gtgtgtgtgtgtgtgtgtgtgagagagagagatgtgttggggtggggggactgcaggtcaggaagtcctgcagatgtgcgtgcctgtgtgtgtttgcgcgcgcgcgcgcgtgtgtgtgtgtctgtgtgtgtgcctggagctgcgcttgcaggtctgagagtcctctgagaatgggttgggggaggcgggtgcaggaccgaggcctggaacagccaacaaagaggccctggaggagggtggggctggccggggacaggaggggtggccaagaaagtcgcaagaaaactccggcccccaagaaaaagagagggcatgggttgcggagccgacatcacggccggggtctttgctgtttagacgcctgggttcccggatcccagacacgcgcacgggcaggaagttagaccggagacagcgagtatagacagcccttctggataggggcagacggcccgggtttccgcttccctccgggcgcgagaagaggggagccaggccgagccccggccctaccgccgccgccgccatgtggcccccagaccccgaccccgacccggaccccgagcctgccggcggctcccgtcccggccccgcggtccccgggctccgcgccctgctgccggcgcgggctttcctctgctctctcaaaggccgcctcctgctggccgagtcgggtctctcattcatcacttttatctgctatgtggcgtcctcagcatctgccttcctcacagcgcctctgctggagttcctgctggccttgtacttcctctttgctgatgccatgcagctgaatgacaagtggcagggcttgtgctggcccatgatggacttcctgcgctgtgtcaccgcggccctcatctactttgctatctccatcacggccatcgccaagtactcggatggggcttccaaagccgctggggtgtttggcttctttgctaccatcgtgtttgcaactgatttctacctgatctttaacgacgtggccaaattcctcaaacaaggggactctgcagatgagaccacagcccacaagacagaagaagagaattccgactcggactctgactgaaggcctggcgggtgccttggcaacctgagccacacaggcctccacccctgcgcctcacaggggtcgctggcgttggagcggaggcctggacttctgagttgcagagggggctgcggacacagcaggccccctacagcctcaggttctgcctgagcccagcctaccaggcttgcccctcagctcagcactgttgaccacgctgcgtatgagggcatcttgggtatcccactccttctccccatttctgtcccacaggccttcagccctttaacgtctctgccaaaaaccagcacaaggagacaaagcagagccttgtctgtatctgggcagcaggtgttccatgctgctaggtggcgggggtcgggggtcttctgtttcactaacaggaacaaagacagaaaccatgacagggctgccccgccaggccccggtgggtttgtctgcacttggtgctcctgcccacaccagccactttggtgacaatgacccttccaagaatctttggttcaaggagcaccagttccctcttcattcttgaagcagggagaaattgacctttgccttgtcgcccaggaagtggggctcggcacccataactaacacctcccacccttggaaaccatgtcttctgggggtgagatgaccattctgggtctaagactgtttcaaagaagagctcatagactgactggtccagaagacagagggtacaacagtggcatcacagtgacagtgtcatggggagctgggcgggcccagccaaaccctccttcttcctagagcccagccagcaggcaggagttcctggaccctcaggacagtgaacttccagacctcagggcaggtctatgggccactgcaggagatgagaccagccttctgtgttcacctaacgatttatactgtgtatctgtctttgatggaattttgtaactttttatatttttttatgcaaaagcagcttcttaacagatggcattttctgtgactctaggcctcacaaaagagccagagttctggacccatgtttggagcatttgtagccttattctcttgcgtgtgaatctcttaccctgaaaaaaagccataatgaattaagccagactgaccacttgcttggagtgtgtgcttgaaaaaaccagagcaatactgttgggtattgtatcaggcttcagtacaaactggtaacaccaatgtggatcctgacagctttcagttttagcaaaaatacacgtgaaatctgactaccatttaa

SEQ ID NO: 119874 - DNA, 792 bp, Homo sapiens
  Payload ID: 3504
  Gene Symbol: CMTM3
  Gene Name: CKLF-like MARVEL transmembrane domain containing 3
  ENST ID: ENST00000562357
  CDS Start-End: 426-792
tgcagatgtgcgtgcctgtgtgtgtttgcgcgcgcgcgcgcgtgtgtgtgtgtctgtgtgtgtgcctggagctgcgcttgcaggtctgagagtcctctgagaatgggttgggggaggcgggtgcaggaccgaggcctggaacagccaacaaagaggccctggaggagggtggggctggccggggacaggaggggtggccaagaaagtcgcaagaaaactccggcccccaagaaaaagagagggcatgggttgcggagccgacatcacggccggggtctttgctgtttagacgcctgggttcccggatcccagacacgcgcacgggcaggaagttagaccggagacagcgacccgggtttccgcttccctccgggcgcgagaagaggggagccaggccgagccccggccctaccgccgccgccgccatgtggcccccagaccccgaccccgacccggaccccgagcctgccggcggctcccgtcccggccccgcggtccccgggctccgcgccctgctgccggcgcgggctttcctctgctctctcaaaggccgcctcctgctggccgagtcgggtctctcattcatcacttttatctgctatgtggcgtcctcagcatctgccttcctcacagcgcctctgctggagttcctgctggccttgtacttcctctttgctgatgccatgcagctgaatgacaagtggcagggcttgtgctggcccatgatggacttcctgcgctgtgtcaccgcggccctcatctactttgctatctccatcacggccatcgcca

SEQ ID NO: 119875 - DNA, 714 bp, Homo sapiens
  Payload ID: 3504
  Gene Symbol: CMTM3
  Gene Name: CKLF-like MARVEL transmembrane domain containing 3
  Uniprot ID: Q96MX0
  ENST ID: ENST00000562707
  CDS Start-End: 102-650
gtgtgtgcctggagctgcgcttgcagcccgggtttccgcttccctccgggcgcgagaagaggggagccaggccgagccccggccctaccgccgccgccgccatgtggcccccagaccccgaccccgacccggaccccgagcctgccggcggctcccgtcccggccccgcggtccccgggctccgcgccctgctgccggcgcgggctttcctctgctctctcaaaggccgcctcctgctggccgagtcgggtctctcattcatcacttttatctgctatgtggcgtcctcagcatctgccttcctcacagcgcctctgctggagttcctgctggccttgtacttcctctttgctgatgccatgcagctgaatgacaagtggcagggcttgtgctggcccatgatggacttcctgcgctgtgtcaccgcggccctcatctactttgctatctccatcacggccatcgccaagtactcggatggggcttccaaagccgctggggtgtttggcttctttgctaccatcgtgtttgcaactgatttctacctgatctttaacgacgtggccaaattcctcaaacaaggggactctgcagatgagaccacagcccacaagacagaagaagagaattccgactcggactctgactgaaggcctggcgggtgccttggcaacctgagccacacaggcctccacccctgcgcctcacaggggt

SEQ ID NO: 119876 - DNA, 1934 bp, Homo sapiens
  Payload ID: 3504
  Gene Symbol: CMTM3
  Gene Name: CKLF-like MARVEL transmembrane domain containing 3
  Uniprot ID: Q96MX0
  ENST ID: ENST00000567572
  CDS Start-End: 143-691
ggcggggcgtggcggcgggggatgcgcccctgcgcgagccagtgtcgcctgccctccttccgcacagcccgggtttccgcttccctccgggcgcgagaagaggggagccaggccgagccccggccctaccgccgccgccgccatgtggcccccagaccccgaccccgacccggaccccgagcctgccggcggctcccgtcccggccccgcggtccccgggctccgcgccctgctgccggcgcgggctttcctctgctctctcaaaggccgcctcctgctggccgagtcgggtctctcattcatcacttttatctgctatgtggcgtcctcagcatctgccttcctcacagcgcctctgctggagttcctgctggccttgtacttcctctttgctgatgccatgcagctgaatgacaagtggcagggcttgtgctggcccatgatggacttcctgcgctgtgtcaccgcggccctcatctactttgctatctccatcacggccatcgccaagtactcggatggggcttccaaagccgctggggtgtttggcttctttgctaccatcgtgtttgcaactgatttctacctgatctttaacgacgtggccaaattcctcaaacaaggggactctgcagatgagaccacagcccacaagacagaagaagagaattccgactcggactctgactgaaggcctggcgggtgccttggcaacctgagccacacaggcctccacccctgcgcctcacaggggtcgctggcgttggagcggaggcctggacttctgagttgcagagggggctgcggacacagcaggccccctacagcctcaggttctgcctgagcccagcctaccaggcttgcccctcagctcagcactgttgaccacgctgcgtatgagggcatcttgggtatcccactccttctccccatttctgtcccacaggccttcagccctttaacgtctctgccaaaaaccagcacaaggagacaaagcagagccttgtctgtatctgggcagcaggtgttccatgctgctaggtggcgggggtcgggggtcttctgtttcactaacaggaacaaagacagaaaccatgacagggctgccccgccaggccccggtgggtttgtctgcacttggtgctcctgcccacaccagccactttggtgacaatgacccttccaagaatctttggttcaaggagcaccagttccctcttcattcttgaagcagggagaaattgacctttgccttgtcgcccaggaagtggggctcggcacccataactaacacctcccacccttggaaaccatgtcttctgggggtgagatgaccattctgggtctaagactgtttcaaagaagagctcatagactgactggtccagaagacagagggtacaacagtggcatcacagtgacagtgtcatggggagctgggcgggcccagccaaaccctccttcttcctagagcccagccagcaggcaggagttcctggaccctcaggacagtgaacttccagacctcagggcaggtctatgggccactgcaggagatgagaccagccttctgtgttcacctaacgatttatactgtgtatctgtctttgatggaattttgtaactttttatatttttttatgcaaaagcagcttcttaacagatggcattttctgtgactctaggcctcacaaaagagccagagttctggacccatgtttggagcatttgtagccttattctcttgcgtgtgaatctcttaccctgaaaaaaagccataatgaattaagccagactgaccacttgcttggagtgtgtgcttgaaaaaaccagagcaatactgttgggtattgtatcaggcttcagtacaaactggtaacaccaatgtggatcctgacagctttcagttttagcaaaaatacacgtgaaatctg

SEQ ID NO: 119877 - DNA, 615 bp, Homo sapiens
  Payload ID: 3504
  Gene Symbol: CMTM3
  Gene Name: CKLF-like MARVEL transmembrane domain containing 3
  Uniprot ID: Q96MX0
  ENST ID: ENST00000565922
  CDS Start-End: 75-254
ccgggtttccgcttccctccgggcgcgagaagaggggagccaggccgagccccggccctaccgccgccgccgccatgtggcccccagaccccgaccccgacccggaccccgagcctgccggcggctcccgtcccggccccgcggtccccgggctccgcgccctgctgccggcgcgggctttcctctgctctctcaaaggccccggtgggtttgtctgcacttggtgctcctgcccacaccagccactttggtgacaatgacccttccaagaatctttggttcaaggagcaccagttccctcttcattcttgaagcagggagaaattgacctttgccttgtcgcccaggaagtggggctcggcacccataactaacacctcccacccttggaaaccatgtcttctgggggtgagatgaccattctgggtctaagactgtttcaaagaagagctcatagactgactggtccagaagacagagggtacaacagtggcatcacagtgacagtgtcatggggagctgggcgggcccagccaaaccctccttcttcctagagcccagccagcaggcaggagttcctggaccctcaggacagtgaacttccagacctcaggg

SEQ ID NO: 119878 - DNA, 460 bp, Homo sapiens
  Payload ID: 3504
  Gene Symbol: CMTM3
  Gene Name: CKLF-like MARVEL transmembrane domain containing 3
  ENST ID: ENST00000563672
  CDS Start-End: 112-460
agactgccggtgaagagggacaaggacaacccgcagcccgggtttccgcttccctccgggcgcgagaagaggggagccaggccgagccccggccctaccgccgccgccgccatgtggcccccagaccccgaccccgacccggaccccgagcctgccggcggctcccgtcccggccccgcggtccccgggctccgcgccctgctgccggcgcgggctttcctctgctctctcaaaggccgcctcctgctggccgagtcgggtctctcattcatcacttttatctgctatgtggcgtcctcagcatctgccttcctcacagcgcctctgctggagttcctgctggccttgtacttcctctttgctgatgccatgcagctgaatgacaagtggcagggcttgtgctggcccatgatggacttcctgcgctgtgtcaccgcggccctcatctactttgctatct

SEQ ID NO: 119879 - DNA, 824 bp, Homo sapiens
  Payload ID: 3504
  Gene Symbol: CMTM3
  Gene Name: CKLF-like MARVEL transmembrane domain containing 3
  ENST ID: ENST00000564060
  CDS Start-End: 75-527
ccgggtttccgcttccctccgggcgcgagaagaggggagccaggccgagccccggccctaccgccgccgccgccatgtggcccccagaccccgaccccgacccggaccccgagcctgccggcggctcccgtcccggccccgcggtccccgggctccgcgccctgctgccggcgcgggctttcctctgctctctcaaaggccgcctcctgctggccgagtcgggtctctcattcatcacttttatctgctatgtggcgtcctcagcatctgccttcctcacagcgcctctgctggagttcctgctggccttgtacttcctctttgctgatgccatgcagctgaatgacaagtggcagggcttgtgctggcccatgatggtgtttggcttctttgctaccatcgtgtttgcaactgatttctacctgatctttaacgacgtggccaaattcctcaaacaaggggactctgcagatgagaccacagcccacaagacagaagaagagaattccgactcggactctgactgaaggcctggcgggtgccttggcaacctgagccacacaggcctccacccctgcgcctcacaggggtcgctggcgttggagcggaggcctggacttctgagttgcagagggggctgcggacacagcaggccccctacagcctcaggttctgcctgagcccagcctaccaggcttgcccctcagctcagcactgttgaccacgctgcgtatgagggcatcttgggtatcccactccttctccccatttctgtcccacaggccttcagccctttaacgtctctgccaaaaaccagcacaagg

SEQ ID NO: 119880 - DNA, 572 bp, Homo sapiens
  Payload ID: 3504
  Gene Symbol: CMTM3
  Gene Name: CKLF-like MARVEL transmembrane domain containing 3
  ENST ID: ENST00000566121
  CDS Start-End: 159-449
ttctttgtcctctggacaccggaggcgcccgcactgtccgctgtgggggtctctcattcatcacttttatctgctatgtggcgtcctcagcatctgccttcctcacagcgcctctgctggagttcctgctggccttgtacttcctctttgctgatgccatgcagctgaatgacaagtggcagggcttgtgctggcccatgatggacttcctgcgctgtgtcaccgcggccctcatctactttgctatctccatcacggccatcgccaagtactcggatggggcttccaaagccgctggggtgtttggcttctttgctaccatcgtgtttgcaactgatttctacctgatctttaacgacgtggccaaattcctcaaacaaggggactctgcagatgagaccacagcccacaagacagaagaagagaattccgactcggactctgactgaaggcctggcgggtgccttggcaacctgagccacacaggcctccacccctgcgcctcacaggggtcgctggcgttggagcggaggcctggacttctgagttgcagagggggctgcggacacagc

SEQ ID NO: 119881 - DNA, 643 bp, Homo sapiens
  Payload ID: 3504
  Gene Symbol: CMTM3
  Gene Name: CKLF-like MARVEL transmembrane domain containing 3
  ENST ID: ENST00000565003
  CDS Start-End: 170-460
gctgccggcgcgggctttcctctgctctctcaaaggccgcctcctgctggccgagtcgggtctctcattcatcacttttatctgctatgtggcgtcctcagcatctgccttcctcacagcgcctctgctggagttcctgctggccttgtacttcctctttgctgatgccatgcagctgaatgacaagtggcagggcttgtgctggcccatgatggacttcctgcgctgtgtcaccgcggccctcatctactttgctatctccatcacggccatcgccaagtactcggatggggcttccaaagccgctggggtgtttggcttctttgctaccatcgtgtttgcaactgatttctacctgatctttaacgacgtggccaaattcctcaaacaaggggactctgcagatgagaccacagcccacaagacagaagccaggtgctggggccatggggatttgtgaatcccagaaaccgtccttctgctgaaaatgaatgccactcatcccatcccgtcccttggcaaatattaggttagagctcccaggcggtttcctcaggctctgcaacctgctcccagttgcccgcagcaagtgatcccagacaaccagcccagggaccaattagtaaacgtcagtggaaacttg

SEQ ID NO: 119882 - DNA, 687 bp, Homo sapiens
  Payload ID: 3504
  Gene Symbol: CMTM3
  Gene Name: CKLF-like MARVEL transmembrane domain containing 3
  ENST ID: ENST00000568477
  CDS Start-End: 266-556
cggggactcgggcaactcggacctccgggactcccgggccgcagcggggtccgctttcctgcgagcgggtagtgcgggccggggcctcgacctgcggggccgagccggcggggggccgtgcggagcgggagggatcccccacccccgggactggggtctctcattcatcacttttatctgctatgtggcgtcctcagcatctgccttcctcacagcgcctctgctggagttcctgctggccttgtacttcctctttgctgatgccatgcagctgaatgacaagtggcagggcttgtgctggcccatgatggacttcctgcgctgtgtcaccgcggccctcatctactttgctatctccatcacggccatcgccaagtactcggatggggcttccaaagccgctggggtgtttggcttctttgctaccatcgtgtttgcaactgatttctacctgatctttaacgacgtggccaaattcctcaaacaaggggactctgcagatgagaccacagcccacaagacagaagaagagaattccgactcggactctgactgaaggcctggcgggtgccttggcaacctgagccacacaggcctccacccctgcgcctcacaggggtcgctggcgttggagcggaggcctggacttctgagttgcagagggggctgcggacacagcaggccccc

SEQ ID NO: 119883 - DNA, 1797 bp, Homo sapiens
  Payload ID: 3504
  Gene Symbol: CMTM3
  Gene Name: CKLF-like MARVEL transmembrane domain containing 3
  ENST ID: ENST00000460097
  CDS Start-End: 252-542
aagaaaactccggcccccaagaaaaagagagggcatgggttgcggagccgacatcacggccggggtctttgctgtttagacgcctgggttcccggatcccagacacgcgcacgggcaggaagttagaccggagacagcgaggtctctcattcatcacttttatctgctatgtggcgtcctcagcatctgccttcctcacagcgcctctgctggagttcctgctggccttgtacttcctctttgctgatgccatgcagctgaatgacaagtggcagggcttgtgctggcccatgatggacttcctgcgctgtgtcaccgcggccctcatctactttgctatctccatcacggccatcgccaagtactcggatggggcttccaaagccgctggggtgtttggcttctttgctaccatcgtgtttgcaactgatttctacctgatctttaacgacgtggccaaattcctcaaacaaggggactctgcagatgagaccacagcccacaagacagaagaagagaattccgactcggactctgactgaaggcctggcgggtgccttggcaacctgagccacacaggcctccacccctgcgcctcacaggggtcgctggcgttggagcggaggcctggacttctgagttgcagagggggctgcggacacagcaggccccctacagcctcaggttctgcctgagcccagcctaccaggcttgcccctcagctcagcactgttgaccacgctgcgtatgagggcatcttgggtatcccactccttctccccatttctgtcccacaggccttcagccctttaacgtctctgccaaaaaccagcacaaggagacaaagcagagccttgtctgtatctgggcagcaggtgttccatgctgctaggtggcgggggtcgggggtcttctgtttcactaacaggaacaaagacagaaaccatgacagggctgccccgccaggccccggtgggtttgtctgcacttggtgctcctgcccacaccagccactttggtgacaatgacccttccaagaatctttggttcaaggagcaccagttccctcttcattcttgaagcagggagaaattgacctttgccttgtcgcccaggaagtggggctcggcacccataactaacacctcccacccttggaaaccatgtcttctgggggtgagatgaccattctgggtctaagactgtttcaaagaagagctcatagactgactggtccagaagacagagggtacaacagtggcatcacagtgacagtgtcatggggagctgggcgggcccagccaaaccctccttcttcctagagcccagccagcaggcaggagttcctggaccctcaggacagtgaacttccagacctcagggcaggtctatgggccactgcaggagatgagaccagccttctgtgttcacctaacgatttatactgtgtatctgtctttgatggaattttgtaactttttatatttttttatgcaaaagcagcttcttaacagatggcattttctgtgactctaggcctcacaaaagagccagagttctggacccatgtttggagcatttgtagccttattctcttgcgtgtgaatctcttaccctgaaaaaaagccataatgaattaagccagactgaccacttgcttggagtgtgtgcttgaaaaaaccagagcaatactgttgggtattgtatcaggcttcagtacaaactggtaacaccaatgtggatcctgacagctttcagttttagcaaaaatacacgtgaaatctgactaccatttaa

SEQ ID NO: 119884 - DNA, 769 bp, Homo sapiens
  Payload ID: 3504
  Gene Symbol: CMTM3
  Gene Name: CKLF-like MARVEL transmembrane domain containing 3
  ENST ID: ENST00000565666
  CDS Start-End: 327-566
ggcatgggttgcggagccgacatcacggccggggtctttgctgtttagacgcctgggttcccggatcccagacacgcgcacgggcaggaagttagaccggagacagcgagtatagacagcccttctggataggggcagacgggtgggagctccgaaggggtgccggggcggtgatcgggaggtctccagcggcccgaaccagggtgaagaagaagggtctctcattcatcacttttatctgctatgtggcgtcctcagcatctgccttcctcacagcgcctctgctggagttcctgctggccttgtacttcctctttgctgatgccatgcagctgaatgacaagtggcagggcttgtgctggcccatgatggacttcctgcgctgtgtcaccgcggccctcatctactttgctatctccatcacggccatcgccaagtactcggatggggcttccaaagccgctggggggtctgtgcctgacactcgggctgtttgtccaagcagatctgaaatgggccgtgaggctggggcagcagcctcccggagcagggagtcagccctgtgatgcatcccatccaccctgtccacaggtgtttggcttctttgctaccatcgtgtttgcaactgatttctacctgatctttaacgacgtggccaaattcctcaaacaaggggactctgcagatgagaccacagcccacaagacagaaggtaagcggctgccctgatcaccccagcagtgctgcaacaggggcctgccctccctcg

SEQ ID NO: 119885 - DNA, 1950 bp, Homo sapiens
  Payload ID: 3504
  Gene Symbol: CMTM3
  Gene Name: CKLF-like MARVEL transmembrane domain containing 3
  ENST ID: ENST00000566756
  CDS Start-End: 66-563
cgcttccctccgggcgcgagaagaggggagccaggccgagccccggccctaccgccgccgccgccatgtggcccccagaccccgaccccgacccggaccccgagcctgccggcggctcccgtcccggccccgcggtccccgggctccgcgccctgctgccggcgcgggctttcctctgctctctcaaaggccgcctcctgctggccgagtcgggtctctcattcatcacttttatctgctatgtggcgtcctcagcatctgccttcctcacagcgcctctgctggagttcctgctggccttgtacttcctctttgctgatgccatgcagctgaatgacaagtggcagggcttgtgctggcccatgatggacttcctgcgctgtgtcaccgcggccctcatctactttgctatctccatcacggccatcgccaagtactcggatggggcttccaaagccgctggggggtctgtgcctgacactcgggctgtttgtccaagcagatctgaaatgggccgtgaggctggggcagcagcctcccggagcagggagtcagccctgtgatgcatcccatccaccctgtccacaggtgtttggcttctttgctaccatcgtgtttgcaactgatttctacctgatctttaacgacgtggccaaattcctcaaacaaggggactctgcagatgagaccacagcccacaagacagaagaagagaattccgactcggactctgactgaaggcctggcgggtgccttggcaacctgagccacacaggcctccacccctgcgcctcacaggggtcgctggcgttggagcggaggcctggacttctgagttgcagagggggctgcggacacagcaggccccctacagcctcaggttctgcctgagcccagcctaccaggcttgcccctcagctcagcactgttgaccacgctgcgtatgagggcatcttgggtatcccactccttctccccatttctgtcccacaggccttcagccctttaacgtctctgccaaaaaccagcacaaggagacaaagcagagccttgtctgtatctgggcagcaggtgttccatgctgctaggtggcgggggtcgggggtcttctgtttcactaacaggaacaaagacagaaaccatgacagggctgccccgccaggccccggtgggtttgtctgcacttggtgctcctgcccacaccagccactttggtgacaatgacccttccaagaatctttggttcaaggagcaccagttccctcttcattcttgaagcagggagaaattgacctttgccttgtcgcccaggaagtggggctcggcacccataactaacacctcccacccttggaaaccatgtcttctgggggtgagatgaccattctgggtctaagactgtttcaaagaagagctcatagactgactggtccagaagacagagggtacaacagtggcatcacagtgacagtgtcatggggagctgggcgggcccagccaaaccctccttcttcctagagcccagccagcaggcaggagttcctggaccctcaggacagtgaacttccagacctcagggcaggtctatgggccactgcaggagatgagaccagccttctgtgttcacctaacgatttatactgtgtatctgtctttgatggaattttgtaactttttatatttttttatgcaaaagcagcttcttaacagatggcattttctgtgactctaggcctcacaaaagagccagagttctggacccatgtttggagcatttgtagccttattctcttgcgtgtgaatctcttaccctgaaaaaaagccataatgaattaagccagactgaccacttgcttggagtgtgtgcttgaaaaaaccagagcaatactgttgggtattgtatcaggcttcagtacaaactggtaacaccaatgtggatcctgacagctt

SEQ ID NO: 119886 - DNA, 3414 bp, Homo sapiens
  Payload ID: 3505
  Gene Symbol: CMTM4
  Gene Name: CKLF-like MARVEL transmembrane domain containing 4
  Uniprot ID: Q8IZR5
  ENST ID: ENST00000330687
  CDS Start-End: 183-887
agcggaccgagccgcagccgcagccgggcggcgggcgagaggcggcggcggcgggcgggccgcgggcagtcagtcgggcggcggcggcggcggcggcggcggcgatgcggcggccccgctgagtccgcccgctcctggcgccgggagccagccgcgcgaggcggcccgggccgggcggcagcatgcggagcggcgaggagctggacggcttcgagggcgaggcctcgagcacctccatgatctcgggcgccagcagcccgtaccagcccaccaccgagccggtgagccagcgccgcgggctggccggcctgcgctgcgaccccgactacctgcgcggcgcgctcggccgcctcaaggtcgcccaagtgatcttggccctgattgcattcatctgcatagagaccatcatggcatgctccccgtgtgaaggcctctacttttttgagtttgtgagctgcagtgcgtttgtggtgactggcgtcttgctgattatgttcagtctcaacctgcacatgaggatcccccagatcaactggaatctgacagatttggtcaacactggactcagcgctttccttttctttattgcttcaatcgtactggctgctttaaaccatagagccggagcagaaattgctgccgtgatatttggcttcttggcgactgcggcatatgcagtgaacacattcctggcagtgcagaaatggagagtcagcgtccgccagcagagcaccaatgactacatccgagcccgcacggagtccagggatgtggacagtcgccctgagatccagcgcctggacactttttcctactccacaaacgtaacagtaaggaaaaaatcacccacaaacctgctgagtttgaatcactggcaacttgcctagaaaagttcagatgatgggtccttgaactgtgtatctatttcatagggtaagtttgttgtctatgtttgtttttttatgctgaggctttaattcaggtgacttgctatctagacacctggggtggcgtgttttctttgggatgcataatacacaaaggccagggagcctttggcttggacccccagggagctattgaaacttttaaagtttgagtttaggagtaagaacatatctcagaccaccttagtcagctttgctgatgggatttagggccaggtcagagtttcttttcataactgcctgaaaagagagatggtgtgaaacaagattctgataatggtttgtgtgagatttgatcatagtctaaaactatcacgtctgagttgccttaggatgacagtgctgacacccagtaggaagtatcccatttttatcaggaaagtcagtcacgcgtagggatggtgaggagacgcgtagggatggtgaggaggggagaggagggagacctgctggtgcccttgcaccagggtgaggcctgactcacgctgcttccccccacaggccctgctttgcttgcctgctttttccagaatcgattttgcaagcttcaagattctgttcccctcttcgcagaagtgaggaaggcaaatactcagggtttgaagggagacctggccggcctgagggctggcagatgtgagggcaggacacctgggatggactcgtaggctgacccaggcccaaagggggctgcctgttcccaactctttcactctgtaacccattttaaaatgagtttttgaatcttgcctcaaattgacctacttggataaaatcagtgcttttcctaacttgattttgtttgacgtggttccctctaagagaatggtaggaattgaaactatttgtatatgttgaaatttgtaggggttcaggaacccatggcagaaacactaaactatttatttacaagtatgactatttttttttcaaagtaggcaattctttgtatattttaaggcaaataatcacttcacctctggtgccttccatgcgtcgcataagcactcttgtcaatcatggaattggaaaaaaagatgtacatttagttaaacaagataacactatttttgtagcatgattttagattgtgtccttttaatattgttttcaacaatggtagttttgaggttttggccattttctctttacacttcgtatgtattttaaagaagaaaaaaaacaaaaaaaattccctggctattcctctttcctctctgctgctgcttctcctgcatcttgttcctgcttatttaaatagtctgagagtaagagtatatttctgtgaaataattataagtcagtataattgcatttggcattttttaaccacttgctcagtttggagccactgctcacctcaaacagtacaaagaaagtggttccatattttacaaacagaagagtagcatcagagccctgacctcctgtctttgggtgtaaaatggtgagaggccggtgtccggctccttcccctgtggtttgggctggtgaactgagcccaagtgtattctctggcctgggccccttccagaatcagtgcgagcgtcctgcagaggcatggccttcctgccactgcagagtgggaagcttcctgggggacctcagccagctccggggctctcatcttccactcggatctcagattggttcgttgtggatgctctggctaggctcggcggccttttccaggcttcaggcctgaacaaaacaggctgtttgctgtgaggagctagatgacaccaagacacagacacgtactcttcaccggctccttttgcttctccttcctgcaggacgtgagttatgtctggtcccaaaacccttgagtaaactagctgagccattgcaaatgaaggtacagatggattgaaacataaaattgtagcttttggtgtccttctgaagggtcagaatatgtaattatttgataaccaaggaagtcaagtcagatggctaagtagtaactttccaatatgatttctccgtggtacttcacctggtggcacttttggggggcaatgttaacaactatcacattttactcatcaagtctctttcatttcggcagtttaaagacacaactgtgggctttctgaggcgatgcccgttgggcaaacttaggtttatgtgtttggtttttcagctgacgtggaagccctgggtgggcgtcccctggctggcctggcttttgggttcaagtctgtatgtatggagtgggttggggccccaaagctttgctgctattgatttgtccccgacagcaggcaaagcctcacattgccctcaattttccccctttcatttgaaggaccagtttttcatggtacttgtcttgatctttttcatagtgttcaaatctgtatttttgtatgtagagggaaataattttctcaacactaatcgttaataactattgtattaaattgtcatgaaggaacttgtttaataaatggacgtgtaagga

SEQ ID NO: 119887 - DNA, 1187 bp, Homo sapiens
  Payload ID: 3505
  Gene Symbol: CMTM4
  Gene Name: CKLF-like MARVEL transmembrane domain containing 4
  Uniprot ID: Q8IZR5
  ENST ID: ENST00000394106
  CDS Start-End: 183-809
agcggaccgagccgcagccgcagccgggcggcgggcgagaggcggcggcggcgggcgggccgcgggcagtcagtcgggcggcggcggcggcggcggcggcggcgatgcggcggccccgctgagtccgcccgctcctggcgccgggagccagccgcgcgaggcggcccgggccgggcggcagcatgcggagcggcgaggagctggacggcttcgagggcgaggcctcgagcacctccatgatctcgggcgccagcagcccgtaccagcccaccaccgagccggtgagccagcgccgcgggctggccggcctgcgctgcgaccccgactacctgcgcggcgcgctcggccgcctcaaggtcgcccaagtgatcttggccctgattgcattcatctgcatagagaccatcatggcatgctccccgtgtgaaggcctctacttttttgagtttgtgagctgcagtgcgtttgtggtgactggcgtcttgctgattatgttcagtctcaacctgcacatgaggatcccccagatcaactggaatctgacagatttggtcaacactggactcagcgctttccttttctttattgcttcaatcgtactggctgctttaaaccatagagccggagcagaaattgctgccgtgatatttggcttcttggcgactgcggcatatgcagtgaacacattcctggcagtgcagaaatggagagtcagcgtccgccagcagagcaccaatgactacatccgagcccgcacggagtccagggatgtggacagtcgccctgagatccagcgcctggacacgtgaggacctgcctggatcctcctccctcccgtcctcgtgcctgtctctcagtcaagttttctttcccttgtcctgtcagatttccatgtgattcagttgaattttgtcctctttggtaaaagttcattttgggaaagggtttcccgagtggcccagtgggcgggtccgcggtggagttgggaggcccacgttcctcagcgtttggggctgtggagcagccggcgtcactgcccaggtccacttgaggtcttacctgccctgaagcacaggcttcctttgactctgagccaccttgtcgtgtgtatttgtaacaagactttggattaaatggggctgctaagaggggggaaatatgaaggaatgaagggacagcattggaac

SEQ ID NO: 119888 - DNA, 1023 bp, Homo sapiens
  Payload ID: 3505
  Gene Symbol: CMTM4
  Gene Name: CKLF-like MARVEL transmembrane domain containing 4
  Uniprot ID: Q8IZR5
  ENST ID: ENST00000563952
  CDS Start-End: 183-722
agcggaccgagccgcagccgcagccgggcggcgggcgagaggcggcggcggcgggcgggccgcgggcagtcagtcgggcggcggcggcggcggcggcggcggcgatgcggcggccccgctgagtccgcccgctcctggcgccgggagccagccgcgcgaggcggcccgggccgggcggcagcatgcggagcggcgaggagctggacggcttcgagggcgaggcctcgagcacctccatgatctcgggcgccagcagcccgtaccagcccaccaccgagccgatcttggccctgattgcattcatctgcatagagaccatcatggcatgctccccgtgtgaaggcctctacttttttgagtttgtgagctgcagtgcgtttgtggtgactggcgtcttgctgattatgttcagtctcaacctgcacatgaggatcccccagatcaactggaatctgacagatttggtcaacactggactcagcgctttccttttctttattgcttcaatcgtactggctgctttaaaccatagagccggagcagaaattgctgccgtgatatttggcttcttggcgactgcggcatatgcagtgaacacattcctggcagtgcagaaatggagagtcagcgtccgccagcagagcaccaatgactacatccgagcccgcacggagtccagggatgtggacagtcgccctgagatccagcgcctggacacgtgaggacctgcctggatcctcctccctcccgtcctcgtgcctgtctctcagtcaagttttctttcccttgtcctgtcagatttccatgtgattcagttgaattttgtcctctttggtaaaagttcattttgggaaagggtttcccgagtggcccagtgggcgggtccgcggtggagttgggaggcccacgttcctcagcgtttggggctgtggagcagccggcgtcactgcccaggtccacttgaggtcttacctgccctgaagcacaggcttcctttgactctgagccaccttgtcgtgtgta

SEQ ID NO: 119889 - DNA, 618 bp, Homo sapiens
  Payload ID: 3505
  Gene Symbol: CMTM4
  Gene Name: CKLF-like MARVEL transmembrane domain containing 4
  ENST ID: ENST00000561680
  CDS Start-End: 1-423
tttgtggtgactggcgtcttgctgattatgttcagtctcaacctgcacatgaggatcccccagatcaactggaatctgacagatttggtcaacactggactcagcgctttccttttctttattgcttcaatcgtactggctgctttaaaccatagagccggagcagaaattgctgccgtgatatttggcttcttggcgactgcggcatatgcagtgaacacattcctggcagtgcagaaatggagagtcagcgtccgccagcagagcaccaatgactacatccgagcccgcacggagtccagggatgtggacagtcgccctgagatccagcgcctggacactttttcctactccacaaacgtaacagtaaggaaaaaatcacccacaaacctgctgagtttgaatcactggcaacttgcctagaaaagttcagatgatgggtccttgaactgtgtatctatttcatagggccctgctttgcttgcctgctttttccagaatcgattttgcaagcttcaagattctgttcccctcttcgcagaagtgaggaaggcaaatactcagggtttgaagggagacctggccggcctgagggctggcagatgtgagggcaggaca

SEQ ID NO: 119890 - DNA, 725 bp, Homo sapiens
  Payload ID: 3506
  Gene Symbol: CMTM5
  Gene Name: CKLF-like MARVEL transmembrane domain containing 5
  Uniprot ID: Q96DZ9
  ENST ID: ENST00000342473
  CDS Start-End: 216-440
agcagaggcactctgggcagctgggtgagggcccatctgggcaaggcccccagcgcctgccttctctcccggggccctgtgggcaagcctcctgcttcactttcaggtttctcgaagtgccttcttgctcctgtctgtttccccatcctgccagatttctgtttctcttgctgggcttttggcagtagggggctgtgttggtgggccctacgaagatgctcagtgctcgagatcgccgggaccggcaccctgaggagggggtagttgcagagctccagggcttcgcggtggacaaggccttcctcacctcccacaagggcatcctgctggaaaccgagctggtttttggcatcatcctggtttccatctttgcctatgatgccttcaagatctaccggactgagatggcacccggggccagccagggggaccagcagtgactctggggctacctggctcctaggcccagccagccagagaggacagtggagcccagacacgtctccttgggattcactagcccccagcccgccaaaccccaccccagccctacacagcagtctggcctgagacgtcactggggacttatctgtggagcctggtgctccaggatgtggcttctcatgaagctctggccagaggaggggaacttattgggggagggggggtggaggggaggaatctggacctctaagtcattcccaaattaaaatattcaaattcta

SEQ ID NO: 119891 - DNA, 1173 bp, Homo sapiens
  Payload ID: 3506
  Gene Symbol: CMTM5
  Gene Name: CKLF-like MARVEL transmembrane domain containing 5
  Uniprot ID: Q96DZ9
  ENST ID: ENST00000339180
  CDS Start-End: 217-888
cagcagaggcactctgggcagctgggtgagggcccatctgggcaaggcccccagcgcctgccttctctcccggggccctgtgggcaagcctcctgcttcactttcaggtttctcgaagtgccttcttgctcctgtctgtttccccatcctgccagatttctgtttctcttgctgggcttttggcagtagggggctgtgttggtgggccctacgaagatgctcagtgctcgagatcgccgggaccggcaccctgaggagggggtagttgcagagctccagggcttcgcggtggacaaggccttcctcacctcccacaagggcatcctgctggaaaccgagctggccctgaccctcatcatcttcatctgcttcacggcctccatctctgcctacatggccgcggcgctactggagttcttcatcacacttgccttcctcttcctctatgccacccagtactaccagcgcttcgaccgaattaactggccctgtctgctgcagggccacgggcaatcaggaggaccacatccgctagatctactctcccactcagcaaaggtccagccccagccctggcctggcttgacccccccgggctggcatactccagccgctgtcccctgggttccagccccagcgcctggcttctggtcctggttgctctggttcatctgcttccactccctgggtagcagtgacttcctgcgctgtgtcagtgccatcatcatcttcctggtggtctcctttgcagctgtgacctcccgggacggagctgccattgctgcttttgtttttggcatcatcctggtttccatctttgcctatgatgccttcaagatctaccggactgagatggcacccggggccagccagggggaccagcagtgactctggggctacctggctcctaggcccagccagccagagaggacagtggagcccagacacgtctccttgggattcactagcccccagcccgccaaaccccaccccagccctacacagcagtctggcctgagacgtcactggggacttatctgtggagcctggtgctccaggatgtggcttctcatgaagctctggccagaggaggggaacttattgggggagggggggtggaggggaggaatctggacctctaagtcattcccaaattaaaatattcaaattcta

SEQ ID NO: 119892 - DNA, 1200 bp, Homo sapiens
  Payload ID: 3506
  Gene Symbol: CMTM5
  Gene Name: CKLF-like MARVEL transmembrane domain containing 5
  Uniprot ID: Q96DZ9
  ENST ID: ENST00000359320
  CDS Start-End: 445-915
gttagagaagggggacacaaatgtcttcaggcttaggtccctgggggctcccagtcctgcccctgttcctctactcacatcccagctcctcccagtttcttttcggacctcctcctctccccttccttctctattccaggctgggttgggctctaagcaaggggagggattagagcctccttcctctctgcccctccccatgggtctctagggggctggtgcaggcagcagcagaggcactctgggcagctgggtgagggcccatctgggcaaggcccccagcgcctgccttctctcccggggccctgtgggcaagcctcctgcttcactttcaggtttctcgaagtgccttcttgctcctgtctgtttccccatcctgccagatttctgtttctcttgctgggcttttggcagtagggggctgtgttggtgggccctacgaagatgctcagtgctcgagatcgccgggaccggcaccctgaggagggggtagttgcagagctccagggcttcgcggtggacaaggccttcctcacctcccacaagggcatcctgctggaaaccgagctggccctgaccctcatcatcttcatctgcttcacggcctccatctctgcctacatggccgcggcgctactggagttcttcatcacacttgccttcctcttcctctatgccacccagtactaccagcgcttcgaccgaattaactggccctgtctggacttcctgcgctgtgtcagtgccatcatcatcttcctggtggtctcctttgcagctgtgacctcccgggacggagctgccattgctgcttttgtttttggcatcatcctggtttccatctttgcctatgatgccttcaagatctaccggactgagatggcacccggggccagccagggggaccagcagtgactctggggctacctggctcctaggcccagccagccagagaggacagtggagcccagacacgtctccttgggattcactagcccccagcccgccaaaccccaccccagccctacacagcagtctggcctgagacgtcactggggacttatctgtggagcctggtgctccaggatgtggcttctcatgaagctctggccagaggaggggaacttattgggggagggggggtggaggggaggaatctggacctctaagtcattcccaaattaaaatattcaaattcta

SEQ ID NO: 119893 - DNA, 378 bp, Homo sapiens
  Payload ID: 3506
  Gene Symbol: CMTM5
  Gene Name: CKLF-like MARVEL transmembrane domain containing 5
  Uniprot ID: Q96DZ9
  ENST ID: ENST00000382809
  CDS Start-End: 1-378
atgctcagtgctcgagatcgccgggaccggcaccctgaggagggggtagttgcagagctccagggcttcgcggtggacaaggccttcctcacctcccacaagggcatcctgctggaaaccgagctggccctgaccctcatcatcttcatctgcttcacggcctccatctctgcctacatggccgcggcgctactggagttcttcatcacacttgccttcctcttcctctatgccacccagtactaccagcgcttcgaccgaattaactggccctgtctggtttttggcatcatcctggtttccatctttgcctatgatgccttcaagatctaccggactgagatggcacccggggccagccagggggaccagcagtga

SEQ ID NO: 119894 - DNA, 818 bp, Homo sapiens
  Payload ID: 3506
  Gene Symbol: CMTM5
  Gene Name: CKLF-like MARVEL transmembrane domain containing 5
  Uniprot ID: Q96DZ9
  ENST ID: ENST00000397227
  CDS Start-End: 216-533
agcagaggcactctgggcagctgggtgagggcccatctgggcaaggcccccagcgcctgccttctctcccggggccctgtgggcaagcctcctgcttcactttcaggtttctcgaagtgccttcttgctcctgtctgtttccccatcctgccagatttctgtttctcttgctgggcttttggcagtagggggctgtgttggtgggccctacgaagatgctcagtgctcgagatcgccgggaccggcaccctgaggagggggtagttgcagagctccagggcttcgcggtggacaaggccttcctcacctcccacaagggcatcctgctggaaaccgagctggacttcctgcgctgtgtcagtgccatcatcatcttcctggtggtctcctttgcagctgtgacctcccgggacggagctgccattgctgcttttgtttttggcatcatcctggtttccatctttgcctatgatgccttcaagatctaccggactgagatggcacccggggccagccagggggaccagcagtgactctggggctacctggctcctaggcccagccagccagagaggacagtggagcccagacacgtctccttgggattcactagcccccagcccgccaaaccccaccccagccctacacagcagtctggcctgagacgtcactggggacttatctgtggagcctggtgctccaggatgtggcttctcatgaagctctggccagaggaggggaacttattgggggagggggggtggaggggaggaatctggacctctaagtcattcccaaattaaaatattcaaattcta

SEQ ID NO: 119895 - DNA, 831 bp, Homo sapiens
  Payload ID: 3506
  Gene Symbol: CMTM5
  Gene Name: CKLF-like MARVEL transmembrane domain containing 5
  ENST ID: ENST00000555731
  CDS Start-End: 190-546
gagggcccatctgggcaaggcccccagcgcctgccttctctcccggggccctgtgggcaagcctcctgcttcactttcaggtttctcgaagtgccttcttgctcctgtctgtttccccatcctgccagatttctgtttctcttgctgggcttttggcagtagggggctgtgttggtgggccctacgaagatgctcagtgctcgagatcgccgggaccggcaccctgaggagggggtagttgcagagctccagggcttcgcggtggacaaggccttcctcacctcccacaagggcatcctgctggaaaccgagctgtactaccagcgcttcgaccgaattaactggccctgtctggacttcctgcgctgtgtcagtgccatcatcatcttcctggtggtctcctttgcagctgtgacctcccgggacggagctgccattgctgcttttgtttttggcatcatcctggtttccatctttgcctatgatgccttcaagatctaccggactgagatggcacccggggccagccagggggaccagcagtgactctggggctacctggctcctaggcccagccagccagagaggacagtggagcccagacacgtctccttgggattcactagcccccagcccgccaaaccccaccccagccctacacagcagtctggcctgagacgtcactggggacttatctgtggagcctggtgctccaggatgtggcttctcatgaagctctggccagaggaggggaacttattgggggagggggggtggaggggaggaatctggacctctaagtcattcccaaattaaaatattcaaattcta

SEQ ID NO: 119896 - DNA, 3863 bp, Homo sapiens
  Payload ID: 3507
  Gene Symbol: CMTM6
  Gene Name: CKLF-like MARVEL transmembrane domain containing 6
  Uniprot ID: Q9NX76
  ENST ID: ENST00000205636
  CDS Start-End: 664-1215
cactttgagtctcattcaattcaaagatcatggtcctcagagaggcctttcctgaccactcagtttagtagtggccatttaagtagagcacccaattctccatccttttttccttctccttcctcttctcctcctcctccatcttctttttttttttaataaatttatcaagccaccagaaatgctgaatccattattttcgtatcatattttcacgtcacttatcactatctgaaattgctatccatctgttttcttgtttattgtctgtctctgttactagggatcctgtgattttgggtagtacttggctgtcacccaagtacctagaacggggttcactgcacaccgaaagtacgcaaaaatactaagtgaatgaatgtcaggaggatgaaagatggagggaggtgagaaatccatcaaaggctcacagaaagaactcaattcttggatgaaagtcggaagaatcccaacagctaacaagcaaatttgctgagagggggcggggcgggccaagggcgggggcgggaaggggcggagtcaggcggaagccggggagaaggcccaggaagtgacggccgcctcccggctaccggggacttctggagtccgagaagtcaacggcgcggttgctgcggccgccgcgctccccggcccgaggcgatggagaacggagcggtgtacagccccactacggaggaggacccgggccccgccagaggcccccggagcggcctcgctgcctactttttcatgggccggctcccattgctccggcgcgttctcaagggcttgcagctgttgctgtctctgctggccttcatctgtgaagaagttgtatcacaatgtactttatgtggaggactttatttttttgagtttgtaagctgcagtgcctttcttctgagtctccttatactgattgtgtattgcactccattttatgagagagttgataccacaaaagtaaaatcatcggatttttatattactttgggaacaggatgtgtgtttttgttggcatccatcatttttgtttccacacatgacaggacttcagctgagattgctgcaattgtgtttggatttatagcaagttttatgttcctacttgactttatcactatgctgtatgaaaaacgacaggagtcccagctgagaaaacctgaaaataccactagggctgaagccctcactgagccacttaatgcctaaagactctggggagcagatgttacctaaggtagtgaccctgcattgtggtgcctgagccctggcagaagctcttgtaaaatttgttaattgtttaaaccacttcttttggagagcaaggggaaggtcaagaaggcagttttatcaatattgtgtcagtcaccacaaagtaggccagataagttaaaaaaaatttttttttaaataataattgaaacttatctcaaatggagattttggtgggaggaggagaaaacaattgtttttaaatcacacagctcaacggttgataaatgattctgtcattctgttacaggtcattcttttactaggcttagcttccaaattatgctttatagctgtataaacatcgtgattatattcatctacttagaaattgttttatttttaaattaatttgcttagctgtttgttttgatgcttagattatgttctgttaatgggaatttaacatatttaagaaaccaatatttaaaatgttggtctaggtttttttccttaacatatattaccaggctttactgtatttcactcagccttaaatgttataatatttttggataacggttattaattctttgagaccttcgtatagcctataaaatgtatgggagatgttggtattttatgtgtataaaagcaacaatatcagcaacttcgtgtttatactgcaccttggttgttgatgtcaagtaaaaaaaagattgttttgtaacacataaaaaaatggaagaaactgataccacacctaaggaccaaagataagaaagactttttgcccaagacagtgaaagtaattataaaaacaagctttgaccacttaccaagtatctgaagagatgagttcatactatgatttagaaagtggttcaattcccctgttggcatatgattatttttactaaaattaatacagctctgtgggtcttccttagtgttttctttgaagccaatctgttttttttaggacaccagcctttggtttttcatctgttcgagatgcctcttctctgtctccttatcagatagaaatggagtcatgtgctgctgcttcatctagcagaggttggcctctggctctgacactttttgtcagttgtctttaggtggtcctgaatcttgggcccttttgattgtgaatactgtgtagcaggatcttgagagtccttgttcttacataggcattgctctagtttgtctttggcaaaaaaaaaaaaaaaaaaaagtaaatatccagggaaccctgcccagactaatactgttggtggcataagagaatcaagccattctcaagagataacttcataaccagaattgtctgttggctagcagctgtcacagataggcagggcacttgggatatgacctttctgtccaggtgattcacagactagacctttcttatcctcctcctagagttttgacttgggactctagtgttaagatgatgagcccgtgcatcaggtccttctgcactttggtggaagtctcccagggtaggtttcctatttgaaacagtggaatcatgtttccagtgataaagtttaatgacctcatccttttttttttttctcatctgccatttgtgtgtcttagatgggttttaattgcatgaatgtggctaatgtggttctcagaaattggtcagtatggcccaacatagcttctgctctgtcttactgactcaatacctttaggatttgtatcagagtttggatactagtgttagtggtggtgtcaccactacttaattgggagataatgaaaccaatcatggatgctgtttttattgggcatgtcatctaagagaggagaaatagctgggttttgggtctaattatgaataaggactgattcagaaaacgagtttatggtaggtagactaaagtttcacatcagactgtaccattgtgatttagacctatctaaaattcagagcatatcatctgggctacctcagggtcaccacccatgtattgggcttagtcaggattgacagatacattctcagctggcctgtcatataaaacatactgtcattgagcttaagctccgcttgttctgaggtttcacctccatgtgtttcattggtgcaaaagtggatctcttagttggtcacttaattctttctttttcagaaagatagtatgttcactggtatatttggtcactcttagaaccttccttcacattgttttttatgggacccatgaatggttagcctttcttttctattgtagaaggaaataaataggagtaaaaagaccattgtagtaaataagttcaaggggaacttgggaccagaaaccactgttatgtacaaaaaaatggcaaattcaataaactcaaatttaaaataatttttaaattaacagttatgataaattttatattttatacaaatagattgcttagaatggttctcaagaattataagagaaatgaactcacagtacaaaaattttataattactatacttgtgttttgtttgggggctgggaaatgtatttttacattgtagccaatcattttatatttgtcaatttaaatcttatgggtcttttttttttatctctcttgatgtcagattttatagtctttttaaataaatccatttaattaaaacgtt

SEQ ID NO: 119897 - DNA, 1214 bp, Homo sapiens
  Payload ID: 3508
  Gene Symbol: CMTM7
  Gene Name: CKLF-like MARVEL transmembrane domain containing 7
  Uniprot ID: Q96FZ5
  ENST ID: ENST00000349718
  CDS Start-End: 210-638
ccgggactgccgctacctttctggaaggcgccggccggccagtcaccggagggatcccgccagaggcggctccgcgtctccagcagcggggcagggacccgggcgccccgccctcgccagcgcccgcccccgcccgcccccggcccgccctctgtatctggcccctgggcagctgcccggggaggcggccagcgagctggggccgcgcaatgtcgcacggagccgggctcgtccgcaccacgtgcagcagcggcagcgcgctcggacccggggccggcgcggcccagcccagcgcgagccccttggaggggctgctggacctcagctacccccgcacccacgcggccctgctgaaagtggcgcaaatggtcaccctgctgattgccttcatctgtgtgcggagctccctgtggaccaactacagcgcctacagctactttgaagtggtcaccatttgcgacttgataatgatcctcgccttttacctggtccacctcttccgcttctaccgcgtgctcacctgtatcagctggcccctgtcgatctttggtttcatggccaccttcctctgcatggcaagcatatggctgtcctataagatctcgtgtgtaacccagtccacagatgcagccgtctgatgaggccacaacccctaggcccctcaggagctttgcagagaggaggacgtgtactccaggcgaggcctctggacctgtgttcctgtgccaaagtcctgtcaggctggtgggcaccaggaaaggcctgcaccctcttcctgctctcccaggaagccagctccctgagctcctgagccagccggaaactcttcctccagccttccggggagaacatccctcccattctgggaaaggaaagcagcctccagggaaatgttttctgccttcctgcttctagaaccacctcaggtactgatgaaccccacttagcacagctgaaggggtttgtgaatactcccgcctaaatcccttctacttcactcctcaggggagtgaagtgccttaagaaacaaagccctgtcctaatttatctagcttgtcagtccggtcttagagataccctctttcctgaagtgaggcgtgcctgtagaaacactatgtggtcagcctgtccccaaggagatcttgtgtctcctctccatctctgcctttgttaccagtgtgcatgtgtttgtgtgttttttaataaaatattga

SEQ ID NO: 119898 - DNA, 2038 bp, Homo sapiens
  Payload ID: 3508
  Gene Symbol: CMTM7
  Gene Name: CKLF-like MARVEL transmembrane domain containing 7
  Uniprot ID: Q96FZ5
  ENST ID: ENST00000334983
  CDS Start-End: 237-764
agtctaacttccgcgcatctacgagggccgggactgccgctacctttctggaaggcgccggccggccagtcaccggagggatcccgccagaggcggctccgcgtctccagcagcggggcagggacccgggcgccccgccctcgccagcgcccgcccccgcccgcccccggcccgccctctgtatctggcccctgggcagctgcccggggaggcggccagcgagctggggccgcgcaatgtcgcacggagccgggctcgtccgcaccacgtgcagcagcggcagcgcgctcggacccggggccggcgcggcccagcccagcgcgagccccttggaggggctgctggacctcagctacccccgcacccacgcggccctgctgaaagtggcgcaaatggtcaccctgctgattgccttcatctgtgtgcggagctccctgtggaccaactacagcgcctacagctactttgaagtggtcaccatttgcgacttgataatgatcctcgccttttacctggtccacctcttccgcttctaccgcgtgctcacctgtatcagctggcccctgtcggaacttctgcactatttaatcggtaccctgctcctcctcatcgcctccattgtggcagcttccaagagttacaaccagagcggactggtagccggagcgatctttggtttcatggccaccttcctctgcatggcaagcatatggctgtcctataagatctcgtgtgtaacccagtccacagatgcagccgtctgatgaggccacaacccctaggcccctcaggagctttgcagagaggaggacgtgtactccaggcgaggcctctggacctgtgttcctgtgccaaagtcctgtcaggctggtgggcaccaggaaaggcctgcaccctcttcctgctctcccaggaagccagctccctgagctcctgagccagccggaaactcttcctccagccttccggggagaacatccctcccattctgggaaaggaaagcagcctccagggaaatgttttctgccttcctgcttctagaaccacctcaggtactgatgaaccccacttagcacagctgaaggggtttgtgaatactcccgcctaaatcccttctacttcactcctcaggggagtgaagtgccttaagaaacaaagccctgtcctaatttatctagcttgtcagtccggtcttagagataccctctttcctgaagtgaggcgtgcctgtagaaacactatgtggtcagcctgtccccaaggagatcttgtgtctcctctccatctctgcctttgttaccagtgtgcatgtgtttgtgtgttttttaataaaatattgactcggccagttgcacaaggatttcttattgaaccagatgaaggctgtaaaacctggcctgaaacagtttccattcgagcttgtgtctggcccatggccctccacccgtgctctgtgtgtgccccttgctgaactgctggacttcaggttttctctccatcttgggggatagtatagcagggcagagttttaggtaaacatgtgcaggttctcaattatattcacgtcctccttctcctgcaataccaatcttctcattttggaaagagctttagagcaagctaagggttgtgtttacactatgatgattaatgatctcggcctaaatgtgctgtttcgctgatcttgagctgctcagttggctagaaaaaggagggatggaacaatgtttgagcaaccccgtgtgcaaggacctacattcacaaccacatctaatagcgatggtagtgactgcaagggggcaggttataggaccacatttttagaaatgaaatcggggctccatccccaggcacagggcaagccagtgaggagctgggctcaggatctaggtctgcctgactcccagccccatccttgcctctgctgagtgttgccggaaatggaagcagcccctgtgggctttgagctggagctctggggctactcttgtggctgctggccagctcggggcatcgggttctgtctgggatgatctaa

SEQ ID NO: 119899 - DNA, 976 bp, Homo sapiens
  Payload ID: 3508
  Gene Symbol: CMTM7
  Gene Name: CKLF-like MARVEL transmembrane domain containing 7
  ENST ID: ENST00000454304
  CDS Start-End: 19-474
gcgagctggggccgcgcaatgtcgcacggagccgggctcgtccgcaccacgtgcagcagcggcagcgcgctcggacccggggccggcgcggcccagcccagcgcgagccccttggaggggctgctggacctcagctacccccgcacccacgcggccctgctgaaagtggcgcaaatggtcaccctgctgattgccttcatctgtgtgcggagctccctgtggaccaactacagcgcctacagctactttgaagtggtcaccatttgcgacttgataatgatcctcgccttttacctggtccacctcttccgcttctaccgcgtgctcacctgtatcagctggcccctgtcggaacttctgcactatttaatcggtaccctgctcctcctcatcgcctccattgtggcagcttccaagagttacaaccagagcggactggtagccggagcggataatcaaagtccattggcttagccccagcttgcttgtaaatgtaaacccagaccaggcactgaagctgccaagagtgaagaccgagaggcctggctgccagccctgacctggcccaacctggaggactggggccagtggctgggcctcgcggggcttcctctctgcacctgatccaggatgaggtggttgggttagatgactctccaagctcctttctggccagagacatgaagggaacaagcacagagatgagaagcagacaggattgcccgagtaattagccctatggcctgtgaacttcctctcccctctctccactgcagatctttggtttcatggccaccttcctctgcatggcaagcatatggctgtcctataagatctcgtgtgtaacccagtccacagatgcagccgtctgatgaggccacaacccctaggcccctcaggagctttgcagagaggaggacgtgtactccaggcgaggcctctggacctgtgttcctgtgccaaagtcctgtcaggc

SEQ ID NO: 119900 - DNA, 780 bp, Homo sapiens
  Payload ID: 3508
  Gene Symbol: CMTM7
  Gene Name: CKLF-like MARVEL transmembrane domain containing 7
  ENST ID: ENST00000465248
  CDS Start-End: 1-492
gcggccctgctgaaagtggcgcaaatggtcaccctgctgattgccttcatctgtgtgcggagctccctgtggaccaactacagcgcctacagctactttgaagtggtcaccatttgcgacttgataatgatcctcgccttttacctggtccacctcttccgcttctaccgcgtgctcacctgtatcagctggcccctgtcgatgcagccgtctgatgaggccacaacccctaggcccctcaggagctttgcagagaggaggacgtgtactccaggcgaggcctctggacctgtgttcctgtgccaaagtcctgtcaggctggtgggcaccaggaaaggcctgcaccctcttcctgctctcccaggaagccagctccctgagctcctgagccagccggaaactcttcctccagccttccggggagaacatccctcccattctgggaaaggaaagcagcctccagggaaatgttttctgccttcctgcttctagaaccacctcaggtactgatgaaccccacttagcacagctgaaggggtttgtgaatactcccgcctaaatcccttctacttcactcctcaggggagtgaagtgccttaagaaacaaagccctgtcctaatttatctagcttgtcagtccggtcttagagataccctctttcctgaagtgaggcgtgcctgtagaaacactatgtggtcagcctgtccccaaggagatcttgtgtctcctctccatctctgcctttgttaccagtgtgcatgtgtttgtgtgttttttaa

SEQ ID NO: 119901 - DNA, 746 bp, Homo sapiens
  Payload ID: 3508
  Gene Symbol: CMTM7
  Gene Name: CKLF-like MARVEL transmembrane domain containing 7
  ENST ID: ENST00000487007
  CDS Start-End: 1-134
ccaagagttacaaccagagcggactggtagccggagcgatctttggtttcatggccaccttcctctgcatggcaagcatatggctgtcctataagatctcgtgtgtaacccagtccacagatgcagccgtctgatgaggccacaacccctaggcccctcaggagctttgcagagaggaggacgtgtactccaggcgaggcctctggacctgtgttcctgtgccaaagtcctgtcaggctggtgggcaccaggaaaggcctgcaccctcttcctgctctcccaggaagccagctccctgagctcctgagccagccggaaactcttcctccagccttccggggagaacatccctcccattctgggaaaggaaagcagcctccagggaaatgttttctgccttcctgcttctagaaccacctcagacaaactagagcaatgcctatgtaagaacaaggactctcaagatcctgctacacagtattcacaatcaaaagggcccaagattcaggaccacctaaagacaactgacaaaaagtgtcagagccagaggccaacctctgctagatgaagcagcagcacatgactccatttctatctgataaggagacagagaagaggcatctcgaacagatgaaaaaccaaaggctggtgtcctaaaaaaaacagattggcttcaaagaaaacactaaggaagacccacagagctgtattaattttagtaaaaataatcatatgccaacagggga

SEQ ID NO: 119902 - DNA, 1174 bp, Homo sapiens
  Payload ID: 3509
  Gene Symbol: CMTM8
  Gene Name: CKLF-like MARVEL transmembrane domain containing 8
  Uniprot ID: Q8IZV2
  ENST ID: ENST00000307526
  CDS Start-End: 295-816
ggcctccaccgccttccccggctgcccggcagcctcccctcgctcgctctcctcttcctctagggccccagcgcagctcgggagcccgcgcaccgaggcgctaggggcaccgcgcactagagggacacccgccgcgcctggacagcccccggcgggcgcccccctcgcacctcctgccccgcgcgggccgcgctcccctcccccgcgcctgtgtccccagggcgcagggccgcgcgtccagccccagacccgccggggtccctggggacgcgccagcccggcagtggctcgacgatggaggagccgcagcgcgcccgctcgcacacagtcaccaccaccgccagctccttcgcagagaacttctccaccagcagcagcagcttcgcctacgaccgggagttcctccgcaccctgcccggcttcctcatcgtggccgagatcgttctggggctgctggtatggacgcttattgctggaactgagtacttccgggtccccgcatttggctgggtcatgtttgtagctgtattttactgggtcctcaccgtcttcttcctcattatctacataacaatgacctacaccaggattccccaggtgccctggacaacagtgggcctgtgctttaacggcagtgccttcgtcttgtacctctctgccgctgttgtagatgcatcttccgtctcccctgagagggacagtcacaacttcaacagctgggcggcctcatcgttctttgccttcctggtcaccatctgctacgctggaaatacatatttcagttttatagcatggagatccaggaccatacagtgatttaccattttgataattaaaaggaaaaaaaaaggaagactctcactgtaaaaacagctgtaggtataatgtatattcccagagaattgtatttaactaattaatgttttttatattcttaaatttgctcacaaattgtggtttgttacaattaaactggatacttatttgcaaagtgttgtagcttataatgaactcttaagtatcttattaatgtattaatgtcttcatagatcatattttcttagacaatgtttaaatagataaattgctaatattgagaatgtgtcaagtttgtaaacctaacttttaagatgccagattcttttttgattaaatgttgcaaaatcccaagtaa

SEQ ID NO: 119903 - DNA, 996 bp, Homo sapiens
  Payload ID: 3509
  Gene Symbol: CMTM8
  Gene Name: CKLF-like MARVEL transmembrane domain containing 8
  Uniprot ID: Q8IZV2
  ENST ID: ENST00000458535
  CDS Start-End: 295-642
ggcctccaccgccttccccggctgcccggcagcctcccctcgctcgctctcctcttcctctagggccccagcgcagctcgggagcccgcgcaccgaggcgctaggggcaccgcgcactagagggacacccgccgcgcctggacagcccccggcgggcgcccccctcgcacctcctgccccgcgcgggccgcgctcccctcccccgcgcctgtgtccccagggcgcagggccgcgcgtccagccccagacccgccggggtccctggggacgcgccagcccggcagtggctcgacgatggaggagccgcagcgcgcccgctcgcacacagtcaccaccaccgccagctccttcgcagagaacttctccaccagcagcagcagcttcgcctacgaccgggagttcctccgcaccctgcccggcttcctcatcgtggccgagatcggcctgtgctttaacggcagtgccttcgtcttgtacctctctgccgctgttgtagatgcatcttccgtctcccctgagagggacagtcacaacttcaacagctgggcggcctcatcgttctttgccttcctggtcaccatctgctacgctggaaatacatatttcagttttatagcatggagatccaggaccatacagtgatttaccattttgataattaaaaggaaaaaaaaaggaagactctcactgtaaaaacagctgtaggtataatgtatattcccagagaattgtatttaactaattaatgttttttatattcttaaatttgctcacaaattgtggtttgttacaattaaactggatacttatttgcaaagtgttgtagcttataatgaactcttaagtatcttattaatgtattaatgtcttcatagatcatattttcttagacaatgtttaaatagataaattgctaatattgagaatgtgtcaagtttgtaaacctaacttttaagatgccagattcttttttgattaaatgttgcaaaatcccaa

SEQ ID NO: 119904 - DNA, 1444 bp, Homo sapiens
  Payload ID: 3510
  Gene Symbol: CLRN1
  Gene Name: clarin 1
  Uniprot ID: P58418
  ENST ID: ENST00000295911
  CDS Start-End: 393-755
tgcctccccaccattcaccaggctccactgcactggctcattcctgcctcagttgtgcttcttttccctggaaagttctttctgtagatctttaaagggtgatttccttctcaacattcaggtgtcagctcgtttcactttcctgaccatgcccatccactcagagatcactcaaaatcccattaccctattttatttctccatcatatgtatcactatctgaaactatcttgttgttgatgcaggctattttcttgaccccttcatgggactcccaacaggggtaccccatttactcagcctgccctgctcaacctcttgcaggagggagcacacgagtgaacgagtgcaggaaccagctggctgctttagtgctgtgaggagtaaactccatgcaggccctgcagcagcaaccagtttttccagatttgctcaaagcaatcccagtgagcatccacgtcaatgtcattctcttctctgccatccttattgtgttaaccatggtggggacagccttcttcatgtacaatgcttttggaaaaccttttgaaactctgcatggtcccctagggctgtaccttttgagcttcatttcaggctcctgtggctgtcttgtcatgatattgtttgcctctgaagtgaaaatccatcacctctcagaaaaaattgcaaattataaagaagggacttatgtctacaaaacgcaaagtgaaaaatataccacctcattctggctgactaaaggccacagctgagcctggaactgacccttccttcatcctcaacctgctgtcctccagaaagcaccaaggaaaaagcagagaatgacagcaaacagatcactaggcctctgaccacaggtgctgagtactcagcagccctcatataataggtttgaaagtactccttaaaataaaacactgtttccctttggaactatttacaaggatgaaacaaccgtatacctgagaaataacttgctctggtgtcaattcgctattcgccagcagacatcagaacacaccgagtttccagatgctggtttttccccttaaatcaggaaatacacctggacaatttctagaagactacaattcagtctagccacaaaggggattttttttttttggtaacaggctagagcccggttctgtaagtctttagctgaaatggtccagtacaaaagcactggaaatgagtgggctaggaggacaaggaccgtctcctgcgtgaggagttggttggaggtccccaaggccaggtaccccctgcactcttattggattcctctctgtcttcttggagttttgaaaaactccttcgaacaccaggcttttttctttagaaaacaagtctccaatcgttctctgttccgtagaaagagaaagaaaacctggagcagctgctgaaaaatctaatgaggaactaagaggcaaacccacca

SEQ ID NO: 119905 - DNA, 2359 bp, Homo sapiens
  Payload ID: 3510
  Gene Symbol: CLRN1
  Gene Name: clarin 1
  Uniprot ID: P58418
  ENST ID: ENST00000327047
  CDS Start-End: 292-990
aggagatacttgaaggcagtttgaaagacttgttttacagattcttagtccaaagatttccaattagggagaagaagcagcagaaaaggagaaaagccaagtatgagtgatgatgaggccttcatctactgacatttaacctggcgagaaccgtcgatggtgaagttgccttttcagctgggagctgtccgttcagcttccgtaataaatgcagtcaaagaggcagtcccttcccattgctcacaaaggtcttgtttttgaacctcgccctcacagaagccgtttctcatcatgccaagccaacagaagaaaatcattttttgcatggccggagtgttcagttttgcatgtgccctcggagttgtgacagccttggggacaccgttgtggatcaaagccactgtcctctgcaaaacgggagctctgctcgtcaatgcctcagggcaggagctggacaagtttatgggtgaaatgcagtacgggcttttccacggagagggtgtgaggcagtgtgggttgggagcaaggccctttcggttctcattttttccagatttgctcaaagcaatcccagtgagcatccacgtcaatgtcattctcttctctgccatccttattgtgttaaccatggtggggacagccttcttcatgtacaatgcttttggaaaaccttttgaaactctgcatggtcccctagggctgtaccttttgagcttcatttcaggctcctgtggctgtcttgtcatgatattgtttgcctctgaagtgaaaatccatcacctctcagaaaaaattgcaaattataaagaagggacttatgtctacaaaacgcaaagtgaaaaatataccacctcattctgggtcattttcttttgcttttttgttcattttctgaatgggctcctaatacgacttgctggatttcagttcccttttgcaaaatctaaagacgcagaaacaactaatgtagctgcagatctaatgtactgaaaggcaaacctttctataattttacaagggagtagacttgctttggtcacttttagatgtggttaattttgcatatccttttagtctgcatatattaaagcatcaggacccttcgtgacaatgtttacaaattacgtactaaggatacaggctggaaagtaagggaagcagaaggaaggctttgaaaagttgttttatctggtgggaaattgcttgacccaggtagtcaaaggcagttgactagaatcgacaaattgttactccatatatatatatgtgtgtgtgtgtgtgtgtgtgtgtgtgtaagatgtcttcctatcaaaaagatatcaaaggcacatggaatatattttaataaaaacaaataatatctctaatatatccacacatttgttgccagatttcagaaaactgagctgcaatcgctttcctaaaacagtagtgtattaaatgaacatctataaaatgtatcaacacacattttaaaaaatttgtttaaagtatactcttaggccaggcgtggtgactcacacctgtaattccagcacttcaggaggccaaggtgggaagatcatttgagttcaggagttcgagttacagcctgggcaataaagtgagaccctgtcactaacaaaattaaaaaataaaataaatataaaatataggctttaaaaaagcatagtcttattaaccatgtctgttggtcaaaatctgcaaactctaaaagaagaaaagaagaaaaaaccaagcttagggtatttttcctcccgtgcctgagtcccaattacattcacgacagtactttcaatgaacataattgttaggaccactgaggaatcatgaaaaatgatctctgcttagtacatttgatgcaaaatgacttattaggggctgtttttctagctatagtgtctcgagtactaatatgcaattatgaaaattatattaaatctgggattatgacggtatcactgtatcatcttggtcttgttctggctgtcaccaagcatgacccaggtcaactttttttttcccctgaattacccatcaaattgatctgcagctgactaaaggccacagctgagcctggaactgacccttccttcatcctcaacctgctgtcctccagaaagcaccaaggaaaaagcagagaatgacagcaaacagatcactaggcctctgaccacaggtgctgagtactcagcagccctcatataataggtttgaaagtactccttaaaataaaacactgtttccctttggaactatttacaaggatgaaacaaccgtatacctgagaaataacttgctctggtgtcaattcgctattcgccagcagacatcagaacacaccgagtttccagatgct

SEQ ID NO: 119906 - DNA, 738 bp, Homo sapiens
  Payload ID: 3510
  Gene Symbol: CLRN1
  Gene Name: clarin 1
  Uniprot ID: P58418
  ENST ID: ENST00000328863
  CDS Start-End: 1-738
atgccaagccaacagaagaaaatcattttttgcatggccggagtgttcagttttgcatgtgccctcggagttgtgacagccttggggacaccgttgtggatcaaagccactgtcctctgcaaaacgggagctctgctcgtcaatgcctcagggcaggagctggacaagtttatgggtgaaatgcagtacgggcttttccacggagagggtgtgaggcagtgtgggttgggagcaaggccctttcggttctcattttttccagatttgctcaaagcaatcccagtgagcatccacgtcaatgtcattctcttctctgccatccttattgtgttaaccatggtggggacagccttcttcatgtacaatgcttttggaaaaccttttgaaactctgcatggtcccctagggctgtaccttttgagcttcatttcagttgccctttggctgccagctaccaggcaccaggctcaaggctcctgtggctgtcttgtcatgatattgtttgcctctgaagtgaaaatccatcacctctcagaaaaaattgcaaattataaagaagggacttatgtctacaaaacgcaaagtgaaaaatataccacctcattctgggtcattttcttttgcttttttgttcattttctgaatgggctcctaatacgacttgctggatttcagttcccttttgcaaaatctaaagacgcagaaacaactaatgtagctgcagatctaatgtactga

SEQ ID NO: 119907 - DNA, 704 bp, Homo sapiens
  Payload ID: 3510
  Gene Symbol: CLRN1
  Gene Name: clarin 1
  ENST ID: ENST00000485607
  CDS Start-End: 587-704
tgcctccccaccattcaccaggctccactgcactggctcattcctgcctcagttgtgcttcttttccctggaaagttctttctgtagatctttaaagggtgatttccttctcaacattcaggtgtcagctcgtttcactttcctgaccatgcccatccactcagagatcactcaaaatcccattaccctattttatttctccatcatatgtatcactatctgaaactatcttgttgttgatgcaggctattttcttgaccccttcatgggactcccaacaggggtaccccatttactcagcctgccctgctcaacctcttgcaggagggagcacacgagtgaacgagtgcaggaaccagctggctgctttagtgctgtgaggagtaaactccatgcaggccctgcagcagcaaccaggttataagctctgtgagacaacaggaatcttgtccatcttgttttatggctctacttccaacacctagaataatgcctggcacatatttttccagatttgctcaaagcaatcccagtgagcatccacgtcaatgtcattctcttctctgccatccttattgtgttaaccatggtggggacagccttcttcatgtacaatgcttttggaaaaccttttgaaactctgcatggtcccctagggctgtaccttttgagcttcatttcaggctcctgtggctgtcttgtca

SEQ ID NO: 119908 - DNA, 722 bp, Homo sapiens
  Payload ID: 3510
  Gene Symbol: CLRN1
  Gene Name: clarin 1
  ENST ID: ENST00000468836
  CDS Start-End: 377-722
attttttgcatggccggagtgttcagttttgcatgtgccctcggagttgtgacagccttggggacaccgttgtggatcaaagccactgtcctctgcaaaacgggagctctgctcgtcaatgcctcagggcaggagctggacaagtttatgggtgaaatgcagtacgggcttttccacggagagggtgtgaggcagtgtgggttgggagcaaggccctttcggttctcatgctattttcttgaccccttcatgggactcccaacaggggtaccccatttactcagcctgccctgctcaacctcttgcaggagggagcacacgagtgaacgagtgcaggaaccagctggctgctttagtgctgtgaggagtaaactccatgcaggccctgcagcagcaaccagtttttccagatttgctcaaagcaatcccagtgagcatccacgtcaatgtcattctcttctctgccatccttattgtgttaaccatggtggggacagccttcttcatgtacaatgcttttggaaaaccttttgaaactctgcatggtcccctagggctgtaccttttgagcttcatttcaggctcctgtggctgtcttgtcatgatattgtttgcctctgaagtgaaaatccatcacctctcagaaaaaattgcaaattataaagaagggacttatgtctacaaaacgcaaagtgaaaaatataccacctcattctgggtca

SEQ ID NO: 119909 - DNA, 823 bp, Homo sapiens
  Payload ID: 3511
  Gene Symbol: CLRN2
  Gene Name: clarin 2
  Uniprot ID: A0PK11
  ENST ID: ENST00000511148
  CDS Start-End: 103-801
tggaagagctgaccttggagcagagcattgccgagtatctgaaagatgtcaatgaccctcgctgctgctcggagaccttggggatgacctgcacccactagcatgcctggatggttcaaaaaggcgtggtatgggctggcgtctttactcagcttctcctccttcatcctgatcatcgttgccctggtagtgccccactggctgagtgggaaaatcctttgtcagactggagtggatctggtcaacgccacagacagagagctggtcaagttcattggggacatttactacgggctcttccgagggtgtaaagtgcggcagtgtgggcttgggggccgccaatcccaattcacgatcttcccacacctggtgaaggagctcaacgcaggccttcatgtgatgattctgctgctcctcttcctggccttggccctggctctggtcagcatgggctttgccattcttaacatgatccaggtcccgtaccgggcagtcagcggtcctgggggcatctgcctatggaatgtcctggcaggcggcgtcgtggcgttagccatcgccagcttcgtggctgcggtgaaatttcacgacctgacggaacgaatcgccaactttcaggagaagctcttccagtttgtggtggtggaagaacagtatgaagagtcgttttggatctgcgtggccagcgcttcggcccatgctgcaaacttggtcgtggtggcgatcagtcaaattcccctccctgagattaagaccaaaatcgaagaggccacggtcacagctgaggatatcttgtattaatagccttcccctgttcacaacc

SEQ ID NO: 119910 - DNA, 1152 bp, Homo sapiens
  Payload ID: 3512
  Gene Symbol: CLRN3
  Gene Name: clarin 3
  Uniprot ID: Q8NCR9
  ENST ID: ENST00000368671
  CDS Start-End: 164-844
aatgtccattagcataacccttcctcaggaagagtgagattttatatttgacaataaagtgttagactccatttctaaataccagacttcaaaagataaggttcaaaagtgttataagaagatattcctttttttgtcctagagaacttattttcctgtgaaaatgcctaccacaaagaagacattgatgttcttatcaagctttttcaccagccttgggtccttcattgtaatttgctctattcttgggacacaagcatggatcaccagtacaattgctgttagagactctgcttcaaatgggagcattttcatcacttacggactttttcgtggggagagtagtgaagaattgagtcacggacttgcagaaccaaagaaaaagtttgcagttttagagatactgaataattcttcccaaaaaactctgcattcggtgactatcctgttcctggtcctgagtttgatcacgtcgctgctgagctctgggtttaccttctacaacagcatcagcaacccttaccagacattcctggggccgacgggggtgtacacctggaacgggctcggtgcatccttcgtttttgtgaccatgatactgtttgtggcgaacacgcagtccaaccaactctccgaagagttgttccaaatgctttacccggcaaccaccagtaaaggaacgacccacagttacggatactcgttctggctcatactgctcgtcattcttctaaatatagtcactgtaaccatcatcattttctaccagaaggccagataccagcggaagcaggagcagagaaagccaatggaatatgctccaagggacggaattttattctgaattctctttcatctcattttggcgttgcatctattgtacatcagccctgagtagtaactggttagcttctctggacaattcagcatggtaacgtgactgtcatctgtgacagcatttgtgtttcatgacactgtgttcttcattgatgctgtactcctgaaaatttttcccacaaggttggggaaatgaatgggaaatgtcgctggtctgtgtggtattcaaagcagtagtatcatgatgagcgtaacgacccttctgacctggtctcacgatctgaaataataaaaggctgtgtcatgtttcttttc

SEQ ID NO: 119911 - DNA, 4769 bp, Homo sapiens
  Payload ID: 3513
  Gene Symbol: CLSPN
  Gene Name: claspin
  Uniprot ID: Q9HAW4
  ENST ID: ENST00000251195
  CDS Start-End: 98-4096
agcactgctgggctggagacggcgggagccgctgctctccggctgagggaatcagagacagctccgtccctagtggagcgcaggggaggcagaagtcatgacaggcgaggtgggttctgaggttcacctagaaatcaatgacccaaacgtcatttcacaagaggaagcagatagtccttcagatagtggacagggcagctatgaaacaattggacccttgagtgaaggagattcagatgaagagatatttgtaagtaagaagttgaaaaacaggaaggttctacaagacagtgattccgaaacagaggacacaaatgcctctccagagaaaactacctatgacagtgccgaggaggaaaataaagagaatttatatgctgggaaaaatacaaaaatcaaaaggatttacaaaactgtggcagacagtgatgaaagttacatggaaaagtctttgtatcaggaaaatcttgaagcgcaagtgaaaccttgcttagagctgagtcttcagtctggaaactctacagactttaccactgacagaaagagttccaaaaagcacatacatgataaagaaggaactgcaggaaaagcaaaagtaaaatcaaaaagaagacttgagaaagaggagagaaaaatggaaaaaattagacagctaaaaaagaaggaaacaaaaaaccaggaagatgatgtagaacagccatttaatgacagtggctgtcttcttgtggataaagacctttttgaaactgggttggaggatgaaaataactctccattggaagatgaagagtcattagaatcaataagagcagctgtaaaaaacaaagtaaaaaagcacaagaaaaaagaaccatctttggagagtggggtccattcatttgaggaaggaagtgagttatcaaaaggaaccacgaggaaggaaagaaaggcagccagattaagtaaagaagcattaaaacaactgcatagtgagactcagcgccttattcgagagtctgcactgaaccttccatatcatatgcctgagaataaaaccattcatgatttcttcaaacgtaaaccccggcccacttgccacggaaatgccatggcactattgaagtcatctaaatatcagtcaagccatcacaaagaaatcatagacactgcaaatactactgaaatgaacagtgatcaccatagtaaaggttctgagcagacaacaggtgcagaaaatgaagtggaaactaatgcactccctgtagtttcaaaggaaacccagatcattactggatcagatgagtcttgcaggaaggatttggtaaaaaatgaagagctagaaattcaggagaaacagaagcagagtgacattagaccttcacctggggacagctcagtgttgcaacaggaatccaacttcctcgggaacaatcacagtgaggaatgtcaggttggagggcttgtagcatttgaacctcatgccctggagggtgaaggcccccaaaatccagaagaaacagatgagaaagtggaagagcctgagcagcaaaataaatcatcagcagttgggccacctgaaaaagtgagacggtttactctggatagacttaagcaactgggagtagatgtttccattaaaccacggctaggtgctgatgaagattcctttgtgatacttgaacctgaaaccaacagagaactggaagccttgaagcagcgtttctggaagcatgctaatccagcagccaaacccagggctggtcagacagtgaatgtgaacgtcatagtgaaagacatgggcactgatggaaaggaagagctaaaagcagatgtggtacctgtgactttagcacctaagaagttggatggagcaagccacacaaaaccaggtgaaaagcttcaggtgttaaaagctaaactgcaagaagcaatgaaactccgaaggtttgaggagcgccagaagcgccaagcactgtttaaattagataatgaagatgggtttgaggaagaggaggaggaagaggaagaaatgacagatgagtctgaggaagatggagaagagaaggtagagaaagaagagaaagaggaagaactagaggaagaggaggagaaagaagaggaggaggaagaagaaggaaatcaggagactgcagaattccttcttagtagtgaagaaatagaaacaaaagatgaaaaagaaatggataaagaaaataatgatggcagtagtgaaattggcaaggcagttggcttcctctctgttcccaagtctctctcatcagattctactttacttctgtttaaggacagctcttccaagatgggttactttcctactgaagaaaaatcagaaacagatgaaaactcaggcaagcagcctagcaaactggatgaggatgattcatgttcattgctaacaaaggagagcagccacaatagcagctttgagctgattggctccacgattccatcctatcagccttgcaacagacaaacaggccgtgggaccagttttttccctacagcaggaggattcagatctccttcccctgggctatttcgagccagtttggtcagctcagcttctaagagttcagggaaactgtctgagccttcacttcccatagaggattcccaggatctgtataacgcctccccagagcctaagacacttttcctaggagcaggagacttccagttctgtttagaagatgacactcagagccaactgttggatgcagatgggttcttaaatgttagaaaccacaggaatcagtaccaagctttgaagcctcgattgccattggccagtatggatgagaatgccatggatgccaacatggatgagctgttggatttgtgtactggaaagttcacatctcaggctgaaaaacatctacccaggaagagtgacaagaaagagaacatggaggaacttctgaacctttgttcaggaaaattcacttctcaggatgcctccactccagcctcatcagagttaaataaacaggagaaggagagcagcatgggtgatccaatggaagaagcacttgctctttgctcaggctcttttcccacagacaaggaagaggaagacgaggaggaggaatttggagactttcggcttgtttcaaatgataatgagtttgatagtgatgaggatgaacacagtgactctggtaatgatctggcactggaagaccatgaagatgatgatgaagaagaactcctgaagcgatctgagaagttgaaaaggcaaatgaggttgaggaaatacctggaggatgaggcagaggtgtcaggaagtgatgtgggaagcgaagatgagtatgatggggaagaaattgatgaatatgaagaggacgtaattgatgaagtacttccttctgatgaggaactgcagagtcaaatcaagaaaatacacatgaaaactatgttggatgatgataagcgacagctacgtttataccaagagaggtaccttgctgatggggatctgcacagcgatggtcctgggcgaatgaggaagtttcgatggaaaaacatagatgatgcttcccagatggacttgttccacagagactctgatgatgatcagactgaagaacagcttgatgagtcagaagccaggtggaggaaggagcgaattgaacgagagcagtggcttcgggacatggcacagcaggggaaaattacagctgaagaagaagaagaaattggggaggacagtcagtttatgatactggccaagaaagttacagccaaagcactgcagaagaatgccagtcgccctatggttattcaggaatcaaagtctttgctcagaaatccttttgaagccatcagaccaggaagtgctcaacaggtgaagacaggctcactgctaaaccagcccaaagctgtgcttcagaaactggctgctctctctgaccataaccccagtgctcctcgaaattcaagaaactttgtctttcatacactttctcctgtcaaggctgaggcggcaaaggaatcgtctaagtctcagaagatcccagagaaggactctgactggctcacctggagtggagctcctatccctggattcttcaggctttcatttgacccacatggttaagctgggagagacagagtccaaagagaggcggagaagggctattctgggcagaacaaacaattgatgactttatggctctgtggtctgggcagaactgcataaccctagatcaccaaagctgagagcctttaggagtgaggatttgggccaggcatggtggctcacgcctgtaatcccagcactttgggaggccgaggtgggtggatcacaaggtcaggagatcaagaccaacctgaccaacatggtgaaaccccatctctactaaaaatacaaaaattagctgacgtgatgcatgcacctgtaatcccagctactcaggaggctgaggcaggagaatcgcttgaacccgggaggtggaggttgcggtgagccgagattgcgccactgcactccagcctaggcgacagagcgagactccatctcaaaaaaaaaaaaaaaaaaaaaaaaagtgaggatttgggtcaccccaggctgaaggccaggggaacctgaagtggataagggaagggagaagacttaggccacaggatctgatgtagaaatggggctgacgtctccacctgtattttcttagctggaggagtgtgcaaagtttgaattacttctgccttctccttcttatttccttttcccttttaaaatagtcatcataatcataaaaatttcttttcca

SEQ ID NO: 119912 - DNA, 4169 bp, Homo sapiens
  Payload ID: 3513
  Gene Symbol: CLSPN
  Gene Name: claspin
  Uniprot ID: Q9HAW4
  ENST ID: ENST00000318121
  CDS Start-End: 59-4078
cggctgagggaatcagagacagctccgtccctagtggagcgcaggggaggcagaagtcatgacaggcgaggtgggttctgaggttcacctagaaatcaatgacccaaacgtcatttcacaagaggaagcagatagtccttcagatagtggacagggcagctatgaaacaattggacccttgagtgaaggagattcagatgaagagatatttgtaagtaagaagttgaaaaacaggaaggttctacaagacagtgattccgaaacagaggacacaaatgcctctccagagaaaactacctatgacagtgccgaggaggaaaataaagagaatttatatgctgggaaaaatacaaaaatcaaaaggatttacaaaactgtggcagacagtgatgaaagttacatggaaaagtctttgtatcaggaaaatcttgaagcgcaagtgaaaccttgcttagagctgagtcttcagtctggaaactctacagactttaccactgacagaaagagttccaaaaagcacatacatgataaagaaggaactgcaggaaaagcaaaagtaaaatcaaaaagaagacttgagaaagaggagagaaaaatggaaaaaattagacagctaaaaaagaaggaaacaaaaaaccaggaagatgatgtagaacagccatttaatgacagtggctgtcttcttgtggataaagacctttttgaaactgggttggaggatgaaaataactctccattggaagatgaagagtcattagaatcaataagagcagctgtaaaaaacaaagtaaaaaagcacaagaaaaaagaaccatctttggagagtggggtccattcatttgaggaaggaagtgagttatcaaaaggaaccacgaggaaggaaagaaaggcagccagattaagtaaagaagcattaaaacaactgcatagtgagactcagcgccttattcgagagtctgcactgaaccttccatatcatatgcctgagaataaaaccattcatgatttcttcaaacgtaaaccccggcccacttgccacggaaatgccatggcactattgaagtcatctaaatatcagtcaagccatcacaaagaaatcatagacactgcaaatactactgaaatgaacagtgatcaccatagtaaaggttctgagcagacaacaggtgcagaaaatgaagtggaaactaatgcactccctgtagtttcaaaggaaacccagatcattactggatcagatgagtcttgcaggaaggatttggtaaaaaatgaagagctagaaattcaggagaaacagaagcagagtgacattagaccttcacctggggacagctcagtgttgcaacaggaatccaacttcctcgggaacaatcacagtgaggaatgtcaggttggagggcttgtagcatttgaacctcatgccctggagggtgaaggcccccaaaatccagaagaaacagatgagaaagtggaagagcctgagcagcaaaataaatcatcagcagttgggccacctgaaaaagtgagacggtttactctggatagacttaagcaactgggagtagatgtttccattaaaccacggctaggtgctgatgaagattcctttgtgatacttgaacctgaaaccaacagagaactggaagccttgaagcagcgtttctggaagcatgctaatccagcagccaaacccagggctggtcagacagtgaatgtgaacgtcatagtgaaagacatgggcactgatggaaaggaagagctaaaagcagatgtggtacctgtgactttagcacctaagaagttggatggagcaagccacacaaaaccaggtgaaaagcttcaggtgttaaaagctaaactgcaagaagcaatgaaactccgaaggtttgaggagcgccagaagcgccaagcactgtttaaattagataatgaagatgggtttgaggaagaggaggaggaagaggaagaaatgacagatgagtctgaggaagatggagaagagaaggtagagaaagaagagaaagaggaagaactagaggaagaggaggagaaagaagaggaggaggaagaagaaggaaatcaggagactgcagaattccttcttagtagtgaagaaatagaaacaaaagatgaaaaagaaatggataaagaaaataatgatggcagtagtgaaattggcaaggcagttggcttcctctctgttcccaagtctctctcatcagattctactttacttctgtttaaggacagctcttccaagatgggttactttcctactgaagaaaaatcagaaacagatgaaaactcaggcaagcagcctagcaaactggatgaggatgattcatgttcattgctaacaaaggagagcagccacaatagcagctttgagctgattggctccacgattccatcctatcagccttgcaacagacaaacaggccgtgggaccagttttttccctacagcaggaggattcagatctccttcccctgggctatttcgagccagtttggtcagctcagcttctaagagttcagggaaactgtctgagccttcacttcccatagaggattcccaggatctgtataacgcctccccagagcctaagacacttttcctaggagcaggagacttccagttctgtttagaagatgacactcagagccaactgttggatgcagatgggttcttaaatgttagaaaccacaggaatcagtaccaagctttgaagcctcgattgccattggccagtatggatgagaatgccatggatgccaacatggatgagctgttggatttgtgtactggaaagttcacatctcaggctgaaaaacatctacccaggaagagtgacaagaaagagaacatggaggaacttctgaacctttgttcaggaaaattcacttctcaggatgcctccactccagcctcatcagagttaaataaacaggagaaggagagcagcatgggtgatccaatggaagaagcacttgctctttgctcaggctcttttcccacagacaaggaagaggaagacgaggaggaggaatttggagactttcggcttgtttcaaatgataatgagtttgatagtgatgaggatgaacacagtgactctggtaatgatctggcactggaagaccatgaagatgatgatgaagaagaactcctgaagcgatctgagaagttgaaaaggcaaatgaggttgaggaaatacctggaggatgaggcagaggtgtcaggaagtgatgtgggaagcgaagatgagtatgatggggaagaaattgatgaatatgaagaggacgtaattgatgaagtacttccttctgatgaggaactgcagagtcaaatcaagaaaatacacatgaaaactatgttggatgatgataagcgacagctacgtttataccaagagaggtaccttgctgatggggatctgcacagcgatggtcctgggcgaatgaggaagtttcgatggaaaaacatagatgatgcttcccagatggacttgttccacagagactctgatgatgatcagactgaagaacagcttgatgagtcagaagccaggtggaggaaggagcgaattgaacgagagcagtggcttcgggacatggcacagcaggggaaaattacagctgaagaagaagaagaaattggggaggacagtcagtttatgatactggccaagaaagttacagccaaagcactgcagaagaatgccagtcgccctatggttattcaggaatcaaagtctttgctcagaaatccttttgaagccatcagaccaggaagtgctcaacaggtgaagacaggctcactgctaaaccagcccaaagctgtgcttcagaaactggctgctctctctgaccataaccccagtgctcctcgaaattcaagaaactttgtctttcatacactttctcctgtcaaggctgaggcggcaaaggaatcgtctaagtctcaggtaaagaaaaggggtccatctttcatgacttctccttcacctaagcacctcaaaacagatgatagcacttcaggattgacgcgaagcatcttcaaatatttggagagctaacaccatcaaaggtgccaaaatctacattgagactgctttgagaagtttctagcactgaaagttggaattgacactccagccaatgatcctt

SEQ ID NO: 119913 - DNA, 3977 bp, Homo sapiens
  Payload ID: 3513
  Gene Symbol: CLSPN
  Gene Name: claspin
  Uniprot ID: Q9HAW4
  ENST ID: ENST00000373220
  CDS Start-End: 59-3886
cggctgagggaatcagagacagctccgtccctagtggagcgcaggggaggcagaagtcatgacaggcgaggtgggttctgaggttcacctagaaatcaatgacccaaacgtcatttcacaagaggaagcagatagtccttcagatagtggacagggcagctatgaaacaattggacccttgagtgaaggagattcagatgaagagatatttgtaagtaagaagttgaaaaacaggaaggttctacaagacagtgattccgaaacagaggacacaaatgcctctccagagaaaactacctatgacagtgccgaggaggaaaataaagagaatttatatgctgggaaaaatacaaaaatcaaaaggatttacaaaactgtggcagacagtgatgaaagttacatggaaaagtctttgtatcaggaaaatcttgaagcgcaagtgaaaccttgcttagagctgagtcttcagtctggaaactctacagactttaccactgacagaaagagttccaaaaagcacatacatgataaagaaggaactgcaggaaaagcaaaagtaaaatcaaaaagaagacttgagaaagaggagagaaaaatggaaaaaattagacagctaaaaaagaaggaaacaaaaaaccaggaagatgatgtagaacagccatttaatgacagtggctgtcttcttgtggataaagacctttttgaaactgggttggaggatgaaaataactctccattggaagatgaagagtcattagaatcaataagagcagctgtaaaaaacaaagtaaaaaagcacaagaaaaaagaaccatctttggagagtggggtccattcatttgaggaaggaagtgagttatcaaaaggaaccacgaggaaggaaagaaaggcagccagattaagtaaagaagcattaaaacaactgcatagtgagactcagcgccttattcgagagtctgcactgaaccttccatatcatatgcctgagaataaaaccattcatgatttcttcaaacgtaaaccccggcccacttgccacggaaatgccatggcactattgaagtcatctaaatatcagtcaagccatcacaaagaaatcatagacactgcaaatactactgaaatgaacagtgatcaccatagtaaaggttctgagcagacaacaggtgcagaaaatgaagtggaaactaatgcactccctgtagtttcaaaggaaacccagatcattactggatcagatgagtcttgcaggaaggatttggtaaaaaatgaagagctagaaattcaggagaaacagaagcagagtgacattagaccttcacctggggacagctcagtgttgcaacaggaatccaacttcctcgggaacaatcacagtgaggaatgtcaggttggagggcttgtagcatttgaacctcatgccctggagggtgaaggcccccaaaatccagaagaaacagatgagaaagtggaagagcctgagcagcaaaataaatcatcagcagttgggccacctgaaaaagtgagacggtttactctggatagacttaagcaactgggagtagatgtttccattaaaccacggctaggtgctgatgaagattcctttgtgatacttgaacctgaaaccaacagaggtgaaaagcttcaggtgttaaaagctaaactgcaagaagcaatgaaactccgaaggtttgaggagcgccagaagcgccaagcactgtttaaattagataatgaagatgggtttgaggaagaggaggaggaagaggaagaaatgacagatgagtctgaggaagatggagaagagaaggtagagaaagaagagaaagaggaagaactagaggaagaggaggagaaagaagaggaggaggaagaagaaggaaatcaggagactgcagaattccttcttagtagtgaagaaatagaaacaaaagatgaaaaagaaatggataaagaaaataatgatggcagtagtgaaattggcaaggcagttggcttcctctctgttcccaagtctctctcatcagattctactttacttctgtttaaggacagctcttccaagatgggttactttcctactgaagaaaaatcagaaacagatgaaaactcaggcaagcagcctagcaaactggatgaggatgattcatgttcattgctaacaaaggagagcagccacaatagcagctttgagctgattggctccacgattccatcctatcagccttgcaacagacaaacaggccgtgggaccagttttttccctacagcaggaggattcagatctccttcccctgggctatttcgagccagtttggtcagctcagcttctaagagttcagggaaactgtctgagccttcacttcccatagaggattcccaggatctgtataacgcctccccagagcctaagacacttttcctaggagcaggagacttccagttctgtttagaagatgacactcagagccaactgttggatgcagatgggttcttaaatgttagaaaccacaggaatcagtaccaagctttgaagcctcgattgccattggccagtatggatgagaatgccatggatgccaacatggatgagctgttggatttgtgtactggaaagttcacatctcaggctgaaaaacatctacccaggaagagtgacaagaaagagaacatggaggaacttctgaacctttgttcaggaaaattcacttctcaggatgcctccactccagcctcatcagagttaaataaacaggagaaggagagcagcatgggtgatccaatggaagaagcacttgctctttgctcaggctcttttcccacagacaaggaagaggaagacgaggaggaggaatttggagactttcggcttgtttcaaatgataatgagtttgatagtgatgaggatgaacacagtgactctggtaatgatctggcactggaagaccatgaagatgatgatgaagaagaactcctgaagcgatctgagaagttgaaaaggcaaatgaggttgaggaaatacctggaggatgaggcagaggtgtcaggaagtgatgtgggaagcgaagatgagtatgatggggaagaaattgatgaatatgaagaggacgtaattgatgaagtacttccttctgatgaggaactgcagagtcaaatcaagaaaatacacatgaaaactatgttggatgatgataagcgacagctacgtttataccaagagaggtaccttgctgatggggatctgcacagcgatggtcctgggcgaatgaggaagtttcgatggaaaaacatagatgatgcttcccagatggacttgttccacagagactctgatgatgatcagactgaagaacagcttgatgagtcagaagccaggtggaggaaggagcgaattgaacgagagcagtggcttcgggacatggcacagcaggggaaaattacagctgaagaagaagaagaaattggggaggacagtcagtttatgatactggccaagaaagttacagccaaagcactgcagaagaatgccagtcgccctatggttattcaggaatcaaagtctttgctcagaaatccttttgaagccatcagaccaggaagtgctcaacaggtgaagacaggctcactgctaaaccagcccaaagctgtgcttcagaaactggctgctctctctgaccataaccccagtgctcctcgaaattcaagaaactttgtctttcatacactttctcctgtcaaggctgaggcggcaaaggaatcgtctaagtctcaggtaaagaaaaggggtccatctttcatgacttctccttcacctaagcacctcaaaacagatgatagcacttcaggattgacgcgaagcatcttcaaatatttggagagctaacaccatcaaaggtgccaaaatctacattgagactgctttgagaagtttctagcactgaaagttggaattgacactccagccaatgatcctt

SEQ ID NO: 119914 - DNA, 4010 bp, Homo sapiens
  Payload ID: 3513
  Gene Symbol: CLSPN
  Gene Name: claspin
  ENST ID: ENST00000520551
  CDS Start-End: 59-3919
cggctgagggaatcagagacagctccgtccctagtggagcgcaggggaggcagaagtcatgacaggcgaggtgggttctgaggttcacctagaaatcaatgacccaaacgtcatttcacaagaggaagcagatagtccttcagatagtggacagggcagctatgaaacaattggacccttgagtgaaggagattcagatgaagagatatttgtaagtaagaagttgaaaaacaggaaggttctacaagacagtgattccgaaacagaggacacaaatgcctctccagagaaaactacctatgacagtgccgaggaggaaaataaagagaatttatatgctgggaaaaatacaaaaatcaaaaggatttacaaaactgtggcagacagtgatgaaagttacatggaaaagtctttgtatcaggaaaatcttgaagcgcaagtgaaaccttgcttagagctgagtcttcagtctggaaactctacagactttaccactgacagaaagagttccaaaaagcacatacatgataaagaaggaactgcaggaaaagcaaaagtaaaatcaaaaagaagacttgagaaagaggagagaaaaatggaaaaaattagacagctaaaaaagaaggaaacaaaaaaccaggaagatgatgtagaacagccatttaatgacagtggctgtcttcttgtggataaagacctttttgaaactgggttggaggatgaaaataactctccattggaagatgaagagtcattagaatcaataagagcagctgtaaaaaacaaagtaaaaaagcacaagaaaaaagaaccatctttggagagtggggtccattcatttgaggaaggaagtgagttatcaaaaggaaccacgaggaaggaaagaaaggcagccagattaagtaaagaagcattaaaacaactgcatagtgagactcagcgccttattcgagagtctgcactgaaccttccatatcatatgcctgagaataaaaccattcatgatttcttcaaacgtaaaccccggcccacttgccacggaaatgccatggcactattgaagtcatctaaatatcagtcaagccatcacaaagaaatcatagacactgcaaatactactgaaatgaacagtgatcaccatagtaaaggttctgagcagacaacaggtgcagaaaatgaagtggaaactaatgcactccctgtagtttcaaaggaaacccagatcattactggatcagatgagtcttgcaggaaggatttggtaaaaaatgaagagctagaaattcaggagaaacagaagcagagtgacattagaccttcacctggggacagctcagtgttgcaacaggaatccaacttcctcgggaacaatcacagtgaggaatgtcaggttggagggcttgtagcatttgaacctcatgccctggagggtgaaggcccccaaaatccagaagaaacagatgagaaagtggaagagcctgagcagcaaaataaatcatcagcagttgggccacctgaaaaagtgagacggtttactctggatagacttaagcaactgggagtagatgtttccattaaaccacggctaggtgctgatgaagattcctttgtgatacttgaacctgaaaccaacagagaactggaagccttgaagcagcgtttctggaagcatgctaatccagcagccaaacccagggctggtcagacagtgaatgtgaacgtcatagtgaaagacatgggcactgatggaaaggaagagctaaaagcagatgtggtacctgtgactttagcacctaagaagttggatggagcaagccacacaaaaccaggtgaaaagcttcaggtgttaaaagctaaactgcaagaagcaatgaaactccgaaggtttgaggagcgccagaagcgccaagcactgtttaaattagataatgaagatgggtttgaggaagaggaggaggaagaggaagaaatgacagatgagtctgaggaagatggagaagagaaggtagagaaagaagagaaagaggaagaactagaggaagaggaggagaaagaagaggaggaggaagaagaaggaaatcaggaggacagctcttccaagatgggttactttcctactgaagaaaaatcagaaacagatgaaaactcaggcaagcagcctagcaaactggatgaggatgattcatgttcattgctaacaaaggagagcagccacaatagcagctttgagctgattggctccacgattccatcctatcagccttgcaacagacaaacaggccgtgggaccagttttttccctacagcaggaggattcagatctccttcccctgggctatttcgagccagtttggtcagctcagcttctaagagttcagggaaactgtctgagccttcacttcccatagaggattcccaggatctgtataacgcctccccagagcctaagacacttttcctaggagcaggagacttccagttctgtttagaagatgacactcagagccaactgttggatgcagatgggttcttaaatgttagaaaccacaggaatcagtaccaagctttgaagcctcgattgccattggccagtatggatgagaatgccatggatgccaacatggatgagctgttggatttgtgtactggaaagttcacatctcaggctgaaaaacatctacccaggaagagtgacaagaaagagaacatggaggaacttctgaacctttgttcaggaaaattcacttctcaggatgcctccactccagcctcatcagagttaaataaacaggagaaggagagcagcatgggtgatccaatggaagaagcacttgctctttgctcaggctcttttcccacagacaaggaagaggaagacgaggaggaggaatttggagactttcggcttgtttcaaatgataatgagtttgatagtgatgaggatgaacacagtgactctggtaatgatctggcactggaagaccatgaagatgatgatgaagaagaactcctgaagcgatctgagaagttgaaaaggcaaatgaggttgaggaaatacctggaggatgaggcagaggtgtcaggaagtgatgtgggaagcgaagatgagtatgatggggaagaaattgatgaatatgaagaggacgtaattgatgaagtacttccttctgatgaggaactgcagagtcaaatcaagaaaatacacatgaaaactatgttggatgatgataagcgacagctacgtttataccaagagaggtaccttgctgatggggatctgcacagcgatggtcctgggcgaatgaggaagtttcgatggaaaaacatagatgatgcttcccagatggacttgttccacagagactctgatgatgatcagactgaagaacagcttgatgagtcagaagccaggtggaggaaggagcgaattgaacgagagcagtggcttcgggacatggcacagcaggggaaaattacagctgaagaagaagaagaaattggggaggacagtcagtttatgatactggccaagaaagttacagccaaagcactgcagaagaatgccagtcgccctatggttattcaggaatcaaagtctttgctcagaaatccttttgaagccatcagaccaggaagtgctcaacaggtgaagacaggctcactgctaaaccagcccaaagctgtgcttcagaaactggctgctctctctgaccataaccccagtgctcctcgaaattcaagaaactttgtctttcatacactttctcctgtcaaggctgaggcggcaaaggaatcgtctaagtctcaggtaaagaaaaggggtccatctttcatgacttctccttcacctaagcacctcaaaacagatgatagcacttcaggattgacgcgaagcatcttcaaatatttggagagctaacaccatcaaaggtgccaaaatctacattgagactgctttgagaagtttctagcactgaaagttggaattgacactccagccaatgatcctt

SEQ ID NO: 119915 - DNA, 11952 bp, Homo sapiens
  Payload ID: 3514
  Gene Symbol: CIITA
  Gene Name: class II, major histocompatibility complex, transactivator
  ENST ID: ENST00000324288
  CDS Start-End: 134-3526
ggttagtgatgaggctagtgatgaggctgtgtgcttctgagctgggcatccgaaggcatccttggggaagctgagggcacgaggaggggctgccagactccgggagctgctgcctggctgggattcctacacaatgcgttgcctggctccacgccctgctgggtcctacctgtcagagccccaaggcagctcacagtgtgccaccatggagttggggcccctagaaggtggctacctggagcttcttaacagcgatgctgaccccctgtgcctctaccacttctatgaccagatggacctggctggagaagaagagattgagctctactcagaacccgacacagacaccatcaactgcgaccagttcagcaggctgttgtgtgacatggaaggtgatgaagagaccagggaggcttatgccaatatcgcggaactggaccagtatgtcttccaggactcccagctggagggcctgagcaaggacattttcaagcacataggaccagatgaagtgatcggtgagagtatggagatgccagcagaagttgggcagaaaagtcagaaaagacccttcccagaggagcttccggcagacctgaagcactggaagccagctgagccccccactgtggtgactggcagtctcctagtgggaccagtgagcgactgctccaccctgccctgcctgccactgcctgcgctgttcaaccaggagccagcctccggccagatgcgcctggagaaaaccgaccagattcccatgcctttctccagttcctcgttgagctgcctgaatctccctgagggacccatccagtttgtccccaccatctccactctgccccatgggctctggcaaatctctgaggctggaacaggggtctccagtatattcatctaccatggtgaggtgccccaggccagccaagtaccccctcccagtggattcactgtccacggcctcccaacatctccagaccggccaggctccaccagccccttcgctccatcagccactgacctgcccagcatgcctgaacctgccctgacctcccgagcaaacatgacagagcacaagacgtcccccacccaatgcccggcagctggagaggtctccaacaagcttccaaaatggcctgagccggtggagcagttctaccgctcactgcaggacacgtatggtgccgagcccgcaggcccggatggcatcctagtggaggtggatctggtgcaggccaggctggagaggagcagcagcaagagcctggagcgggaactggccaccccggactgggcagaacggcagctggcccaaggaggcctggctgaggtgctgttggctgccaaggagcaccggcggccgcgtgagacacgagtgattgctgtgctgggcaaagctggtcagggcaagagctattgggctggggcagtgagccgggcctgggcttgtggccggcttccccagtacgactttgtcttctctgtcccctgccattgcttgaaccgtccgggggatgcctatggcctgcaggatctgctcttctccctgggcccacagccactcgtggcggccgatgaggttttcagccacatcttgaagagacctgaccgcgttctgctcatcctagacggcttcgaggagctggaagcgcaagatggcttcctgcacagcacgtgcggaccggcaccggcggagccctgctccctccgggggctgctggccggccttttccagaagaagctgctccgaggttgcaccctcctcctcacagcccggccccggggccgcctggtccagagcctgagcaaggccgacgccctatttgagctgtccggcttctccatggagcaggcccaggcatacgtgatgcgctactttgagagctcagggatgacagagcaccaagacagagccctgacgctcctccgggaccggccacttcttctcagtcacagccacagccctactttgtgccgggcagtgtgccagctctcagaggccctgctggagcttggggaggacgccaagctgccctccacgctcacgggactctatgtcggcctgctgggccgtgcagccctcgacagcccccccggggccctggcagagctggccaagctggcctgggagctgggccgcagacatcaaagtaccctacaggaggaccagttcccatccgcagacgtgaggacctgggcgatggccaaaggcttagtccaacacccaccgcgggccgcagagtccgagctggccttccccagcttcctcctgcaatgcttcctgggggccctgtggctggctctgagtggcgaaatcaaggacaaggagctcccgcagtacctagcattgaccccaaggaagaagaggccctatgacaactggctggagggcgtgccacgctttctggctgggctgatcttccagcctcccgcccgctgcctgggagccctactcgggccatcggcggctgcctcggtggacaggaagcagaaggtgcttgcgaggtacctgaagcggctgcagccggggacactgcgggcgcggcagctgctggagctgctgcactgcgcccacgaggccgaggaggctggaatttggcagcacgtggtacaggagctccccggccgcctctcttttctgggcacccgcctcacgcctcctgatgcacatgtactgggcaaggccttggaggcggcgggccaagacttctccctggacctccgcagcactggcatttgcccctctggattggggagcctcgtgggactcagctgtgtcacccgtttcagggctgccttgagcgacacggtggcgctgtgggagtccctgcagcagcatggggagaccaagctacttcaggcagcagaggagaagttcaccatcgagcctttcaaagccaagtccctgaaggatgtggaagacctgggaaagcttgtgcagactcagaggacgagaagttcctcggaagacacagctggggagctccctgctgttcgggacctaaagaaactggagtttgcgctgggccctgtctcaggcccccaggctttccccaaactggtgcggatcctcacggccttttcctccctgcagcatctggacctggatgcgctgagtgagaacaagatcggggacgagggtgtctcgcagctctcagccaccttcccccagctgaagtccttggaaaccctcaatctgtcccagaacaacatcactgacctgggtgcctacaaactcgccgaggccctgccttcgctcgctgcatccctgctcaggctaagcttgtacaataactgcatctgcgacgtgggagccgagagcttggctcgtgtgcttccggacatggtgtccctccgggtgatggacgtccagtacaacaagttcacggctgccggggcccagcagctcgctgccagccttcggaggtgtcctcatgtggagacgctggcgatgtggacgcccaccatcccattcagtgtccaggaacacctgcaacaacaggattcacggatcagcctgagatgatcccagctgtgctctggacaggcatgttctctgaggacactaaccacgctggaccttgaactgggtacttgtggacacagctcttctccaggctgtatcccatgagcctcagcatcctggcacccggcccctgctggttcagggttggcccctgcccggctgcggaatgaaccacatcttgctctgctgacagacacaggcccggctccaggctcctttagcgcccagttgggtggatgcctggtggcagctgcggtccacccaggagccccgaggccttctctgaaggacattgcggacagccacggccaggccagagggagtgacagaggcagccccattctgcctgcccaggcccctgccaccctggggagaaagtacttctttttttttatttttagacagagtctcactgttgcccaggctggcgtgcagtggtgcgatctgggttcactgcaacctccgcctcttgggttcaagcgattcttctgcttcagcctcccgagtagctgggactacaggcacccaccatcatgtctggctaatttttcatttttagtagagacagggttttgccatgttggccaggctggtctcaaactcttgacctcaggtgatccacccacctcagcctcccaaagtgctgggattacaagcgtgagccactgcaccgggccacagagaaagtacttctccaccctgctctccgaccagacaccttgacagggcacaccgggcactcagaagacactgatgggcaacccccagcctgctaattccccagattgcaacaggctgggcttcagtggcagctgcttttgtctatgggactcaatgcactgacattgttggccaaagccaaagctaggcctggccagatgcaccagcccttagcagggaaacagctaatgggacactaatggggcggtgagaggggaacagactggaagcacagcttcatttcctgtgtcttttttcactacattataaatgtctctttaatgtcacaggcaggtccagggtttgagttcataccctgttaccattttggggtacccactgctctggttatctaatatgtaacaagccaccccaaatcatagtggcttaaaacaacactcacatttattctgctcacatatctgtcatttgagcagggctcagcggggacagctccttctgtcctactctgtgtcaggtggggcagcttgagggttgggctggtgtcacctgaagactcattcttctgtacgtctgacaggcaatgctggctgttggctgggggcctcagtgccactacggaatagttggctaggacccctccatgtgggctagttgggcttcctcatagtatggtggctgggttggagggtgtcccaaaaagaaaggaggggatagagagagaccacttttcataacctagccttagaagtcacacagtattacttctgctacatatatatgttttaagaggcagggtctcactctgtcgcccagtctggaatgcagtggtatgatcacggctcactgcagcctcaacctcctgggctaagtgatcctcccacctcagcctcccgaatagctgggactacaggtgtgagtcaccaagcccagttaatctttagttttatttttgtagagccagggtctcactatgttgcccaggcaggtcttgaactcctggcctcaagtgattctcctgcctcagcctcccaaagtgctgggattacaggtgtgaaccaccacacccagcccacttctgccatattctgttggccagtgtgacaaggattgctactgtcctacccaccctcctttcaccacatgtgcacatgcacgtgtgtgcacgtacacacacatacacacacacgcgtgcacacaccagagcccaccttggctcaagtcctcttttctgagaggacttttctttgtggcttcctaaaattcagtggaaaattaattgtttggggatgagaaaggttgaagcaccaaaagcttaccaaggggaatgtttgcctctgcctctgacacacagctctgtcctgggagtgagctggtttttagcggagacggagtcccaccttggctgcagggagtccgaaagggacttggaagctccgctttctacccagcgagctgccggcacgactgttgcttttcactcgggcatagtctgctcagaagccccaattcaagacatcttagcttactcctggtggcagtgggagctgcctgttcagctccagctcaccagccccagtgcccacaggatcagtctgattcccaagctctgctcctctccccagcaagtgagagctgggtgtcaagagggtctgaggaatccagacccggctgcgtggttgatgatctttgcagacaggcaagcacctcctgcctcgaactggctgcaaagggtatcaggtgctgccatccaggttcagcttgtaaatagctcaggtgtcaccctgcaagggatccctgcacttgcagactctacagaggccatgggcctcctgtgtgtgcgcctacaggagtgagcactaaggtgtgctctgatcatccactgtgccatgtgccaggtttttggtctgacccactgcttttggtctgtgtgatgatgaaatgaggtcagagcctgcagttattaacactaacgatttgttaatgatagctactgtttattattttatttaatttttttgagacagagttttcactcttattgcccacgctggagtgcagtggcatgatctcggctcactgcaacctctgcctcctgggttcaagcaattctcccacctcagcctcccaagtagctgggattacaggcatgcaccaccacgcctggctaatttttgtatttttagtagagatggagtttcaccatgttggccaggctggtaatctgcctgccttggcctcccaaagtgctgggattacaggggtgagccaccgcacccggccactactgtttatttaatgagcagatacatgcaaagcccttatcacagtgcaagggaaattcaaagcgctcagaaagtattagctcaataagtgatgactgtgtgccagacactgtgctaaactcctactcaagagggataagagtctaggggcaagtggcagagactctagaacgagattgcctgggctcaacgcccacctcaccacttacttatgcaagctagttctctgtgcctcagtctcctcatttgtaaaatgggcataaccacagcaccttctttataggattatgtgaaggtgtggtgagctaatacgttaagaattggagctcaataacatgttggctgtcattattacatatatctgtgtttcattcttgcctctggctggaatgttcttcccagctctccatatggctgatttctcatccttcgggacttgccccattctccaaccccatcactagttttatctttttcacttatttatgcagtctgctcttgtcctaggacatgagctccaggagggcgggaaacatctcgctttgtacactgctgtgccctctgtacccagcaaggcgcctgtgtataataggtgctcaataacataaaatgaacaaataatcctcacctaacggtttcattcattctgcaaatacatactgacagcacagtcatgaataagatgttcctgccctggtgagtcttatattttagcaaattaaaaaaactctttggacagggctgccaggtgaggttggccagtctgtacactgcacaaaggcacctgggacaagggggaacatgggggctgcaaaccagtctgggttctgcttgccaaactgggagtcctggtgtggagccttttaacccagaggggcatcttttcgtagttaacgcacagtcatcgtaagatgtggataaattactgtctccgtgtcacagatctaagtgatacttatagtcacactcctataaaggaatggacttctgacttctttggaggacctctctgcagggacaggcacagtgtgccggaagtgcccctgaaccccatttgtcaggtggtaaagcgctgctcggaggaatcagggcatgatagtgcaattccatgtccagtggattgtaagtccacgcaccttccaaatggtcactcttcctcgcaggcctctctctgcatacaaatgtctccctcctgacgctcacctttttccctggggctctcaaatgtcttcttttcagatttcgtagcttttctttctttagcatcacttgagggcaagtggtgctccaactgtctccccccagagttctgccgcctgtactctcccacacctcagtctcctcgcctgtagaaaggggtcaatcgtttgaaccctgcttcacttggtgtgtatgtgaaggtgctttgaaatcaagtgctctgcaaactggagagaattactgcttgtattccgtgaaactacaagctcccaattccactcatttaatccctctcttgctctgttgcccaggctggaatgcagtggcatgatctcaactcactgcaacctctgcctccctggtttcaagcaattctcctgcctcagcctcccgagtagctgggactataagtgtgcgccactatgcctggctaatttttttgtatttttagtagagatggggtttcaccgtggtggccaggctggtctcgaactcctaacctcaagtgatctgcccgcctcggccttccaaagtgctgggattacaggcatgagccaccatgccaagcccttcccccctatctttaatgaaggtctaccatgtgcctgacacaggggatacccacccccacttctatgggattcaggcctggtttccagcttggccttcaggcttttcccaccacaccccaaatgctgtccctggcttgtggagtggggcagggggccagcctgggactttcacgccagcccgactggggcagactctctcaaccccactggatcttctgctgtttgtcagccacaaggttctgcctagaactcctttcccgaatctcaaagttaaaaaaaaaggcagggccccaggggttggagttgcatacatttttttttaatccaaagaagtaagcctcctaagtattgcttagacaggtttatcagaattaagtaggcacaacactcatactttcagaaaagcatttccagccaggggagtaacgtggcactcaccagcatgatgtctgttttgccaacttgctgaagaacgagtaacctgaaatgaaggagcgagaatcccaccctcagccccccaacagcttcctcagcttctttttcttctgagtcacccctgaaacagtcgctgcatctaagaccagcctcgggctaaacccagctggcctgaaggctcaactcacatcaaacggagctgggagtcgcttttgcgtgtgtccgcagtttgaagtgtcctctccgaaggtgaagtgggggaagcaggtgcgctccgggatgaagtgcagggaggcaaactctggctgggttcctgtaaacatccatcgcagctgcaaataatcagaagccaaggccaggccatcgatttgacactgcaggcagatgaggtcttgggatgcctcttgcgttcccccttctgtgggagcaggtgccttcccaacctcagcactcagtcccaatctctcttccactctcctgggttcaaacaggaacctctctgttggcacgaagcttttgaggggagcaggtctaacaagaaggaaaaaggggggttattagcacggaagccccaccctgccaccaggttggctggggacagggaccaatccaccaggctcgggaggcttggggtggggcagggaagtcttcctccatccctcaaatttagggaaccactgggagccccagactcaggctgaaaatgtctttctgcaaatataaaactctttttaatgaatttgcctaatttctcagagaccctgggctggagaaccagtgcaatgtcacacgggagaggaaggactgtcctgtttattgggagggaggagggggatgctggtgcagcctgctcaggagtcacccagggtctgagggctgacttgcagctctgggccagctgagccagcgctgggtagtgggcagggcttggcaacaccttccaccttgcccggaaaaatgctttgcaacctacaggaaggcaatagccacagccaagttactcagcagccccacttggctctttctcccaggatgcagcatcatctccatggcctggccccctggcacgtccccgtttcccactgccttctctgtgtgcctagccgggtgccagtgtctctgtagcacctcgtgttcccatgcccaacccctctgcagccccctcaagccctgctctgattccaagcctcatctcccagctcactatcctttccgcaaacttcactgaacatctcgcagaacttgtatgttaaacatgtgacatgtattgttgtttgacagggtgctattgacatttggggtaggacaattcttggaggtggggtggctgttctgggcactgagcatttagcagcatctctggctccaggccactaaatgccagtagcacccctggccactggaacaactaaaaatgccctcctaccctatttccaaggtcgacctaagggggcggaactgtttccattgagacccatgcatcgtataggataagaaactgaggttcttatcatttaataggataagaaattgaggttcagagaagccaagtaacctgcctaaagatgcacagctatgagaggcaaagctggcactggcttggtaataacgatggaaacggtctgaatgagagcaggtaccatttcctgagctcttagcagacgctgaggaccctgctaagtgccatgagaccttagcagaggctgtgggtgccccgccccattccctccactcactcttccttgcaggtcgacctgcccttctttgctgaggcctttctctgcctccagagcctgcttggtcctcaggctgtaagtgcaggcagagctaatgtctctccatagctgccctccaccagcctgctcctgagacacctgctggccagcagcctgaagcagaatcctttactcagattcagccgcacagatgctcactgcagagatctccaaggcctgtggtcatccttgagcccatctcagatttgtgtggatagggtgttagagaacatggaatcagctggatagagtggttcatgcttgtaatcccagcactttgggaggctggggtgggaggatcacttgaggccaggagtttgagaccagcctgggcaacacagtgagactgtctctataaaaaatttaaaaattagccaggcatagtgtagtctcagctacttggaaggctgaggcaggaggattgcgtgagcccagcagttcaaggctgcagtgaactatgactgtgcccctgcacccagcctgggtgacagagaccctgtctcaaaaaaaagagaagatggaatcactcggtgaggacctcactcctctcccagtcctgtgaccacaaaccgcatccccgacagtcccagccaggcgctagtctggctgtagctgccctcttgtgtgcagatctccagtctgaatgggctacacgtggaatttactaacactccggttttcattgtgtttatctgtagggttaccttctatttatagcaagtgatgccaagtttccatttctggtagtaatatagtttttcttttccaagtcgctcacacctgtaatcccaacactttgggaggctaaggtgggtggatcagttgagatcaggagtttgagaccagcctggccaacatggcgaaatgaggtcaagactagcctggccaacatggcgaaaccgcgtctctactaaaaacaaacaaacaaaaatacaaaattcgctgggcatggtggcaggtgcctgaggtcccagctactcgggaggctgaggcagaagaatcgcttgagctagggaggcagaggttgcagtgagccgagatcacgccactgcactatagcctaggtgacagagtgagactctgtctcaaaaaaacacaaaagtttctcttttcaaaacattttactttaaaaggagccaatttaaagaaaactgttaatagttcaggtaacaggcagatacaggaaaagctgctgacagtgttgtatgaggtttgaggattttgatccaagctggtcccactcagtccatagcagagaatgaaagggcccagagagggtggtgacctctgcctgaagtcacacagtgagtcgaggacagggaggtgaccccaggtttctatgtgtagggcgggaggatgttctgggacacagttcaattctcatttgtcacacactttggctattagagatcaaccccttcgctcctgtgtcttgcaatggcagccttggcaaacgctaaatgaaaatcgtgacaaca

SEQ ID NO: 119916 - DNA, 2344 bp, Homo sapiens
  Payload ID: 3514
  Gene Symbol: CIITA
  Gene Name: class II, major histocompatibility complex, transactivator
  Uniprot ID: P33076
  ENST ID: ENST00000381835
  CDS Start-End: 122-1762
ggctagtgatgaggctgtgtgcttctgagctgggcatccgaaggcatccttggggaagctgagggcacgaggaggggctgccagactccgggagctgctgcctggctgggattcctacacaatgcgttgcctggctccacgccctgctgggtcctacctgtcagagccccaaggcagctcacagtgtgccaccatggagttggggcccctagaaggtggctacctggagcttcttaacagcgatgctgaccccctgtgcctctaccacttctatgaccagatggacctggctggagaagaagagattgagctctactcagaacccgacacagacaccatcaactgcgaccagttcagcaggctgttgtgtgacatggaaggtgatgaagagaccagggaggcttatgccaatatcgcggaactggaccagtatgtcttccaggactcccagctggagggcctgagcaaggacattttcaagcacataggaccagatgaagtgatcggtgagagtatggagatgccagcagaagttgggcagaaaagtcagaaaagacccttcccagaggagcttccggcagacctgaagcactggaagccagtgcctttctccagttcctcgttgagctgcctgaatctccctgagggacccatccagtttgtccccaccatctccactctgccccatgggctctggcaaatctctgaggctggaacaggggtctccagtatattcatctaccatggtgaggtgccccaggccagccaagtaccccctcccagtggattcactgtccacggcctcccaacatctccagaccggccaggctccaccagccccttcgctccatcagccactgacctgcccagcatgcctgaacctgccctgacctcccgagcaaacatgacagagcacaagacgtcccccacccaatgcccggcagctggagaggtctccaacaagcttccaaaatggcctggtctagcctggtcaccgtgcctgggtctgaggccctccctccacagggctgccttgagcgacacggtggcgctgtgggagtccctgcagcagcatggggagaccaagctacttcaggcagcagaggagaagttcaccatcgagcctttcaaagccaagtccctgaaggatgtggaagacctgggaaagcttgtgcagactcagaggacgagaagttcctcggaagacacagctggggagctccctgctgttcgggacctaaagaaactggagtttgcgctgggccctgtctcaggcccccaggctttccccaaactggtgcggatcctcacggccttttcctccctgcagcatctggacctggatgcgctgagtgagaacaagatcggggacgagggtgtctcgcagctctcagccaccttcccccagctgaagtccttggaaaccctcaatctgtcccagaacaacatcactgacctgggtgcctacaaactcgccgaggccctgccttcgctcgctgcatccctgctcaggctaagcttgtacaataactgcatctgcgacgtgggagccgagagcttggctcgtgtgcttccggacatggtgtccctccgggtgatggacgtccagtacaacaagttcacggctgccggggcccagcagctcgctgccagccttcggaggtgtcctcatgtggagacgctggcgatgtggacgcccaccatcccattcagtgtccaggaacacctgcaacaacaggattcacggatcagcctgagatgatcccagctgtgctctggacaggcatgttctctgaggacactaaccacgctggaccttgaactgggtacttgtggacacagctcttctccaggctgtatcccatgagcctcagcatcctggcacccggcccctgctggttcagggttggcccctgcccggctgcggaatgaaccacatcttgctctgctgacagacacaggcccggctccaggctcctttagcgcccagttgggtggatgcctggtggcagctgcggtccacccaggagccccgaggccttctctgaaggacattgcggacagccacggccaggccagagggagtgacagaggcagccccattctgcctgcccaggcccctgccaccctggggagaaagtacttctttttttttatttttagacagagtctcactgttgcccaggctggcgtgcagtggtgcgatctgggttcactgcaacctccgcctcttgggttcaagcgattcttctgcttcagcctcccgagtagctgggactacaggcacccaccatcatgtctggctaatttttcatttttagtagagacagggttttgccatgtt

SEQ ID NO: 119917 - DNA, 626 bp, Homo sapiens
  Payload ID: 3514
  Gene Symbol: CIITA
  Gene Name: class II, major histocompatibility complex, transactivator
  ENST ID: ENST00000576601
  CDS Start-End: 95-626
agacttgccgcggccccagagctggcgggagggagaggccaccagcagcgcgcgcgggagcccggggaacagcggcagctcacagtgtgccaccatggagttggggcccctagaaggtggctacctggagcttcttaacagcgatgctgaccccctgtgcctctaccacttctatgaccagatggacctggctggagaagaagagattgagctctactcagaacccgacacagacaccatcaactgcgaccagttcagcaggctgttgtgtgacatggaaggtgatgaagagaccagggaggcttatgccaatatcgcggaactggaccagtatgtcttccaggactcccagctggagggcctgagcaaggacattttcaagcacataggaccagatgaagtgatcggtgagagtatggagatgccagcagaagttgggcagaaaagtcagaaaagacccttcccagaggagcttccggcagacctgaagcactggaagccagctgagccccccactgtggtgactggcagtctcctagtgggaccagtgagcgactgctccaccctgccctgcctgccactgcctgcgctgttcaaccaggagccagcctccggccagatgcgcc

SEQ ID NO: 119918 - DNA, 1041 bp, Homo sapiens
  Payload ID: 3514
  Gene Symbol: CIITA
  Gene Name: class II, major histocompatibility complex, transactivator
  ENST ID: ENST00000571186
  CDS Start-End: 109-627
gctgtgtgcttctgagctgggcatccgaaggcatccttggggaagctgagggcacgaggaggggctgccagactccgggagctgctgcctggctgggattcctacacaatgcgttgcctggctccacgccctgctgggtcctacctgtcagagccccaaggcagctcacagtgtgccaccatggagttggggcccctagaaggtggctacctggagcttcttaacagcgatgctgaccccctgtgcctctaccacttctatgaccagatggacctggctggagaagaagagattgagctctactcagaacccgacacagacaccatcaactgcgaccagttcagcaggctgttgtgtgacatggaaggtgatgaagagaccagggaggcttatgccaatatcgcggaactggaccagtatgtcttccaggactcccagctggagggcctgagcaaggacattttcaagcacataggaccagatgaagtgatcggtgagagtatggagatgccagcagaagttgggcagaaaagtcagaaaagacccttcccagaggagcttccggcagacctgaagcactggaagccagctctccgtgtggaggccctagggtcctgctcagcatagctctcagagccaagtcacaaggagaggactgggggactgcctggcacagagcagttgctgatcaacacagctgcagccagggctgagaagatgacaagcatttcctctgtcaggagagacatccatgccactccagggccctccccatcccaggaaggcccctccaagcacccagtctctaacacagcccacttcctcacagctgagccccccactgtggtgactggcagtctcctagtgggaccagtgagcgactgctccaccctgccctgcctgccactgcctgcgctgttcaaccaggagccagcctccggccagatgcgcctggagaaaaccgaccagattcccatgcctttctccagttcctcgttgagctgcctgaatctccctgagggacccatccagtttgtcccc

SEQ ID NO: 119919 - DNA, 3363 bp, Homo sapiens
  Payload ID: 3514
  Gene Symbol: CIITA
  Gene Name: class II, major histocompatibility complex, transactivator
  ENST ID: ENST00000611587
  CDS Start-End: 116-2770
tgatgaggctgtgtgcttctgagctgggcatccgaaggcatccttggggaagctgagggcacgaggaggggctgccagactccgggagctgctgcctggctgggattcctacacaatgcgttgcctggctccacgccctgctgggtcctacctgtcagagccccaaggcagctcacagtgtgccaccatggagttggggcccctagaaggtggctacctggagcttcttaacagcgatgctgaccccctgtgcctctaccacttctatgaccagatggacctggctggagaagaagagattgagctctactcagaacccgacacagacaccatcaactgcgaccagttcagcaggctgttgtgtgacatggaaggtgatgaagagaccagggaggcttatgccaatatcgcggaactggaccagtatgtcttccaggactcccagctggagggcctgagcaaggacattttcatagagcacataggaccagatgaagtgatcggtgagagtatggagatgccagcagaagttgggcagaaaagtcagaaaagacccttcccagaggagcttccggcagacctgaagcactggaagccagtgcctttctccagttcctcgttgagctgcctgaatctccctgagggacccatccagtttgtccccaccatctccactctgccccatgggctctggcaaatctctgaggctggaacaggggtctccagtatattcatctaccatggtgaggtgccccaggccagccaagtaccccctcccagtggattcactgtccacggcctcccaacatctccagaccggccaggctccaccagccccttcgctccatcagccactgacctgcccagcatgcctgaacctgccctgacctcccgagcaaacatgacagagcacaagacgtcccccacccaatgcccggcagctggagaggtctccaacaagcttccaaaatggcctgagccggtggagcagttctaccgctcactgcaggacacgtatggtgccgagcccgcaggcccggatggcatcctagtggaggtggatctggtgcaggccaggctggagaggagcagcagcaagagcctggagcgggaactggccaccccggactgggcagaacggcagctggcccaaggaggcctggctgaggtgctgttggctgccaaggagcaccggcggccgcgtgagacacgagtgattgctgtgctgggcaaagctggtcagggcaagagctattgggctggggcagtgagccgggcctgggcttgtggccggcttccccagtacgactttgtcttctctgtcccctgccattgcttgaaccgtccgggggatgcctatggcctgcaggatctgctcttctccctgggcccacagccactcgtggcggccgatgaggttttcagccacatcttgaagagacctgaccgcgttctgctcatcctagacggcttcgaggagctggaagcgcaagatggcttcctgcacagcacgtgcggaccggcaccggcggagccctgctccctccgggggctgctggccggccttttccagaagaagctgctccgaggttgcaccctcctcctcacagcccggccccggggccgcctggtccagagcctgagcaaggccgacgccctatttgagctgtccggcttctccatggagcaggcccaggcatacgtgatgcgctactttgagagctcagggatgacagagcaccaagacagagccctgacgctcctccgggaccggccacttcttctcagtcacagccacagccctactttgtgccgggcagtgtgccagctctcagaggccctgctggagcttggggaggacgccaagctgccctccacgctcacgggactctatgtcggcctgctgggccgtgcagccctcgacagcccccccggggccctggcagagctggccaagctggcctgggagctgggccgcagacatcaaagtaccctacaggaggaccagttcccatccgcagacgtgaggacctgggcgatggccaaaggcttagtccaacacccaccgcgggccgcagagtccgagctggccttccccagcttcctcctgcaatgcttcctgggggccctgtggctggctctgagtggcgaaatcaaggacaaggagctcccgcagtacctagcattgaccccaaggaagaagaggccctatgacaactggctggagggcgtgccacgctttctggctgggctgatcttccagcctcccgcccgctgcctgggagccctactcgggccatcggcggctgcctcggtggacaggaagcagaaggtgcttgcgaggtacctgaagcggctgcagccggggacactgcgggcgcggcagctgctggagctgctgcactgcgcccacgaggccgaggaggctggaatttggcagcacgtggtacaggagctccccggccgcctctcttttctgggcacccgcctcacgcctcctgatgcacatgtactgggcaaggccttggaggcggcgggccaagacttctccctggacctccgcagcactggcatttgcccctctggattggggagcctcgtgggactcagctgtgtcacccgtttcaggtggggtgaggggcttggaagagacatccttgtgttgggcattaactgcggtcttggtgccaagcccagtgctctgtggggttcttttagtatgcagagcagccgggtggggcagaatggattctctccatttttaagatgaggatgttgaggctcagagaggggcagccacttgccacacagcaagtgagaggcaatggcattctcccagtcaatatttgaaggcccgccatgtgccagtcactggggtatgtctagaatctgagactgacctgggctcaaatttgttttattctttccaccccctgagcacgccaccgttttcttatgctaagagtaaagccatggcctccccttggactctctgcctccattctctcctcttccactccattttgtattcagcaaccagaccaatcttctcagaacttgaatctgattgtatcccatccctgcttacaatccttcagggacactccaccactgtcaggatgaaggctaaattccttaatttggtttcattaagtcggtctgcaatctgcttgagcatttcagcttaatcgccagaggattgcttccatatttccccctaaacatactttacccaagctgtaaggtcctacataattgtgccaataatttagcagtgagcttcctggtagccgaagcaaaaagggaaagaaaaccactgtgtgagttgtgagaaagtaggaatcaataaaggctggagtggtc

SEQ ID NO: 119920 - DNA, 2844 bp, Homo sapiens
  Payload ID: 3514
  Gene Symbol: CIITA
  Gene Name: class II, major histocompatibility complex, transactivator
  ENST ID: ENST00000618207
  CDS Start-End: 134-1195
ggttagtgatgaggctagtgatgaggctgtgtgcttctgagctgggcatccgaaggcatccttggggaagctgagggcacgaggaggggctgccagactccgggagctgctgcctggctgggattcctacacaatgcgttgcctggctccacgccctgctgggtcctacctgtcagagccccaaggcagctcacagtgtgccaccatggagttggggcccctagaaggtggctacctggagcttcttaacagcgatgctgaccccctgtgcctctaccacttctatgaccagatggacctggctggagaagaagagattgagctctactcagaacccgacacagacaccatcaactgcgaccagttcagcaggctgttgtgtgacatggaaggtgatgaagagaccagggaggcttatgccaatatcgcggaactggaccagtatgtcttccaggactcccagctggagggcctgagcaaggacattttcaagcacataggaccagatgaagtgatcggtgagagtatggagatgccagcagaagttgggcagaaaagtcagaaaagacccttcccagaggagcttccggcagacctgaagcactggaagccagctgagccccccactgtggtgactggcagtctcctagtgggaccagtgagcgactgctccaccctgccctgcctgccactgcctgcgctgttcaaccaggagccagcctccggccagatgcgcctggagaaaaccgaccagattcccatgcctttctccagttcctcgttgagctgcctgaatctccctgagggacccatccagtttgtccccaccatctccactctgccccatgggctctggcaaatctctgaggctggaacaggggtctccagtatattcatctaccatggtgaggtgccccaggccagccaagtaccccctcccagtggattcactgtccacggcctcccaacatctccagaccggccaggctccaccagccccttcgctccatcagccactgacctgcccagcatgcctgaacctgccctgacctcccgagcaaacatgacagagcacaagacgtcccccacccaatgcccggcagctggagaggtctccaacaagcttccaaaatggcctggacgagaagttcctcggaagacacagctggggagctccctgctgttcgggacctaaagaaactggagtttgcgctgggccctgtctcaggcccccaggctttccccaaactggtgcggatcctcacggccttttcctccctgcagcatctggacctggatgcgctgagtgagaacaagatcggggacgagggtgtctcgcagctctcagccaccttcccccagctgaagtccttggaaaccctcaatctgtcccagaacaacatcactgacctgggtgcctacaaactcgccgaggccctgccttcgctcgctgcatccctgctcaggctaagcttgtacaataactgcatctgcgacgtgggagccgagagcttggctcgtgtgcttccggacatggtgtccctccgggtgatggacgtccagtacaacaagttcacggctgccggggcccagcagctcgctgccagccttcggaggtgtcctcatgtggagacgctggcgatgtggacgcccaccatcccattcagtgtccaggaacacctgcaacaacaggattcacggatcagcctgagatgatcccagctgtgctctggacaggcatgttctctgaggacactaaccacgctggaccttgaactgggtacttgtggacacagctcttctccaggctgtatcccatgagcctcagcatcctggcacccggcccctgctggttcagggttggcccctgcccggctgcggaatgaaccacatcttgctctgctgacagacacaggcccggctccaggctcctttagcgcccagttgggtggatgcctggtggcagctgcggtccacccaggagccccgaggccttctctgaaggacattgcggacagccacggccaggccagagggagtgacagaggcagccccattctgcctgcccaggcccctgccaccctggggagaaagtacttctttttttttatttttagacagagtctcactgttgcccaggctggcgtgcagtggtgcgatctgggttcactgcaacctccgcctcttgggttcaagcgattcttctgcttcagcctcccgagtagctgggactacaggcacccaccatcatgtctggctaatttttcatttttagtagagacagggttttgccatgttggccaggctggtctcaaactcttgacctcaggtgatccacccacctcagcctcccaaagtgctgggattacaagcgtgagccactgcaccgggccacagagaaagtacttctccaccctgctctccgaccagacaccttgacagggcacaccgggcactcagaagacactgatgggcaacccccagcctgctaattccccagattgcaacaggctgggcttcagtggcagctgcttttgtctatgggactcaatgcactgacattgttggccaaagccaaagctaggcctggccagatgcaccagcccttagcagggaaacagctaatgggacactaatggggcggtgagaggggaacagactggaagcacagcttcatttcctgtgtcttttttcactacattataaatgtctctttaatgtcacaggcaggtccagggtttgagttcataccctgttaccattttggggtacccactgctctggttatctaatatgtaacaagccaccccaaatcatagtggcttaaaacaacactcacattta

SEQ ID NO: 119921 - DNA, 4657 bp, Homo sapiens
  Payload ID: 3514
  Gene Symbol: CIITA
  Gene Name: class II, major histocompatibility complex, transactivator
  ENST ID: ENST00000618327
  CDS Start-End: 134-3529
ggttagtgatgaggctagtgatgaggctgtgtgcttctgagctgggcatccgaaggcatccttggggaagctgagggcacgaggaggggctgccagactccgggagctgctgcctggctgggattcctacacaatgcgttgcctggctccacgccctgctgggtcctacctgtcagagccccaaggcagctcacagtgtgccaccatggagttggggcccctagaaggtggctacctggagcttcttaacagcgatgctgaccccctgtgcctctaccacttctatgaccagatggacctggctggagaagaagagattgagctctactcagaacccgacacagacaccatcaactgcgaccagttcagcaggctgttgtgtgacatggaaggtgatgaagagaccagggaggcttatgccaatatcgcggaactggaccagtatgtcttccaggactcccagctggagggcctgagcaaggacattttcatagagcacataggaccagatgaagtgatcggtgagagtatggagatgccagcagaagttgggcagaaaagtcagaaaagacccttcccagaggagcttccggcagacctgaagcactggaagccagctgagccccccactgtggtgactggcagtctcctagtgggaccagtgagcgactgctccaccctgccctgcctgccactgcctgcgctgttcaaccaggagccagcctccggccagatgcgcctggagaaaaccgaccagattcccatgcctttctccagttcctcgttgagctgcctgaatctccctgagggacccatccagtttgtccccaccatctccactctgccccatgggctctggcaaatctctgaggctggaacaggggtctccagtatattcatctaccatggtgaggtgccccaggccagccaagtaccccctcccagtggattcactgtccacggcctcccaacatctccagaccggccaggctccaccagccccttcgctccatcagccactgacctgcccagcatgcctgaacctgccctgacctcccgagcaaacatgacagagcacaagacgtcccccacccaatgcccggcagctggagaggtctccaacaagcttccaaaatggcctgagccggtggagcagttctaccgctcactgcaggacacgtatggtgccgagcccgcaggcccggatggcatcctagtggaggtggatctggtgcaggccaggctggagaggagcagcagcaagagcctggagcgggaactggccaccccggactgggcagaacggcagctggcccaaggaggcctggctgaggtgctgttggctgccaaggagcaccggcggccgcgtgagacacgagtgattgctgtgctgggcaaagctggtcagggcaagagctattgggctggggcagtgagccgggcctgggcttgtggccggcttccccagtacgactttgtcttctctgtcccctgccattgcttgaaccgtccgggggatgcctatggcctgcaggatctgctcttctccctgggcccacagccactcgtggcggccgatgaggttttcagccacatcttgaagagacctgaccgcgttctgctcatcctagacggcttcgaggagctggaagcgcaagatggcttcctgcacagcacgtgcggaccggcaccggcggagccctgctccctccgggggctgctggccggccttttccagaagaagctgctccgaggttgcaccctcctcctcacagcccggccccggggccgcctggtccagagcctgagcaaggccgacgccctatttgagctgtccggcttctccatggagcaggcccaggcatacgtgatgcgctactttgagagctcagggatgacagagcaccaagacagagccctgacgctcctccgggaccggccacttcttctcagtcacagccacagccctactttgtgccgggcagtgtgccagctctcagaggccctgctggagcttggggaggacgccaagctgccctccacgctcacgggactctatgtcggcctgctgggccgtgcagccctcgacagcccccccggggccctggcagagctggccaagctggcctgggagctgggccgcagacatcaaagtaccctacaggaggaccagttcccatccgcagacgtgaggacctgggcgatggccaaaggcttagtccaacacccaccgcgggccgcagagtccgagctggccttccccagcttcctcctgcaatgcttcctgggggccctgtggctggctctgagtggcgaaatcaaggacaaggagctcccgcagtacctagcattgaccccaaggaagaagaggccctatgacaactggctggagggcgtgccacgctttctggctgggctgatcttccagcctcccgcccgctgcctgggagccctactcgggccatcggcggctgcctcggtggacaggaagcagaaggtgcttgcgaggtacctgaagcggctgcagccggggacactgcgggcgcggcagctgctggagctgctgcactgcgcccacgaggccgaggaggctggaatttggcagcacgtggtacaggagctccccggccgcctctcttttctgggcacccgcctcacgcctcctgatgcacatgtactgggcaaggccttggaggcggcgggccaagacttctccctggacctccgcagcactggcatttgcccctctggattggggagcctcgtgggactcagctgtgtcacccgtttcagggctgccttgagcgacacggtggcgctgtgggagtccctgcagcagcatggggagaccaagctacttcaggcagcagaggagaagttcaccatcgagcctttcaaagccaagtccctgaaggatgtggaagacctgggaaagcttgtgcagactcagaggacgagaagttcctcggaagacacagctggggagctccctgctgttcgggacctaaagaaactggagtttgcgctgggccctgtctcaggcccccaggctttccccaaactggtgcggatcctcacggccttttcctccctgcagcatctggacctggatgcgctgagtgagaacaagatcggggacgagggtgtctcgcagctctcagccaccttcccccagctgaagtccttggaaaccctcaatctgtcccagaacaacatcactgacctgggtgcctacaaactcgccgaggccctgccttcgctcgctgcatccctgctcaggctaagcttgtacaataactgcatctgcgacgtgggagccgagagcttggctcgtgtgcttccggacatggtgtccctccgggtgatggacgtccagtacaacaagttcacggctgccggggcccagcagctcgctgccagccttcggaggtgtcctcatgtggagacgctggcgatgtggacgcccaccatcccattcagtgtccaggaacacctgcaacaacaggattcacggatcagcctgagatgatcccagctgtgctctggacaggcatgttctctgaggacactaaccacgctggaccttgaactgggtacttgtggacacagctcttctccaggctgtatcccatgagcctcagcatcctggcacccggcccctgctggttcagggttggcccctgcccggctgcggaatgaaccacatcttgctctgctgacagacacaggcccggctccaggctcctttagcgcccagttgggtggatgcctggtggcagctgcggtccacccaggagccccgaggccttctctgaaggacattgcggacagccacggccaggccagagggagtgacagaggcagccccattctgcctgcccaggcccctgccaccctggggagaaagtacttctttttttttatttttagacagagtctcactgttgcccaggctggcgtgcagtggtgcgatctgggttcactgcaacctccgcctcttgggttcaagcgattcttctgcttcagcctcccgagtagctgggactacaggcacccaccatcatgtctggctaatttttcatttttagtagagacagggttttgccatgttggccaggctggtctcaaactcttgacctcaggtgatccacccacctcagcctcccaaagtgctgggattacaagcgtgagccactgcaccgggccacagagaaagtacttctccaccctgctctccgaccagacaccttgacagggcacaccgggcactcagaagacactgatgggcaacccccagcctgctaattccccagattgcaacaggctgggcttcagtggcagctgcttttgtctatgggactcaatgcactgacattgttggccaaagccaaagctaggcctggccagatgcaccagcccttagcagggaaacagctaatgggacactaatggggcggtgagaggggaacagactggaagcacagcttcatttcctgtgtcttttttcactacattataaatgtctctttaatgtcacaggcaggtccagggtttgagttcataccctgttaccattttggggtacccactgctctggttatctaatatgtaacaagccaccccaaatcatagtggcttaaaacaacactcacattta

SEQ ID NO: 119922 - DNA, 2248 bp, Homo sapiens
  Payload ID: 3515
  Gene Symbol: CLHC1
  Gene Name: clathrin heavy chain linker domain containing 1
  Uniprot ID: Q8NHS4
  ENST ID: ENST00000401408
  CDS Start-End: 347-2107
aagatgcagttccacctcccagattccctagttactatctctaagcactgaagtcggtgtttggagaaaaggactcaggtgaggactggagcctaacagatgagacagaatataaacaggaagtctctaaggcagtgtggtggaaggataataccatgatggaggaagtgcacagtattatgggagaacatagcagtggcatctgaccaattttaagggaatccaggacagctttcctgaagctgaagaaagagtaaaagccaggcttatcaaagttttggctttgttgcaagagcaggtcaagatttagctgttcttcagtgaacaagtgtgcagattgtcaaatatgtcagttcatcaaataagaaaacatgcagttctcccacctatcatttgtagaagtgacaaggaatttttggaaagtgtgcaaagatacataattacagaaactgaaagactgggctgtagtgaggaaggacctgctgatgaatattacatcatataccgaaatgtttttgataaggtaatagagcatatcactgcatacaaatccattcttacttcaatcaaaaaagaatatgatgcctttattgagacaataaagaaagaccgaagaactacattttgtcttcatggaaaacttaaaggtttggcagcagagcctacagctttggtatattacaggaaaagaacaatccaacttgaagcaaaaatgaggattatcgaaagtaattcctcgaagattcaatctcaaatagatcacatcaagcagtgtagggcagagtatgacacaaaagaagtaaaatattgtactttctccaaagatccttcaaaacctattccaggcatgactcttcaagaatccatgaatctagatgctctcactaaatacatgaaacatcttgaagataaatatgcagaaattaaacaagctatgttgataaaatatgtgccagctcagaggaaggctgatttagatgaagaaatgattgtgttattaaaacggcgagatgtagctgaaaatctgaacaaaaaattgcagttttgtcatcaaagactgcagataatttcacaggcacttagttcatgggtaaaatctgatatgagcagcccatttcaagactttgtggagcaaattcagaaaaccaaatatttacaaggtgaccaaggcattgttgaagaactaatggaagatgatccacgcagggcaaaagaagctgaaattatgcttcactacattgaaaggtttaatgagttaatctcacttggtgaatatgaaaaggcagcttgttatgcagcaaacagtcctagaagaattcttcgaaacattggtacaatgaatacatttaaggctgttggaaaaattagaggaaagcctcttccattactcttattttttgaggccctctttatcacaagtcatgcttttccatgtcctgttgatgcagctctaaccctggaaggaatcaaatgtggattatcagaaaaacggttagatttagttaccaattgggttacacaggaaagactgacattttctgaggaggctggggatgtgatttgtgattatggggagcaggatacttataacaaggccaagtgcctggctttagctcagattgtctacagtgaatgtggcctgcacaagaaagctattctttgcttgtgtaaacagggtcagactcatagggtcatggagtacatacagcagttgaaggactttactaccgatgacctgttgcagctattaatgtcatgtccccaagttgaattaattcagtgtctcactaaagagttgaatgagaaacaaccatctttatcttttggtcttgctatacttcatctgttctctgcagacatgaaaaaagttggcattaagctacttcaagaaatcaataaaggtgggatagatgcagtagaaagtcttatgataaatgattccttttgctccatagaaaagtggcaagaagtggcaaatatatgttcacagaatggctttgacaaattatctaatgacatcacgtctattcttcgatctcaggctgcagttacagaaatttctgaagaggatgacgcagtcaacctaatggaacatgtgttttggtagttctatatcttaaccagctgagggagcttgtacaacaccttatgtatgctggttgggaaaaactgattttaacgtaactaacttataaataaatctagagtaagaagatctcagaaataaatcacacttttgttatgatga

SEQ ID NO: 119923 - DNA, 1777 bp, Homo sapiens
  Payload ID: 3515
  Gene Symbol: CLHC1
  Gene Name: clathrin heavy chain linker domain containing 1
  Uniprot ID: Q8NHS4
  ENST ID: ENST00000406076
  CDS Start-End: 262-1656
cgtgaacttcgtttctcctctccctagcctgggcttatttctcactttagccttcggaatgctttcgaaactgtaatagagcatatcactgcatacaaatccattcttacttcaatcaaaaaagaatatgatgcctttattgagacaataaagaaagaccgaagaactacattttgtcttcatggaaaacttaaaggtttggcagcagagcctacagctttggtatattacaggaaaagaacaatccaacttgaagcaaaaatgaggattatcgaaagtaattcctcgaagattcaatctcaaatagatcacatcaagcagtgtagggcagagtatgacacaaaagaagtaaaatattgtactttctccaaagatccttcaaaacctattccaggcatgactcttcaagaatccatgaatctagatgctctcactaaatacatgaaacatcttgaagataaatatgcagaaattaaacaagctatgttgataaaatatgtgccagctcagaggaaggctgatttagatgaagaaatgattgtgttattaaaacggcgagatgtagctgaaaatctgaacaaaaaattgcagttttgtcatcaaagactgcagataatttcacaggcacttagttcatgggtaaaatctgatatgagcagcccatttcaagactttgtggagcaaattcagaaaaccaaatatttacaaggtgaccaaggcattgttgaagaactaatggaagatgatccacgcagggcaaaagaagctgaaattatgcttcactacattgaaaggtttaatgagttaatctcacttggtgaatatgaaaaggcagcttgttatgcagcaaacagtcctagaagaattcttcgaaacattggtacaatgaatacatttaaggctgttggaaaaattagaggaaagcctcttccattactcttattttttgaggccctctttatcacaagtcatgcttttccatgtcctgttgatgcagctctaaccctggaaggaatcaaatgtggattatcagaaaaacggttagatttagttaccaattgggttacacaggaaagactgacattttctgaggaggctggggatgtgatttgtgattatggggagcaggatacttataacaaggccaagtgcctggctttagctcagattgtctacagtgaatgtggcctgcacaagaaagctattctttgcttgtgtaaacagggtcagactcatagggtcatggagtacatacagcagttgaaggactttactaccgatgacctgttgcagctattaatgtcatgtccccaagttgaattaattcagtgtctcactaaagagttgaatgagaaacaaccatctttatcttttggtcttgctatacttcatctgttctctgcagacatgaaaaaagttggcattaagctacttcaagaaatcaataaaggtgggatagatgcagtagaaagtcttatgataaatgattccttttgctccatagaaaagtggcaagaagtggcaaatatatgttcacagaatggctttgacaaattatctaatgacatcacgtctattcttcgatctcaggctgcagttacagaaatttctgaagaggatgacgcagtcaacctaatggaacatgtgttttggtagttctatatcttaaccagctgagggagcttgtacaacaccttatgtatgctggttgggaaaaactgattttaacgtaactaacttataaataaatctagagtaagaagatctcagaaataaa

SEQ ID NO: 119924 - DNA, 430 bp, Homo sapiens
  Payload ID: 3515
  Gene Symbol: CLHC1
  Gene Name: clathrin heavy chain linker domain containing 1
  ENST ID: ENST00000403506
  CDS Start-End: 291-430
gaggaccatccactgggtgtcgggggagcttctgccccaagtagcaggagggagctgtcaaggcgtggagttcacactcaaacactcccagaggacggcactctgcatgggacgccatccagctcctttgactgtggaatcaagtacattatcagctggcccctggctcctggctgtgacctcccttcgcttgaactgagccttgtgtgcttatcaaagttttggctttgttgcaagagcaggtcaagatttagctgttcttcagtgaacaagtgtgcagattgtcaaatatgtcagttcatcaaataagaaaacatgcagttctcccacctatcatttgtagaagtgacaaggaatttttggaaagtgtgcaaagatacataattacagaaactgaaagactgggctgtagtgaggaaggacctgctga

SEQ ID NO: 119925 - DNA, 2139 bp, Homo sapiens
  Payload ID: 3515
  Gene Symbol: CLHC1
  Gene Name: clathrin heavy chain linker domain containing 1
  Uniprot ID: Q8NHS4
  ENST ID: ENST00000407122
  CDS Start-End: 238-1998
gttaagcggggggcaaagggtgcggggcacgaaaggtgtccttcactcacttccagaagcggtgatgggcagagaatcagcaatctaccagacgctccttgggccttcaagggaagggaatttgcgtggcctgctccaggcaaactgaaaaataggcttatcaaagttttggctttgttgcaagagcaggtcaagatttagctgttcttcagtgaacaagtgtgcagattgtcaaatatgtcagttcatcaaataagaaaacatgcagttctcccacctatcatttgtagaagtgacaaggaatttttggaaagtgtgcaaagatacataattacagaaactgaaagactgggctgtagtgaggaaggacctgctgatgaatattacatcatataccgaaatgtttttgataaggtaatagagcatatcactgcatacaaatccattcttacttcaatcaaaaaagaatatgatgcctttattgagacaataaagaaagaccgaagaactacattttgtcttcatggaaaacttaaaggtttggcagcagagcctacagctttggtatattacaggaaaagaacaatccaacttgaagcaaaaatgaggattatcgaaagtaattcctcgaagattcaatctcaaatagatcacatcaagcagtgtagggcagagtatgacacaaaagaagtaaaatattgtactttctccaaagatccttcaaaacctattccaggcatgactcttcaagaatccatgaatctagatgctctcactaaatacatgaaacatcttgaagataaatatgcagaaattaaacaagctatgttgataaaatatgtgccagctcagaggaaggctgatttagatgaagaaatgattgtgttattaaaacggcgagatgtagctgaaaatctgaacaaaaaattgcagttttgtcatcaaagactgcagataatttcacaggcacttagttcatgggtaaaatctgatatgagcagcccatttcaagactttgtggagcaaattcagaaaaccaaatatttacaaggtgaccaaggcattgttgaagaactaatggaagatgatccacgcagggcaaaagaagctgaaattatgcttcactacattgaaaggtttaatgagttaatctcacttggtgaatatgaaaaggcagcttgttatgcagcaaacagtcctagaagaattcttcgaaacattggtacaatgaatacatttaaggctgttggaaaaattagaggaaagcctcttccattactcttattttttgaggccctctttatcacaagtcatgcttttccatgtcctgttgatgcagctctaaccctggaaggaatcaaatgtggattatcagaaaaacggttagatttagttaccaattgggttacacaggaaagactgacattttctgaggaggctggggatgtgatttgtgattatggggagcaggatacttataacaaggccaagtgcctggctttagctcagattgtctacagtgaatgtggcctgcacaagaaagctattctttgcttgtgtaaacagggtcagactcatagggtcatggagtacatacagcagttgaaggactttactaccgatgacctgttgcagctattaatgtcatgtccccaagttgaattaattcagtgtctcactaaagagttgaatgagaaacaaccatctttatcttttggtcttgctatacttcatctgttctctgcagacatgaaaaaagttggcattaagctacttcaagaaatcaataaaggtgggatagatgcagtagaaagtcttatgataaatgattccttttgctccatagaaaagtggcaagaagtggcaaatatatgttcacagaatggctttgacaaattatctaatgacatcacgtctattcttcgatctcaggctgcagttacagaaatttctgaagaggatgacgcagtcaacctaatggaacatgtgttttggtagttctatatcttaaccagctgagggagcttgtacaacaccttatgtatgctggttgggaaaaactgattttaacgtaactaacttataaataaatctagagtaagaagatctcagaaataaatcacacttttgttatgatga

SEQ ID NO: 119926 - DNA, 549 bp, Homo sapiens
  Payload ID: 3515
  Gene Symbol: CLHC1
  Gene Name: clathrin heavy chain linker domain containing 1
  ENST ID: ENST00000411884
  CDS Start-End: 1-150
ctgaacaaaaaattgcagttttgtcatcaaagactgcagataatttcacaggcacttagttcatgggtaaaatctgatatgagcagcccatttcaagactttgtggagcaaattcagaaaaccaaatatttacaaggtttaatgagttaatctcacttggtgaatatgaaaaggcagcttgttatgcagcaaacagtcctagaagaattcttcgaaacattggtacaatgaatacatttaaggatgacctgttgcagctattaatgtcatgtccccaagttgaattaattcagtgtctcactaaagagttgaatgagaaacaaccatctttatcttttggtcttgctatacttcatctgttctctgcagacatgaaaaaagttggcattaagctacttcaagaaatcaataaaggtgggatagatgcagtagaaagtcttatgataaatgattccttttgctccatagaaaagtggcaagaagtggcaaatatatgttcacagaatggctttgacaaattatctaatgacatcacgtctattcttcgat

SEQ ID NO: 119927 - DNA, 499 bp, Homo sapiens
  Payload ID: 3515
  Gene Symbol: CLHC1
  Gene Name: clathrin heavy chain linker domain containing 1
  ENST ID: ENST00000425841
  CDS Start-End: 448-499
aagtagcaggagggagctgtcaaggcgtggagttcacactcaaacactcccagaggacggcactctgcatgggacgccatccagctcctttgactgtggaatcaagtacattatcagctggcccctggctcctggctgtgacctcccttcgcttgaactgagccttgtgtgtaagggcgtatcaagttgtatgggcttcgccgctgggtgaccccaaatgcaactccaggaagcatgggttaccaatgactttaaggttaacgatcagctgggcgcggtggctgacgcctgtaatcccagcactttgggaggtcgaggcgaatggatcacgaggtcaggagttcaagaccagcctggccaacatggcttatcaaagttttggctttgttgcaagagcaggtcaagatttagctgttcttcagtgaacaagtgtgcagattgtcaaatatgtcagttcatcaaataagaaaacatgcagttctcccacctatcatttgta

SEQ ID NO: 119928 - DNA, 2052 bp, Homo sapiens
  Payload ID: 3515
  Gene Symbol: CLHC1
  Gene Name: clathrin heavy chain linker domain containing 1
  ENST ID: ENST00000428621
  CDS Start-End: 122-400
tctaagcactgaagtcggtgtttggagaaaaggactcaggcttatcaaagttttggctttgttgcaagagcaggtcaagatttagctgttcttcagtgaacaagtgtgcagattgtcaaatatgtcagttcatcaaataagaaaacatgcagttctcccacctatcatttgtagaagtgacaaggaatttttggaaagtgtgcaaagatacataattacagaaactgaaagactgggctgtagtgaggaaggacctgctgatgaatattacatcatataccgaaatgtttttgataagctgttggaaaaattagaggaaagcctcttccattactcttattttttgaggccctctttatcacaagtcatgcttttccatgtcctgttgatgcagctctaaccctggaaggaatcaaatgtggattatcagaaaaacggttagatttagttaccaattgggttacacaggaaagactgacattttctgaggaggctggggatgtgatttgtgattatggggagcaggatacttataacaaggccaagtgcctggctttagctcagattgtctacagtgaatgtggcctgcacaagaaagctattctttgcttgtgtaaacagggtcagactcatagggtcatggagtacatacagcagttgaaggactttactaccgatgacctgttgcagctattaatgtcatgtccccaagttgaattaattcagtgtctcactaaagagttgaatgagaaacaaccatctttatcttttggtcttgctatacttcatctgttctctgcagacatgaaaaaagttggcattaagctacttcaagaaatcaataaaggtgggatagatgcagtagaaagtcttatgataaatgattccttttgctccatagaaaagtggcaagaagtggcaaatatatgttcacagaatggctttgacaaattatctaatgacatcacgtctattcttcgatctcaggctgcagttacagaaatttctgaagaggatgacgcagtcaacctaatggaacatgtgttttggtagttctatatcttaaccagctgagggagcttgtacaacaccttatgtatgctggttgggaaaaactgattttaacgtaactaacttataaataaatctagagtaagaagatctcagaaataaatcacacttttgttatgatgacatttagatttgtctttgaaatatttatactattgcttccttttccccatatggtcatttcttatattgaatcttgataaaatccaagattataactttgtgtgaaacagtgtagggcatttttatctaaggacataagctaatgtccagatatattactttctggtgatgtaatatgatagcaagaactgaggaaggtgtgggtagtatcctgtgtgttagactgtcttcccaaacatgaaatgctacaagcctgacttgaccagaaaagcaggaaatcatttcaaggttggacttgctggcaaaaacctagagtatagtaattttgtactgctgatttaaagatgcgccccatgctttgatatatataaatatggcaaagcttaggcttctagtataaaagctgggactcttggcatgttattacttagagagaagaccagtcgaattttgcatagaagtagacctgtgatacctataggtatggaaaatatgtcataagaagtggttttggattatttcaagtgtctgaataagtatttgattgaaaactctgaaagttctgtgccatggacaggtgtaatattaaaaatatttaatgattagtatggcatgggcacaaatcaagcagaacagatacctaattaatcagaacagcctttagcccttatgccacaccagagcttactagctaaatgtcatccttgaccatggaacatggttaaaatgagctgctggctgggcaaggtagctcatgtctgtaatcccagcactttgggaggtcgaggcaggaggatcgcttgagcccaggagtttgagaccagctaggtaacacagtgagatcccgtctctgttatt

SEQ ID NO: 119929 - DNA, 616 bp, Homo sapiens
  Payload ID: 3515
  Gene Symbol: CLHC1
  Gene Name: clathrin heavy chain linker domain containing 1
  ENST ID: ENST00000451916
  CDS Start-End: 375-616
tagttctccactgctttcttctaccttggactacttgtcccaagatgcagttccacctcccagattccctagttactatctctaagcactgaagtcggtgtttggagaaaaggactcagcctaacagatgagacagaatataaacaggaagtctctaaggcagtgtggtggaaggataataccatgatggaggaagtgcacagtattatgggagaacatagcagtggcatctgaccaattttaagggaatccaggacagctttcctgaagctgaagaaagagtaaaagccaggcttatcaaagttttggctttgttgcaagagcaggtcaagatttagctgttcttcagtgaacaagtgtgcagattgtcaaatatgtcagttcatcaaataagaaaacatgcagttctcccacctatcatttgtagaagtgacaaggaatttttggaaagtgtgcaaagatacataattacagaaactgaaagactgggctgtagtgaggaaggacctgctgatgaatattacatcatataccgaaatgtttttgataaggtaatagagcatatcactgcatacaaatccattcttacttcaatcaaaaaagaatatgatgcctt

SEQ ID NO: 119930 - DNA, 3440 bp, Homo sapiens
  Payload ID: 3516
  Gene Symbol: CLINT1
  Gene Name: clathrin interactor 1
  Uniprot ID: Q14677
  ENST ID: ENST00000411809
  CDS Start-End: 206-2083
acttccgctccacgcagcgcctgtgctgccgcgtctcgacgtgtcaccggcggcgccgctgctgtggcaaaggaaggagctgactgggggagttcgaggcggcgggcggcggtgaccccggcctggaactgccccggtacggaagtgttccggggtccgtggggagcaggagagggaggcggcggaccgtcccgcgcggggcacgatgttgaacatgtggaaggtgcgcgagctggtggacaaagccaccaatgttgttatgaattattcagagatcgagtctaaggttcgagaggcaacgaacgatgatccttggggaccttctgggcaactcatgggagagattgccaaggctacatttatgtatgaacaatttccagaacttatgaacatgctttggtcacgaatgttaaaagacaacaaaaagaattggagaagagtttataagtcgttgctgctcctagcttacctcataaggaatggatcagagcgtgttgttacaagtgccagagaacacatttatgatttacgatccctggaaaattaccactttgtagatgagcatggtaaggatcaaggtataaatattcgacagaaggtgaaggaattggttgaatttgcccaggatgacgacaggcttcgtgaagagcgaaagaaagcaaagaagaacaaagacaagtatgttggggtttcctcagacagtgttggaggattcagatacagtgaaagatatgatcctgagcccaaatcaaaatgggatgaggagtgggataaaaacaagagtgcttttccattcagtgataaattaggtgagctgagtgataaaattggaagcacaattgatgacaccatcagcaagttccggaggaaagatagagaagactctccagaaagatgcagcgacagcgatgaggaaaagaaagcgagaagaggcagatctcccaaaggtgaattcaaagatgaagaggagactgtgacgacaaagcatattcatatcacacaggccacagagaccaccacaaccagacacaagcgcacagcaaatccttccaaaaccattgatcttggagcagcagcacattacacaggggacaaagcaagtccagatcagaatgcttcaacccacacacctcagtcttcagttaagacttcagtgcctagcagcaagtcatctggtgaccttgttgatctgtttgatggcaccagccagtcaacaggaggatcagctgatttattcggaggatttgctgactttggctcagctgctgcatcaggcagtttcccttcccaagtaacagcaacaagtgggaatggagactttggtgactggagtgccttcaaccaagccccatcaggccctgttgcttccagtggcgagttctttggcagtgcctcacagccagcggtagaacttgttagtggctcacaatcagctctaggcccacctcctgctgcctcaaattcttcagacctgtttgatcttatgggctcgtcccaggcaaccatgacatcttcccagagtatgaatttctctatgatgagcactaacactgtgggacttggtttgcctatgtcaagatcacagaatacagatatggtccagaaatcagtcagcaaaaccttgccctctacttggtctgaccccagtgtaaacatcagcctagacaacttactacctggtatgcagccttccaaaccccagcagccatcactgaatacaatgattcagcaacagaatatgcagcagcctatgaatgtgatgactcaaagttttggagctgtgaacctcagttctccatcgaacatgcttcctgtccggccccaaactaatgctttgatagggggacccatgcctatgagcatgcccaatgtgatgactggcaccatgggaatggcccctcttggaaatactccgatgatgaaccagagcatgatgggcatgaacatgaacatagggatgtccgctgctgggatgggcttgacaggcacaatgggaatgggcatgcccaacatagccatgacttctggaactgtgcaacccaagcaagatgcctttgcaaatttcgccaattttagcaaataagagattgtaaaagaagcagattgaatgaagaatttttagctgtgcagataggtgatgttgggatggaaaatgctaatcaactaccctttcttttatcaagtaattaaaataaatctacataaagaaccaaaaaggctgttttataaaagtgaaatatccagtatttcagagggccaggcaagagcacttcagatgaggcagtcaaaatcatttttttccagtgaggatagaccacaagtgggtggtgagaccattgaaagcctttatcaactgaagagtccatttaacagcataatttgtgggaagactggaatagggctgaataaatgtgtttgaatctctaattttatactttcttttcctgaggaacttgatttttctgtccctggatcgccttgtcataattgggtctgttccttttactaccactcttgagtccatatatgaaatcattaaagttggatgatcagttttttataaaaatatatatttttgtccaagaaaaaaaaaagcatacatatgtgattatggctaaatcaaaggtaactggaatgtatatacttttgctaatgttccagcaacactgctattatactatccaaatttttattgtaacaaaacctctttaagcaattggtgattgccatgggacttttcccatgtcttctgctgtaattatcctgtgcagaactaggaagaaatttttttcaggactgctctatggtttcctttaaaagaaaaaaacttctgtttgtttttagcagtcattatttacaatttgcagtgattaacttggcaaggcttccttccgtgtttatccctgtagccatcatttaagtcaggaacagtcagaaaaatatttattttattttttttttgggtgtctgcaaaggtaaaaatccattaaaaccttaagttaaatataaatgttacaactcaatgtttgcttttagattttatacagtatttgttttgttttggttttgagtgtatataatgcagcattagcaatatggttccaatagaggagttaaatatatattgttaaaggagacctgtagcagtcaaagattttattgatttaatgacaaaggaaattaatgaaaatgtttttgtttttctgctgtaattctgcattaagctcacatgaaaatcatgattctagagtttggaatgcaaaattaattgttttaccctcaagctgggaatatttttcaaaataaatactataatatagatatcaaattattacctccccatgttatgttgaaaatttttttattaaattgataaaactttatttccattatattcataatgttctgttatacataacattaaaatgttcattaaaatc

SEQ ID NO: 119931 - DNA, 3987 bp, Homo sapiens
  Payload ID: 3516
  Gene Symbol: CLINT1
  Gene Name: clathrin interactor 1
  Uniprot ID: Q14677
  ENST ID: ENST00000523094
  CDS Start-End: 207-2084
gcgtctcgacgtgtcaccggcggcgccgctgctgtggcaaaggaaggagctgactgggggagttcgaggcggcgggcggcggtgaccccggcctggaactgccccggtacggaagtgttccggggtccgtggggagcaggagagggaggcggcggaccgtcccgcgcggggcacgatgttgaacatgtggaagcaccaatgttgttatgaattattcagagatcgagtctaaggttcgagaggcaacgaacgatgatccttggggaccttctgggcaactcatgggagagattgccaaggctacatttatgtatgaacaatttccagaacttatgaacatgctttggtcacgaatgttaaaagacaacaaaaagaattggagaagagtttataagtcgttgctgctcctagcttacctcataaggaatggatcagagcgtgttgttacaagtgccagagaacacatttatgatttacgatccctggaaaattaccactttgtagatgagcatggtaaggatcaaggtataaatattcgacagaaggtgaaggaattggttgaatttgcccaggatgacgacaggcttcgtgaagagcgaaagaaagcaaagaagaacaaagacaagtatgttggggtttcctcagacagtgttggaggattcagatacagtgaaagatatgatcctgagcccaaatcaaaatgggatgaggagtgggataaaaacaagagtgcttttccattcagtgataaattaggtgagctgagtgataaaattggaagcacaattgatgacaccatcagcaagttccggaggaaagatagagaagactctccagaaagatgcagcgacagcgatgaggaaaagaaagcgagaagaggcagatctcccaaaggtgaattcaaagatgaagaggagactgtgacgacaaagcatattcatatcacacaggccacagagaccaccacaaccagacacaagcgcacagcaaatccttccaaaaccattgatcttggagcagcagcacattacacaggggacaaagcaagtccagatcagaatgcttcaacccacacacctcagtcttcagttaagacttcagtgcctagcagcaagtcatctggtgaccttgttgatctgtttgatggcaccagccagtcaacaggaggatcagctgatttattcggaggatttgctgactttggctcagctgctgcatcaggcagtttcccttcccaagtaacagcaacaagtgggaatggagactttggtgactggagtgccttcaaccaagccccatcaggccctgttgcttccagtggcgagttctttggcagtgcctcacagccagcggtagaacttgttagtggctcacaatcagctctaggcccacctcctgctgcctcaaattcttcagacctgtttgatcttatgggctcgtcccaggcaaccatgacatcttcccagagtatgaatttctctatgatgagcactaacactgtgggacttggtttgcctatgtcaagatcacagcctttgcaaaatgttagcacagtgctgcagaagcctaatcctctctataatcagaatacagatatggtccagaaatcagtcagcaaaaccttgccctctacttggtctgaccccagtgtaaacatcagcctagacaacttactacctggtatgcagccttccaaaccccagcagccatcactgaatacaatgattcagcaacagaatatgcagcagcctatgaatgtgatgactcaaagttttggagctgtgaacctcagttctccatcgaacatgcttcctgtccggccccaaactaatgctttgatagggggacccatgcctatgagcatgcccaatgtgatgactggcaccatgggaatggcccctcttggaaatactccgatgatgaaccagagcatgatgggcatgaacatgaacatagggatgtccgctgctgggatgggcttgacaggcacaatgggaatgggcatgcccaacatagccatgacttctggaactgtgcaacccaagcaagatgcctttgcaaatttcgccaattttagcaaataagagattgtaaaagaagcagattgaatgaagaatttttagctgtgcagataggtgatgttgggatggaaaatgctaatcaactaccctttcttttatcaagtaattaaaataaatctacataaagaaccaaaaaggctgttttataaaagtgaaatatccagtatttcagagggccaggcaagagcacttcagatgaggcagtcaaaatcatttttttccagtgaggatagaccacaagtgggtggtgagaccattgaaagcctttatcaactgaagagtccatttaacagcataatttgtgggaagactggaatagggctgaataaatgtgtttgaatctctaattttatactttcttttcctgaggaacttgatttttctgtccctggatcgccttgtcataattgggtctgttccttttactaccactcttgagtccatatatgaaatcattaaagttggatgatcagttttttataaaaatatatatttttgtccaagaaaaaaaaaagcatacatatgtgattatggctaaatcaaaggtaactggaatgtatatacttttgctaatgttccagcaacactgctattatactatccaaatttttattgtaacaaaacctctttaagcaattggtgattgccatgggacttttcccatgtcttctgctgtaattatcctgtgcagaactaggaagaaatttttttcaggactgctctatggtttcctttaaaagaaaaaaacttctgtttgtttttagcagtcattatttacaatttgcagtgattaacttggcaaggcttccttccgtgtttatccctgtagccatcatttaagtcaggaacagtcagaaaaatatttattttattttttttttgggtgtctgcaaaggtaaaaatccattaaaaccttaagttaaatataaatgttacaactcaatgtttgcttttagattttatacagtatttgttttgttttggttttgagtgtatataatgcagcattagcaatatggttccaatagaggagttaaatatatattgttaaaggagacctgtagcagtcaaagattttattgatttaatgacaaaggaaattaatgaaaatgtttttgtttttctgctgtaattctgcattaagctcacatgaaaatcatgattctagagtttggaatgcaaaattaattgttttaccctcaagctgggaatatttttcaaaataaatactataatatagatatcaaattattacctccccatgttatgttgaaaatttttttattaaattgataaaactttatttccattatattcataatgttctgttatacataacattaaaatgttcattaaaatcaatgttgaactgctttttctttcgttctgttagacatttgagaccatttggggaaaaaataattatagtttgggcaaagtaatttttataaataatttaaaattatttaatgacttctctattctttcctatcagactctactgttaggaattaaaaatgaagcagcaaagatatcctgacctgctccattcttgctaatgttccatctacaacatttctaattaggcagaaattcatgtacttcagctaagtggtaatgaaaagtgattcatttgctgaataagagatgagagtgagtgtaattagctgactgcggtttttaatctttcaacaattcaatgtgtttaacttagtttcaaagaataggagctttcaagtgttgttacttcagagcaatcaagccagcctctggtggccgcatagtagaatatggtccctgatatttaaaaccgatcatcttaagtaaattttttctttaagaagtatatcttcactttctcaaatatgtatggttcttagacgaagtaaatgtttatctgaacctt

SEQ ID NO: 119932 - DNA, 2346 bp, Homo sapiens
  Payload ID: 3516
  Gene Symbol: CLINT1
  Gene Name: clathrin interactor 1
  Uniprot ID: Q14677
  ENST ID: ENST00000523908
  CDS Start-End: 174-2105
gtctcgacgtgtcaccggcggcgccgctgctgtggcaaaggaaggagctgactgggggagttcgaggcggcgggcggcggtgaccccggcctggaactgccccggtacggaagtgttccggggtccgtggggagcaggagagggaggcggcggaccgtcccgcgcggggcacgatgttgaacatgtggaaggtgcgcgagctggtggacaaagccaccaatgttgttatgaattattcagagatcgagtctaaggttcgagaggcaacgaacgatgatccttggggaccttctgggcaactcatgggagagattgccaaggctacatttatgtatgaacaatttccagaacttatgaacatgctttggtcacgaatgttaaaagacaacaaaaagaattggagaagagtttataagtcgttgctgctcctagcttacctcataaggaatggatcagagcgtgttgttacaagtgccagagaacacatttatgatttacgatccctggaaaattaccactttgtagatgagcatggtaaggatcaaggtataaatattcgacagaaggtgaaggaattggttgaatttgcccaggatgacgacaggcttcgtgaagagcgaaagaaagcaaagaagaacaaagacaagtatgttggggtttcctcagacagtgttggaggattcagatacagtgaaagatatgatcctgagcccaaatcaaaatgggatgaggagtgggataaaaacaagagtgcttttccattcagtgataaattaggtgagctgagtgataaaattggaagcacaattgatgacaccatcagcaagttccggaggaaagatagagaagactctccagaaagatgcagcgacagcgatgaggaaaagaaagcgagaagaggcagatctcccaaaggtgaattcaaagatgaagaggagactgtgacgacaaagcatattcatatcacacaggccacagagaccaccacaaccagacacaagcgcacagcaaatccttccaaaaccattgatcttggagcagcagcacattacacaggggacaaagcaagtccagatcagaatgcttcaacccacacacctcagtcttcagttaagacttcagtgcctagcagcaagtcatctggtgaccttgttgatctgtttgatggcaccagccagtcaacaggaggatcagctgatttattcggaggatttgctgactttggctcagctgctgcatcaggcagtttcccttcccaagtaacagcaacaagtgggaatggagactttggtgactggagtgccttcaaccaagccccatcaggccctgttgcttccagtggcgagttctttggcagtgcctcacagccagcggtagaacttgttagtggctcacaatcagctctaggcccacctcctgctgcctcaaattcttcagacctgtttgatcttatgggctcgtcccaggcaaccatgacatcttcccagagtatgaatttctctatgatgagcactaacactgtgggacttggtttgcctatgtcaagatcacagcctttgcaaaatgttagcacagtgctgcagaagcctaatcctctctataatcagaatacagatatggtccagaaatcagtcagcaaaaccttgccctctacttggtctgaccccagtgtaaacatcagcctagacaacttactacctggtatgcagccttccaaaccccagcagccatcactgaatacaatgattcagcaacagaatatgcagcagcctatgaatgtgatgactcaaagttttggagctgtgaacctcagttctccatcgaacatgcttcctgtccggccccaaactaatgctttgatagggggacccatgcctatgagcatgcccaatgtgatgactggcaccatgggaatggcccctcttggaaatactccgatgatgaaccagagcatgatgggcatgaacatgaacatagggatgtccgctgctgggatgggcttgacaggcacaatgggaatgggcatgcccaacatagccatgacttctggaactgtgcaacccaagcaagatgcctttgcaaatttcgccaattttagcaaataagagattgtaaaagaagcagattgaatgaagaatttttagctgtgcagataggtgatgttgggatggaaaatgctaatcaactaccctttcttttatcaagtaattaaaataaatctacataaagaaccaaaaaggctgttttataaaagtgaaatatccagtatttcagagggccaggcaagagcacttcagatgaggcagtcaaaatcatttttttccagtgaggatagaccacaagtgg

SEQ ID NO: 119933 - DNA, 733 bp, Homo sapiens
  Payload ID: 3516
  Gene Symbol: CLINT1
  Gene Name: clathrin interactor 1
  ENST ID: ENST00000521047
  CDS Start-End: 1-166
tcctgctgcctcaaattcttcagacctgtttgatcttatgggctcgtcccaggcaaccatgacatcttcccagagtatgaatttctctatgatgagcactaacactgtgggacttggtttgcctatgtcaagatcacagattctcgtctttggggtattaggatgaaggaaaagaagaaagaagcagaaagaatacagatatggtccagaaatcagtcagcaaaaccttgccctctacttggtctgaccccagtgtaaacatcagcctagacaacttactacctggtatgcagccttccaaaccccagcagccatcactgaatacaatgattcagcaacagaatatgcagcagcctatgaatgtgatgactcaaagttttggagctgtgaacctcagttctccatcgaacatgcttcctgtccggccccaaactaatgctttgatagggggacccatgcctatgagcatgcccaatgtgatgactggcaccatgggaatggcccctcttggaaatactccgatgatgaaccagagcatgatgggcatgaacatgaacatagggatgtccgctgctgggatgggcttgacaggcacaatgggaatgggcatgcccaacatagccatgacttctggaactgtgcaacccaagcaagatgcctttgcaaatttcgccaattttagcaaataagagattgtaaaagaagcagattgaatgaagaatttttagctgtg

SEQ ID NO: 119934 - DNA, 399 bp, Homo sapiens
  Payload ID: 3516
  Gene Symbol: CLINT1
  Gene Name: clathrin interactor 1
  ENST ID: ENST00000521615
  CDS Start-End: 1-399
cattgatcttggagcagcagcacattacacaggggacaaagcaagtccagatcagaatgcttcaacccacacacctcagtcttcagttaagacttcagtgcctagcagcaagtcatctggtgaccttgttgatctgtttgatggcaccagccagtcaacagtaacagcaacaagtgggaatggagactttggtgactggagtgccttcaaccaagccccatcaggccctgttgcttccagtggcgagttctttggcagtgcctcacagccagcggtagaacttgttagtggctcacaatcagctctaggcccacctcctgctgcctcaaattcttcagacctgtttgatcttatgggctcgtcccaggcaaccatgacatcttcccagagtatgaattt

SEQ ID NO: 119935 - DNA, 3344 bp, Homo sapiens
  Payload ID: 3516
  Gene Symbol: CLINT1
  Gene Name: clathrin interactor 1
  Uniprot ID: Q14677
  ENST ID: ENST00000530742
  CDS Start-End: 108-1985
gtcaccggcggcgccgctgctgtggcaaaggaaggagctgactgggggagttcgaggcggcgggcggcggtgaccccggcctggaactgccccgcaccaatgttgttatgaattattcagagatcgagtctaaggttcgagaggcaacgaacgatgatccttggggaccttctgggcaactcatgggagagattgccaaggctacatttatgtatgaacaatttccagaacttatgaacatgctttggtcacgaatgttaaaagacaacaaaaagaattggagaagagtttataagtcgttgctgctcctagcttacctcataaggaatggatcagagcgtgttgttacaagtgccagagaacacatttatgatttacgatccctggaaaattaccactttgtagatgagcatggtaaggatcaaggtataaatattcgacagaaggtgaaggaattggttgaatttgcccaggatgacgacaggcttcgtgaagagcgaaagaaagcaaagaagaacaaagacaagtatgttggggtttcctcagacagtgttggaggattcagatacagtgaaagatatgatcctgagcccaaatcaaaatgggatgaggagtgggataaaaacaagagtgcttttccattcagtgataaattaggtgagctgagtgataaaattggaagcacaattgatgacaccatcagcaagttccggaggaaagatagagaagactctccagaaagatgcagcgacagcgatgaggaaaagaaagcgagaagaggcagatctcccaaaggtgaattcaaagatgaagaggagactgtgacgacaaagcatattcatatcacacaggccacagagaccaccacaaccagacacaagcgcacagcaaatccttccaaaaccattgatcttggagcagcagcacattacacaggggacaaagcaagtccagatcagaatgcttcaacccacacacctcagtcttcagttaagacttcagtgcctagcagcaagtcatctggtgaccttgttgatctgtttgatggcaccagccagtcaacaggaggatcagctgatttattcggaggatttgctgactttggctcagctgctgcatcaggcagtttcccttcccaagtaacagcaacaagtgggaatggagactttggtgactggagtgccttcaaccaagccccatcaggccctgttgcttccagtggcgagttctttggcagtgcctcacagccagcggtagaacttgttagtggctcacaatcagctctaggcccacctcctgctgcctcaaattcttcagacctgtttgatcttatgggctcgtcccaggcaaccatgacatcttcccagagtatgaatttctctatgatgagcactaacactgtgggacttggtttgcctatgtcaagatcacagcctttgcaaaatgttagcacagtgctgcagaagcctaatcctctctataatcagaatacagatatggtccagaaatcagtcagcaaaaccttgccctctacttggtctgaccccagtgtaaacatcagcctagacaacttactacctggtatgcagccttccaaaccccagcagccatcactgaatacaatgattcagcaacagaatatgcagcagcctatgaatgtgatgactcaaagttttggagctgtgaacctcagttctccatcgaacatgcttcctgtccggccccaaactaatgctttgatagggggacccatgcctatgagcatgcccaatgtgatgactggcaccatgggaatggcccctcttggaaatactccgatgatgaaccagagcatgatgggcatgaacatgaacatagggatgtccgctgctgggatgggcttgacaggcacaatgggaatgggcatgcccaacatagccatgacttctggaactgtgcaacccaagcaagatgcctttgcaaatttcgccaattttagcaaataagagattgtaaaagaagcagattgaatgaagaatttttagctgtgcagataggtgatgttgggatggaaaatgctaatcaactaccctttcttttatcaagtaattaaaataaatctacataaagaaccaaaaaggctgttttataaaagtgaaatatccagtatttcagagggccaggcaagagcacttcagatgaggcagtcaaaatcatttttttccagtgaggatagaccacaagtgggtggtgagaccattgaaagcctttatcaactgaagagtccatttaacagcataatttgtgggaagactggaatagggctgaataaatgtgtttgaatctctaattttatactttcttttcctgaggaacttgatttttctgtccctggatcgccttgtcataattgggtctgttccttttactaccactcttgagtccatatatgaaatcattaaagttggatgatcagttttttataaaaatatatatttttgtccaagaaaaaaaaaagcatacatatgtgattatggctaaatcaaaggtaactggaatgtatatacttttgctaatgttccagcaacactgctattatactatccaaatttttattgtaacaaaacctctttaagcaattggtgattgccatgggacttttcccatgtcttctgctgtaattatcctgtgcagaactaggaagaaatttttttcaggactgctctatggtttcctttaaaagaaaaaaacttctgtttgtttttagcagtcattatttacaatttgcagtgattaacttggcaaggcttccttccgtgtttatccctgtagccatcatttaagtcaggaacagtcagaaaaatatttattttattttttttttgggtgtctgcaaaggtaaaaatccattaaaaccttaagttaaatataaatgttacaactcaatgtttgcttttagattttatacagtatttgttttgttttggttttgagtgtatataatgcagcattagcaatatggttccaatagaggagttaaatatatattgttaaaggagacctgtagcagtcaaagattttattgatttaatgacaaaggaaattaatgaaaatgtttttgtttttctgctgtaattctgcattaagctcacatgaaaatcatgattctagagtttggaatgcaaaattaattgttttaccctcaagctgggaatatttttcaaaataaatactataatatagatatcaaattattacctccccatgttatgttgaaaatttttttattaaattgataaaactttatttccattatattcataatgttctgttatacataacattaaaatgttcattaaaatcaa

SEQ ID NO: 119936 - DNA, 721 bp, Homo sapiens
  Payload ID: 3516
  Gene Symbol: CLINT1
  Gene Name: clathrin interactor 1
  ENST ID: ENST00000522381
  CDS Start-End: 1-199
tttgcctatgtcaagatcacagaatacagatatggtccagaaatcagtcagcaaaaccttgccctctacttggtctgaccccagtgtaaacatcagcctagacaacttactacctggtatgcagccttccaaaccccagcagccatcactgaatacaatgattcagcaacagattcttctgtctgttttcgtctggtagatatgcagcagcctatgaatgtgatgactcaaagttttggagctgtgaacctcagttctccatcgaacatgcttcctgtccggccccaaactaatgctttgatagggggacccatgcctatgagcatgcccaatgtgatgactggcaccatgggaatggcccctcttggaaatactccgatgatgaaccagagcatgatgggcatgaacatgaacatagggatgtccgctgctgggatgggcttgacaggcacaatgggaatgggcatgcccaacatagccatgacttctggaactgtgcaacccaagcaagatgcctttgcaaatttcgccaattttagcaaataagagattgtaaaagaagcagattgaatgaagaatttttagctgtgcagataggtgatgttgggatggaaaatgctaatcaactaccctttcttttatcaagtaattaaaataaatctacataaagaaccaaaaaggctgttttataaaagtgaaatatccagtatttcagagggcc

SEQ ID NO: 119937 - DNA, 7760 bp, Homo sapiens
  Payload ID: 3517
  Gene Symbol: CLTC
  Gene Name: clathrin, heavy chain (Hc)
  Uniprot ID: Q00610
  ENST ID: ENST00000269122
  CDS Start-End: 275-5302
ggcggagttctgtcgccgggatccttccgctgggctcagccgtttccggagtctgcgctgcgcccggttccgccattgcggctctcctggcccctggagcctccgcccccgacccgagctctttcgtctgcctgccagtttcctgcgtccccggagaggatcctgctgagcccagcctcccccctccccttctcctcctctcccttggagagcccgggcagccactgccccgcagccccagtgacaggaggagaccataacccccgacagcgccatggcccagattctgccaattcgttttcaggagcatctccagctccagaacctgggtatcaacccagcaaacattggcttcagtaccctgactatggagtctgacaaattcatctgcattagagaaaaagtaggagagcaggcccaggtggtaatcattgatatgaatgacccaagtaatccaattcgaagaccaatttcagcagacagcgccatcatgaatccagctagcaaagtaattgcactgaaagctgggaaaactcttcagatttttaacattgaaatgaaaagtaaaatgaaggctcataccatgactgatgatgtcaccttttggaaatggatctctttgaatacggttgctcttgttacggataatgcagtttatcactggagtatggaaggagagtctcagccagtgaaaatgtttgatcgccattctagccttgcagggtgccagattatcaattaccgtacagatgcaaaacaaaagtggttacttctgactggtatatctgcacagcaaaatcgtgtggtgggagctatgcagctatattctgtagataggaaagtgtctcagcccattgaaggacatgcagctagctttgcacagtttaagatggaaggaaatgcagaagaatcaacgttattttgttttgcagttcggggccaagctggagggaagttacatattattgaagttggcacaccacctacagggaaccagccctttccaaagaaggcagtggatgtcttctttcctccagaagcacaaaatgattttcctgttgcaatgcagatcagtgaaaagcatgatgtggtgttcttgataaccaagtatggttatatccacctctatgatcttgagactggtacctgcatctacatgaatagaatcagtggagaaacaatttttgttactgcacctcatgaagccacagctggaataattggagtaaacagaaagggacaagttctgtcagtgtgtgtggaagaagaaaacataattccttacatcaccaatgttctacaaaatcctgatttggctctgagaatggctgtacgtaataacttagccggtgctgaagaactctttgcccggaaatttaatgctctttttgcccagggaaattactcggaggcagcaaaggtggctgctaatgcaccaaagggaattcttcgtactccagacactatccgtcggttccagagtgtcccagcccagccaggtcaaacttctcctctacttcagtactttggtatccttttggaccagggacagctcaacaaatacgaatccttagagctttgtaggcctgtacttcagcaagggcgaaaacagcttttggagaaatggttaaaagaagataagctggaatgttctgaagaactgggtgatcttgtgaaatctgtggaccctacattggcacttagtgtgtacctaagggctaacgtcccaaataaagtcattcagtgctttgcagaaacaggtcaagtccaaaagattgttttatatgctaaaaaagttggatacactccagattggatatttctgctgagaaatgtaatgcgaatcagtccagatcagggacagcagtttgcccaaatgttagttcaagatgaagagcctcttgctgacatcacacagattgtagatgtctttatggaatacaatctaattcagcagtgtactgcattcttgcttgatgctctgaagaataatcgcccatctgaaggtcctttacagacgcggttacttgagatgaaccttatgcatgcgcctcaagttgcagatgctattctaggcaatcagatgttcacacattatgaccgggctcatattgctcaactgtgtgaaaaggctggcctactgcagcgtgcattagaacatttcactgatttatatgatataaaacgtgcagtggttcacacccatcttcttaaccctgagtggttagtcaactactttggttccttatcagtagaagactccctagaatgtctcagagccatgctgtctgccaacatccgtcagaatctgcagatttgtgttcaggtggcttctaaatatcatgaacaactgtcaactcagtctctgattgaactttttgaatctttcaagagttttgaaggtctcttttattttctgggatccattgttaactttagccaggacccagatgtgcactttaaatatattcaggcagcttgcaagactgggcaaatcaaagaagtagaaagaatctgtagagaaagcaactgctacgatcctgagcgagtcaagaattttcttaaggaagcaaaactaacagatcagctaccacttatcattgtgtgtgatcgatttgactttgtccatgatttggtgctctatttatatagaaataatcttcaaaagtatatagagatatatgtacagaaggtgaatccaagtcgacttcctgtagttattggaggattacttgatgttgactgttctgaagatgtcataaaaaacttgattcttgttgtaagaggtcaattctctactgatgagcttgttgctgaggttgaaaaaagaaacagattgaaactgcttctgccttggctagaggccagaattcatgagggctgtgaggagcctgctactcacaatgccttagccaaaatctacatagacagtaataacaacccggagagatttcttcgtgaaaatccctactatgacagtcgcgttgttggaaagtattgtgagaagagagatccacatctggcctgtgttgcttatgaacgtggccaatgtgatctggaacttattaatgtttgcaatgagaattccctcttcaaaagtctttctcgctacctggtacgtcgaaaggatccagaattgtggggcagcgtgctgctggaaagcaatccttacaggagacccctaattgaccaggttgtacaaacagctttgtctgagactcaggaccctgaagaagtgtcagtaactgtaaaggctttcatgactgcagaccttcctaatgaactcattgaactgctggagaaaattgtccttgataactctgtattcagtgaacacaggaatctgcaaaacctccttatcctcactgcaattaaggctgaccgtacacgtgttatggagtatattaaccgcctggataattatgatgccccagatattgccaatatcgccatcagcaatgagctgtttgaagaagcatttgccattttccggaaatttgatgtcaatacttcagcagttcaggtcttaattgagcatattggaaacttggatcgggcatatgagtttgctgaacgttgcaatgaacctgcggtctggagtcaacttgcaaaagcccagttgcagaaaggaatggtgaaagaagccattgattcttatatcaaagcagatgatccttcctcctacatggaagttgttcaggctgccaatactagtggaaactgggaagaactggtgaagtacttgcagatggcccgtaagaaggctcgagagtcctatgtggagacagaactgatattcgcactggctaaaacaaaccgccttgcagagttagaagaatttatcaatggaccaaataatgctcatatccaacaagttggtgaccgttgttatgatgaaaaaatgtatgatgctgctaagttgttgtacaataatgtttccaattttggacgtttggcatctaccctggttcacctgggtgaatatcaggcagctgttgatggggctaggaaagctaacagtactcgaacatggaaagaggtctgcttcgcctgtgtagatgggaaagaattccgtcttgctcagatgtgtggacttcatattgttgtacatgcagatgaattagaagaacttatcaactactatcaggatcgtggctattttgaagagctgatcaccatgttggaagcagcactgggacttgagcgagctcacatgggaatgtttactgaattagctattctatactctaaatttaagcctcagaaaatgagggagcacctggagctgttctggtctagagtgaatattcccaaggtgctaagagctgcagaacaagctcatctttgggcagaactggtgtttttgtatgacaagtatgaagaatatgataatgccataattaccatgatgaatcatccaactgatgcctggaaagaagggcaattcaaagatatcattaccaaggttgccaatgtggaactatactacagagcaatacagttctacttagaattcaagcctctgttgttaaatgatttgctgatggtgctgtctccacggttggatcacactcgtgcagtcaattatttcagcaaggttaaacagctaccactggtgaaaccgtatttgcgttcagttcagaaccataacaacaaatctgtgaatgaatcattgaacaatctttttattacagaagaagattatcaggctctgcgaacatcaatagatgcttatgacaactttgacaatatctcgcttgctcagcgtttggaaaaacatgaactcattgagttcaggagaattgctgcttatctcttcaaaggcaacaatcgctggaaacagagtgtagagctgtgcaagaaagacagcctttacaaggatgcaatgcagtatgcttctgaatctaaagatactgaattggctgaagaactcctgcagtggtttttgcaggaagaaaaaagagagtgctttggagcttgtctgtttacctgttacgatcttttaaggccagatgtcgtcctagaaactgcatggaggcacaatatcatggattttgccatgccctatttcatccaggtcatgaaggagtacttgacaaaggtggataaattagatgcttcagaatcactgagaaaagaagaagaacaagctacagagacacaacccattgtttatggtcagccccagttgatgctgacagcaggacccagtgttgccgtccctccccaggcaccttttggttatggttataccgcaccaccgtatggacagccacagcctggctttgggtacagcatgtgagatgaagcgctgatcctgtagtcacctattttcgtactgaaacatcgtctttacccacttctcagtttataatgggggaaaacaggcaacgtgttcttgtaacctttatttcatgaaggacttctttttgtttctaactataaacttggatcacctatgttaaaaccttatttcacattccacatcattttagaatttattttcgaaggggaatagtttcaatgttttattcacttgggctttttttcttccccctctttctttaaagaactgctcaatattcaatctgttgtgaagaacctgatttgcactctgtagtgtttaaagaaacaaagaaactctaatattgaatctcttaaatttagtgtatgtaaacagcttacaaatacgtattgtctaaatgcatttaaatctgttttattcaaagaaaagctaaagcaaaaacactggcatatgaccatgcaagactgtcagtgccaacaaagacaacactaatcagcacatcgtacactggattgcagtgcttcccagattattgaaaaatgttacagacaacttgcctgatttttaaatgagcgtaaaaggccctctaacctatgcaggtttccccattatgcatatagaaaatgctagtatgttttgctcacttcatatgtaacaggtgcccttatgttgtgctgtatcctgtgctttttctgtgggaccattccattcaggagcaaagagcaccatgattccaatcttgtgtgtgtttactaacccttccctgaggtttgtgtatgttggatattgtggtgttttagatcactgagtgtacagaagagagaaattcaaacaaaatattgctgttcttcagttttgtttgtggaatttgaaattactcaaatttaaaataaattactggactgtggaaataacatagaattgaagttttaattaaataccactcaaacgaaaagaacagtagtttttgtagttttatattggatactgaggcattagggaggcatgaaaggaagaggaatgaggattgagacatgtgaagacattgtgcattatatcaatgtgcattcctgtagttcattaacaaggtacatgcaatagtctaaagaaccagagtcactactatagtggcttaacatttaatctgtctccaatattttaaccaagtgacaccgaggtttttatcgaagcatttcacttaaatgaacaaatcatggctgttatattaacttgaaataaaatatatttaaacatgtagttaacatgctctttctcatcatgaattataaaggtgcccaaattatgggtatcttgatttttttcaaaaattggttgtgtgaatccagctcttgcttatggctgagaatgttcctaaagttcatttcactatcccttaatcctcaatagctacacatacccccttgcctagttagtcttgcactgctttacaactctcttaggcaaattacctaacataagctccacagaagagttttttaaaacttaaaatccctgtcccaccaggtgtggtggctcatgcctgtaatcccagcactttgggaggctgaggcaggcggattgcttgaggccaggagttcgagacaagcctgaccaacatggtgactccatctctactaaaaataaaaaatcagccaggtgtgatggtggatgcctataagatcctagctgctactcaggaggcaggaggctgaggcatgagaatcacttgaacctgtgaggcaaaggttgtagtgagccaagatcacgtcactgcactccatcctgggtgacagaatgagactcttgtctcaaaaaacaaaaaaacctatttagtttcatccaggacattaagtgaaagtgtttaatgtgagtgcaggtcagtgaagaatacaatggtgcccctgctttgatttgtgggaggtgccatcagttttccccaccactgcttttgcaccctcagtgcaaatatcaacacagagaaaaaaaaaataataatagtattatgaaaacattgactctgtggagaccctgtgggttctgcagagtatactttgaaaactataagattatgagttctataaaataccaagtacagatgaactagaaaacaagcatatatccacaattaccagaattttcatagtattccttttagtagatatgccatgacagttacttagccaccccatgccatcctgttgggaatgccactacctttgaatttggagccatcagtctatctgaggcaaacctcagaaattacctgagccagaatcatgcacttagcactgagttcaactcagtcttaacgttgcattttgttgcatcacttttgcagccagtaaacattctgtttagaaatagttgctattgtggcatcattcacagttgcaatttttctcctgtgctgtcatatgcctgtgcgaagtgtattaaatgaatcaaatattagaaa

SEQ ID NO: 119938 - DNA, 5292 bp, Homo sapiens
  Payload ID: 3517
  Gene Symbol: CLTC
  Gene Name: clathrin, heavy chain (Hc)
  Uniprot ID: Q00610
  ENST ID: ENST00000393043
  CDS Start-End: 275-5194
ggcggagttctgtcgccgggatccttccgctgggctcagccgtttccggagtctgcgctgcgcccggttccgccattgcggctctcctggcccctggagcctccgcccccgacccgagctctttcgtctgcctgccagtttcctgcgtccccggagaggatcctgctgagcccagcctcccccctccccttctcctcctctcccttggagagcccgggcagccactgccccgcagccccagtgacaggaggagaccataacccccgacagcgccatggcccagattctgccaattcgttttcaggagcatctccagctccagaacctgggtatcaacccagcaaacattggcttcagtaccctgactatggagtctgacaaattcatctgcattagagaaaaagtaggagagcaggcccaggtggtaatcattgatatgaatgacccaagtaatccaattcgaagaccaatttcagcagacagcgccatcatgaatccagctagcaaagtaattgcactgaaagctgggaaaactcttcagatttttaacattgaaatgaaaagtaaaatgaaggctcataccatgactgatgatgtcaccttttggaaatggatctctttgaatacggttgctcttgttacggataatgcagtttatcactggagtatggaaggagagtctcagccagtgaaaatgtttgatcgccattctagccttgcagggtgccagattatcaattaccgtacagatgcaaaacaaaagtggttacttctgactggtatatctgcacagcaaaatcgtgtggtgggagctatgcagctatattctgtagataggaaagtgtctcagcccattgaaggacatgcagctagctttgcacagtttaagatggaaggaaatgcagaagaatcaacgttattttgttttgcagttcggggccaagctggagggaagttacatattattgaagttggcacaccacctacagggaaccagccctttccaaagaaggcagtggatgtcttctttcctccagaagcacaaaatgattttcctgttgcaatgcagatcagtgaaaagcatgatgtggtgttcttgataaccaagtatggttatatccacctctatgatcttgagactggtacctgcatctacatgaatagaatcagtggagaaacaatttttgttactgcacctcatgaagccacagctggaataattggagtaaacagaaagggacaagttctgtcagtgtgtgtggaagaagaaaacataattccttacatcaccaatgttctacaaaatcctgatttggctctgagaatggctgtacgtaataacttagccggtgctgaagaactctttgcccggaaatttaatgctctttttgcccagggaaattactcggaggcagcaaaggtggctgctaatgcaccaaagggaattcttcgtactccagacactatccgtcggttccagagtgtcccagcccagccaggtcaaacttctcctctacttcagtactttggtatccttttggaccagggacagctcaacaaatacgaatccttagagctttgtaggcctgtacttcagcaagggcgaaaacagcttttggagaaatggttaaaagaagataagctggaatgttctgaagaactgggtgatcttgtgaaatctgtggaccctacattggcacttagtgtgtacctaagggctaacgtcccaaataaagtcattcagtgctttgcagaaacaggtcaagtccaaaagattgttttatatgctaaaaaagttggatacactccagattggatatttctgctgagaaatgtaatgcgaatcagtccagatcagggacagcagtttgcccaaatgttagttcaagatgaagagcctcttgctgacatcacacagattgtagatgtctttatggaatacaatctaattcagcagtgtactgcattcttgcttgatgctctgaagaataatcgcccatctgaaggtcctttacagacgcggttacttgagatgaaccttatgcatgcgcctcaagttgcagatgctattctaggcaatcagatgttcacacattatgaccgggctcatattgctcaactgtgtgaaaaggctggcctactgcagcgtgcattagaacatttcactgatttatatgatataaaacgtgcagtggttcacacccatcttcttaaccctgagtggttagtcaactactttggttccttatcagtagaagactccctagaatgtctcagagccatgctgtctgccaacatccgtcagaatctgcagatttgtgttcaggtggcttctaaatatcatgaacaactgtcaactcagtctctgattgaactttttgaatctttcaagagttttgaaggtctcttttattttctgggatccattgttaactttagccaggacccagatgtgcactttaaatatattcaggcagcttgcaagactgggcaaatcaaagaagtagaaagaatctgtagagaaagcaactgctacgatcctgagcgagtcaagaattttcttaaggaagcaaaactaacagatcagctaccacttatcattgtgtgtgatcgatttgactttgtccatgatttggtgctctatttatatagaaataatcttcaaaagtatatagagatatatgtacagaaggtgaatccaagtcgacttcctgtagttattggaggattacttgatgttgactgttctgaagatgtcataaaaaacttgattcttgttgtaagaggtcaattctctactgatgagcttgttgctgaggttgaaaaaagaaacagattgaaactgcttctgccttggctagaggccagaattcatgagggctgtgaggagcctgctactcacaatgccttagccaaaatctacatagacagtaataacaacccggagagatttcttcgtgaaaatccctactatgacagtcgcgttgttggaaagtattgtgagaagagagatccacatctggcctgtgttgcttatgaacgtggccaatgtgatctggaacttattaatgtttgcaatgagaattccctcttcaaaagtctttctcgctacctggtacgtcgaaaggatccagaattgtggggcagcgtgctgctggaaagcaatccttacaggagacccctaattgaccaggttgtacaaacagctttgtctgagactcaggaccctgaagaagtgtcagtaactgtaaaggctttcatgactgcagaccttcctaatgaactcattgaactgctggagaaaattgtccttgataactctgtattcagtgaacacaggaatctgcaaaacctccttatcctcactgcaattaaggctgaccgtacacgtgttatggagtatattaaccgcctggataattatgatgccccagatattgccaatatcgccatcagcaatgagctgtttgaagaagcatttgccattttccggaaatttgatgtcaatacttcagcagttcaggtcttaattgagcatattggaaacttggatcgggcatatgagtttgctgaacgttgcaatgaacctgcggtctggagtcaacttgcaaaagcccagttgcagaaaggaatggtgaaagaagccattgattcttatatcaaagcagatgatccttcctcctacatggaagttgttcaggctgccaatactagtggaaactgggaagaactggtgaagtacttgcagatggcccgtaagaaggctcgagagtcctatgtggagacagaactgatattcgcactggctaaaacaaaccgccttgcagagttagaagaatttatcaatggaccaaataatgctcatatccaacaagttggtgaccgttgttatgatgaaaaaatgtatgatgctgctaagttgttgtacaataatgtttccaattttggacgtttggcatctaccctggttcacctgggtgaatatcaggcagctgttgatggggctaggaaagctaacagtactcgaacatggaaagaggtctgcttcgcctgtgtagatgggaaagaattccgtcttgctcagatgtgtggacttcatattgttgtacatgcagatgaattagaagaacttatcaactactatcaggatcgtggctattttgaagagctgatcaccatgttggaagcagcactgggacttgagcgagctcacatgggaatgtttactgaattagctattctatactctaaatttaagcctcagaaaatgagggagcacctggagctgttctggtctagagtgaatattcccaaggtgctaagagctgcagaacaagctcatctttgggcagaactggtgtttttgtatgacaagtatgaagaatatgataatgccataattaccatgatgaatcatccaactgatgcctggaaagaagggcaattcaaagatatcattaccaaggttgccaatgtggaactatactacagagcaatacagttctacttagaattcaagcctctgttgttaaatgatttgctgatggtgctgtctccacggttggatcacactcgtgcagtcaattatttcagcaaggttaaacagctaccactggtgaaaccgtatttgcgttcagttcagaaccataacaacaaatctgtgaatgaatcattgaacaatctttttattacagaagaagattatcaggctctgcgaacatcaatagatgcttatgacaactttgacaatatctcgcttgctcagcgtttggaaaaacatgaactcattgagttcaggagaattgctgcttatctcttcaaaggcaacaatcgctggaaacagagtgtagagctgtgcaagaaagacagcctttacaaggatgcaatgcagtatgcttctgaatctaaagatactgaattggctgaagaactcctgcagtggtttttgcaggaagaaaaaagagagtgctttggagcttgtctgtttacctgttacgatcttttaaggccagatgtcgtcctagaaactgcatggaggcacaatatcatggattttgccatgccctatttcatccaggtcatgaaggagtacttgacaaaggtggataaattagatgcttcagaatcactgagaaaagaagaagaacaagctacagagacacaacccattgtttatggtaatctctctctgtaacctcaaaaaattcattagacaaatatttaattacttagagactgtgcctcaaaatagaatacaacaagcttctaaagtgcaaaaggctttctaagaaa

SEQ ID NO: 119939 - DNA, 479 bp, Homo sapiens
  Payload ID: 3517
  Gene Symbol: CLTC
  Gene Name: clathrin, heavy chain (Hc)
  ENST ID: ENST00000475458
  CDS Start-End: 1-395
tggaaaaacatgaactcattgagttcaggagaattgctgcttatctcttcaaaggcaacaatcgctggaaacagagtgtagagctgtgcaagaaagacagcctttacaaggatgcaatgcagtatgcttctgaatctaaagatactgaattggctgaagaactcctgcagtggtttttgcaggaagaaaaaagagagtgctttggagcttgtctgtttacctgttacgatcttttaaggccagatgtcgtcctagaaactgcatggaggcacaatatcatggattttgccatgccctatttcatccaggtcatgaaggagtacttgacaaaggttgatgcaataaaggaaaaggtgaaagttgattctttaacatctttaagtctggaggactaagtctaaggaatttgcatgatgtttttccttcctcttctacactgctgctgctgctttttccccccaataaattttcactaaagc

SEQ ID NO: 119940 - DNA, 2301 bp, Homo sapiens
  Payload ID: 3517
  Gene Symbol: CLTC
  Gene Name: clathrin, heavy chain (Hc)
  ENST ID: ENST00000579456
  CDS Start-End: 201-2039
attgcggctctcctggcccctggagcctccgcccccgacccgagctctttcgtctgcctgccagtttcctgcgtccccggagaggatcctgctgagcccagcctcccccctccccttctcctcctctcccttggagagcccgggcagccactgccccgcagccccagtgacaggaggagaccataacccccgacagcgccatggcccagattctgccaattcgttttcaggagcatctccagctccagaacctgggtatcaacccagcaaacattggcttcagtaccctgactatggagtctgacaaattcatctgcattagagaaaaagtaggagagcaggcccaggtggtaatcattgatatgaatgacccaagtaatccaattcgaagaccaatttcagcagacagcgccatcatgaatccagctagcaaagtaattgcactgaaagctgggaaaactcttcagatttttaacattgaaatgaaaagtaaaatgaaggctcgagagtcctatgtggagacagaactgatattcgcactggctaaaacaaaccgccttgcagagttagaagaatttatcaatggaccaaataatgctcatatccaacaagttggtgaccgttgttatgatgaaaaaatgtatgatgctgctaagttgttgtacaataatgtttccaattttggacgtttggcatctaccctggttcacctgggtgaatatcaggcagctgttgatggggctaggaaagctaacagtactcgaacatggaaagaggtctgcttcgcctgtgtagatgggaaagaattccgtcttgctcagatgtgtggacttcatattgttgtacatgcagatgaattagaagaacttatcaactactatcaggatcgtggctattttgaagagctgatcaccatgttggaagcagcactgggacttgagcgagctcacatgggaatgtttactgaattagctattctatactctaaatttaagcctcagaaaatgagggagcacctggagctgttctggtctagagtgaatattcccaaggtgctaagagctgcagaacaagctcatctttgggcagaactggtgtttttgtatgacaagtatgaagaatatgataatgccataattaccatgatgaatcatccaactgatgcctggaaagaagggcaattcaaagatatcattaccaaggttgccaatgtggaactatactacagagcaatacagttctacttagaattcaagcctctgttgttaaatgatttgctgatggtgctgtctccacggttggatcacactcgtgcagtcaattatttcagcaaggttaaacagctaccactggtgaaaccgtatttgcgttcagttcagaaccataacaacaaatctgtgaatgaatcattgaacaatctttttattacagaagaagattatcaggctctgcgaacatcaatagatgcttatgacaactttgacaatatctcgcttgctcagcgtttggaaaaacatgaactcattgagttcaggagaattgctgcttatctcttcaaaggcaacaatcgctggaaacagagtgtagagctgtgcaagaaagacagcctttacaaggatgcaatgcagtatgcttctgaatctaaagatactgaattggctgaagaactcctgcagtggtttttgcaggaagaaaaaagagagtgctttggagcttgtctgtttacctgttacgatcttttaaggccagatgtcgtcctagaaactgcatggaggcacaatatcatggattttgccatgccctatttcatccaggtcatgaaggagtacttgacaaaggtggataaattagatgcttcagaatcactgagaaaagaagaagaacaagctacagagacacaacccattgtttatggtcagccccagttgatgctgacagcaggacccagtgttgccgtccctccccaggcaccttttggttatggttataccgcaccaccgtatggacagccacagcctggctttgggtacagcatgtgagatgaagcgctgatcctgtagtcacctattttcgtactgaaacatcgtctttacccacttctcagtttataatgggggaaaacaggcaacgtgttcttgtaacctttatttcatgaaggacttctttttgtttctaactataaacttggatcacctatgttaaaaccttatttcacattccacatcattttagaatttattttcgaaggggaatagtttcaatgttttattcacttgggctttttttcttccccctctttct

SEQ ID NO: 119941 - DNA, 575 bp, Homo sapiens
  Payload ID: 3517
  Gene Symbol: CLTC
  Gene Name: clathrin, heavy chain (Hc)
  ENST ID: ENST00000580081
  CDS Start-End: 209-575
gttccgccattgcggctctcctggcccctggagcctccgcccccgacccgagctctttcgtctgcctgccagtttcctgcgtccccggagaggatcctgctgagcccagcctcccccctccccttctcctcctctcccttggagagcccgggcagccactgccccgcagccccagtgacaggaggagaccataacccccgacagcgccatggcccagattctgccaattcgttttcaggagcatctccagctccagaacctgggtatcaacccagcaaacattggcttcagtaccctgactatggagtctgacaaattcatctgcattagagaaaaagtaggagagcaggcccaggtggtaatcattgatatgaatgacccaagtaatccaattcgaagaccaatttcagcagacagcgccatcatgaatccagctagcaaagtaattgcactgaaaggtataaaagaatctgggaaaactcttcagatttttaacattgaaatgaaaagtaaaatgaaggctcataccatgactgatgatgtcaccttttggaaatggatctctttgaatacgg

SEQ ID NO: 119942 - DNA, 760 bp, Homo sapiens
  Payload ID: 3517
  Gene Symbol: CLTC
  Gene Name: clathrin, heavy chain (Hc)
  ENST ID: ENST00000483176
  CDS Start-End: 1-73
aacaatttttgttactgcacctcatgaagccacagctggaataattggagtaaacagaaagggacaaaactgagtactttagaagacactggagccttttctgtttcctgtagcagatcttactaaggactggttgctagaaatctgctagaacagtctttaagtatgataacgataaaactgtggattcagtatgtggggaaacctaaggttctgtcagtgtgtgtggaagaagaaaacataattccttacatcaccaatgttctacaaaatcctgatttggctctgagaatggctgtacgtaataacttagccggtgctgaagaactctttgcccggaaatttaatgctctttttgcccagggaaattactcggaggcagcaaaggtggctgctaatgcaccaaagggaattcttcgtactccagacactatccgtcggttccagagtgtcccagcccagccaggtcaaacttctcctctacttcagtactttggtatccttttggaccagggacagctcaacaaatacgaatccttagagctttgtaggcctgtacttcagcaagggcgaaaacagcttttggagaaatggttaaaagaagataagctggaatgttctgaagaactgggtgatcttgtgaaatctgtggaccctacattggcacttagtgtgtacctaagggctaacgtcccaaataaagtcattcagtgctttgcagaaacaggtcaagtccaaaagattgttttatatgctaaaa

SEQ ID NO: 119943 - DNA, 715 bp, Homo sapiens
  Payload ID: 3517
  Gene Symbol: CLTC
  Gene Name: clathrin, heavy chain (Hc)
  ENST ID: ENST00000584313
  CDS Start-End: 190-483
cctggcccctggagcctccgcccccgacccgagctctttcgtctgcctgccagtttcctgcgtccccggagaggatcctgctgagcccagcctcccccctccccttctcctcctctcccttggagagcccgggcagccactgccccgcagccccagtgacaggaggagaccataacccccgacagcgccatggcccagattctgccaattcgttttcaggagcatctccagctccagaacctgggtatcaacccagcaaacattggcttcagtaccctgactatggagtctgacaaattcatctgcattagagaaaaagtaggagagcaggcccaggtggtaatcattgatatgaatgacccaagtaatccaattcgaagaccaatttcagcagacagcgccatcatgaatccagctagcaaagtaattgcactgaaagcaaaatcgtgtggtgggagctatgcagctatattctgtagataggaaagtgtctcagcccattgaaggacatgcagctagctttgcacagtttaagatggaaggaaatgcagaagaatcaacgttattttgttttgcagttcggggccaagctggagggaagttacatattattgaagttggcacaccacctacagggaaccagccctttccaaagaaggcagtggatgtcttctttcctccagaagcacaaaatgattttcctgttgcaatgcag

SEQ ID NO: 119944 - DNA, 665 bp, Homo sapiens
  Payload ID: 3517
  Gene Symbol: CLTC
  Gene Name: clathrin, heavy chain (Hc)
  ENST ID: ENST00000472651
  CDS Start-End: 1-665
tgcgttcagttcagaaccataacaacaaatctgtgaatgaatcattgaacaatctttttattacagaagaagattatcaggctctgcgaacatcaatagatgcttatgacaactttgacaatatctcgcttgctcagcgtttggaaaaacatgaactcattgagttcaggagaattgctgcttatctcttcaaaggcaacaatcgctggaaacagagtgtagagctgtgcaagaaagacagcctttacaaggatgcaatgcagtatgcttctgaatctaaagatactgaattggctgaagaactcctgcagtggtttttgcaggaagaaaaaagagagtgctttggagcttgtctgtttacctgttacgatcttttaaggccagatgtcgtcctagaaactgcatggaggcacaatatcatggattttgccatgccctatttcatccaggtcatgaaggagtacttgacaaaggttgatgcaataaaggaaaaggtggataaattagatgcttcagaatcactgagaaaagaagaagaacaagctacagagacacaacccattgtttatggtcagccccagttgatgctgacagcaggacccagtgttgccgtccctccccaggcaccttttggttatggttataccgcaccaccgtatggacag

SEQ ID NO: 119945 - DNA, 8587 bp, Homo sapiens
  Payload ID: 3517
  Gene Symbol: CLTC
  Gene Name: clathrin, heavy chain (Hc)
  ENST ID: ENST00000621829
  CDS Start-End: 444-5483
agactggcgaaagtgatgagtctaaaaaagtagtccctccggttcctctgtttccccccatgtggcgtcaggaagcgaggcaccgggcgcactgcgccccgaattcctgcgcccgccgcgcgcggcgctccgtggaggggtacataaggcggagggggtgaggcgactgggcggagttctgtcgccgggatccttccgctgggctcagccgtttccggagtctgcgctgcgcccggttccgccattgcggctctcctggcccctggagcctccgcccccgacccgagctctttcgtctgcctgccagtttcctgcgtccccggagaggatcctgctgagcccagcctcccccctccccttctcctcctctcccttggagagcccgggcagccactgccccgcagccccagtgacaggaggagaccataacccccgacagcgccatggcccagattctgccaattcgttttcaggagcatctccagctccagaacctgggtatcaacccagcaaacattggcttcagtaccctgactatggagtctgacaaattcatctgcattagagaaaaagtaggagagcaggcccaggtggtaatcattgatatgaatgacccaagtaatccaattcgaagaccaatttcagcagacagcgccatcatgaatccagctagcaaagtaattgcactgaaaggtataaaagaatctgggaaaactcttcagatttttaacattgaaatgaaaagtaaaatgaaggctcataccatgactgatgatgtcaccttttggaaatggatctctttgaatacggttgctcttgttacggataatgcagtttatcactggagtatggaaggagagtctcagccagtgaaaatgtttgatcgccattctagccttgcagggtgccagattatcaattaccgtacagatgcaaaacaaaagtggttacttctgactggtatatctgcacagcaaaatcgtgtggtgggagctatgcagctatattctgtagataggaaagtgtctcagcccattgaaggacatgcagctagctttgcacagtttaagatggaaggaaatgcagaagaatcaacgttattttgttttgcagttcggggccaagctggagggaagttacatattattgaagttggcacaccacctacagggaaccagccctttccaaagaaggcagtggatgtcttctttcctccagaagcacaaaatgattttcctgttgcaatgcagatcagtgaaaagcatgatgtggtgttcttgataaccaagtatggttatatccacctctatgatcttgagactggtacctgcatctacatgaatagaatcagtggagaaacaatttttgttactgcacctcatgaagccacagctggaataattggagtaaacagaaagggacaagttctgtcagtgtgtgtggaagaagaaaacataattccttacatcaccaatgttctacaaaatcctgatttggctctgagaatggctgtacgtaataacttagccggtgctgaagaactctttgcccggaaatttaatgctctttttgcccagggaaattactcggaggcagcaaaggtggctgctaatgcaccaaagggaattcttcgtactccagacactatccgtcggttccagagtgtcccagcccagccaggtcaaacttctcctctacttcagtactttggtatccttttggaccagggacagctcaacaaatacgaatccttagagctttgtaggcctgtacttcagcaagggcgaaaacagcttttggagaaatggttaaaagaagataagctggaatgttctgaagaactgggtgatcttgtgaaatctgtggaccctacattggcacttagtgtgtacctaagggctaacgtcccaaataaagtcattcagtgctttgcagaaacaggtcaagtccaaaagattgttttatatgctaaaaaagttggatacactccagattggatatttctgctgagaaatgtaatgcgaatcagtccagatcagggacagcagtttgcccaaatgttagttcaagatgaagagcctcttgctgacatcacacagattgtagatgtctttatggaatacaatctaattcagcagtgtactgcattcttgcttgatgctctgaagaataatcgcccatctgaaggtcctttacagacgcggttacttgagatgaaccttatgcatgcgcctcaagttgcagatgctattctaggcaatcagatgttcacacattatgaccgggctcatattgctcaactgtgtgaaaaggctggcctactgcagcgtgcattagaacatttcactgatttatatgatataaaacgtgcagtggttcacacccatcttcttaaccctgagtggttagtcaactactttggttccttatcagtagaagactccctagaatgtctcagagccatgctgtctgccaacatccgtcagaatctgcagatttgtgttcaggtggcttctaaatatcatgaacaactgtcaactcagtctctgattgaactttttgaatctttcaagagttttgaaggtctcttttattttctgggatccattgttaactttagccaggacccagatgtgcactttaaatatattcaggcagcttgcaagactgggcaaatcaaagaagtagaaagaatctgtagagaaagcaactgctacgatcctgagcgagtcaagaattttcttaaggaagcaaaactaacagatcagctaccacttatcattgtgtgtgatcgatttgactttgtccatgatttggtgctctatttatatagaaataatcttcaaaagtatatagagatatatgtacagaaggtgaatccaagtcgacttcctgtagttattggaggattacttgatgttgactgttctgaagatgtcataaaaaacttgattcttgttgtaagaggtcaattctctactgatgagcttgttgctgaggttgaaaaaagaaacagattgaaactgcttctgccttggctagaggccagaattcatgagggctgtgaggagcctgctactcacaatgccttagccaaaatctacatagacagtaataacaacccggagagatttcttcgtgaaaatccctactatgacagtcgcgttgttggaaagtattgtgagaagagagatccacatctggcctgtgttgcttatgaacgtggccaatgtgatctggaacttattaatgtttgcaatgagaattccctcttcaaaagtctttctcgctacctggtacgtcgaaaggatccagaattgtggggcagcgtgctgctggaaagcaatccttacaggagacccctaattgaccaggttgtacaaacagctttgtctgagactcaggaccctgaagaagtgtcagtaactgtaaaggctttcatgactgcagaccttcctaatgaactcattgaactgctggagaaaattgtccttgataactctgtattcagtgaacacaggaatctgcaaaacctccttatcctcactgcaattaaggctgaccgtacacgtgttatggagtatattaaccgcctggataattatgatgccccagatattgccaatatcgccatcagcaatgagctgtttgaagaagcatttgccattttccggaaatttgatgtcaatacttcagcagttcaggtcttaattgagcatattggaaacttggatcgggcatatgagtttgctgaacgttgcaatgaacctgcggtctggagtcaacttgcaaaagcccagttgcagaaaggaatggtgaaagaagccattgattcttatatcaaagcagatgatccttcctcctacatggaagttgttcaggctgccaatactagtggaaactgggaagaactggtgaagtacttgcagatggcccgtaagaaggctcgagagtcctatgtggagacagaactgatattcgcactggctaaaacaaaccgccttgcagagttagaagaatttatcaatggaccaaataatgctcatatccaacaagttggtgaccgttgttatgatgaaaaaatgtatgatgctgctaagttgttgtacaataatgtttccaattttggacgtttggcatctaccctggttcacctgggtgaatatcaggcagctgttgatggggctaggaaagctaacagtactcgaacatggaaagaggtctgcttcgcctgtgtagatgggaaagaattccgtcttgctcagatgtgtggacttcatattgttgtacatgcagatgaattagaagaacttatcaactactatcaggatcgtggctattttgaagagctgatcaccatgttggaagcagcactgggacttgagcgagctcacatgggaatgtttactgaattagctattctatactctaaatttaagcctcagaaaatgagggagcacctggagctgttctggtctagagtgaatattcccaaggtgctaagagctgcagaacaagctcatctttgggcagaactggtgtttttgtatgacaagtatgaagaatatgataatgccataattaccatgatgaatcatccaactgatgcctggaaagaagggcaattcaaagatatcattaccaaggttgccaatgtggaactatactacagagcaatacagttctacttagaattcaagcctctgttgttaaatgatttgctgatggtgctgtctccacggttggatcacactcgtgcagtcaattatttcagcaaggttaaacagctaccactggtgaaaccgtatttgcgttcagttcagaaccataacaacaaatctgtgaatgaatcattgaacaatctttttattacagaagaagattatcaggctctgcgaacatcaatagatgcttatgacaactttgacaatatctcgcttgctcagcgtttggaaaaacatgaactcattgagttcaggagaattgctgcttatctcttcaaaggcaacaatcgctggaaacagagtgtagagctgtgcaagaaagacagcctttacaaggatgcaatgcagtatgcttctgaatctaaagatactgaattggctgaagaactcctgcagtggtttttgcaggaagaaaaaagagagtgctttggagcttgtctgtttacctgttacgatcttttaaggccagatgtcgtcctagaaactgcatggaggcacaatatcatggattttgccatgccctatttcatccaggtcatgaaggagtacttgacaaaggtggataaattagatgcttcagaatcactgagaaaagaagaagaacaagctacagagacacaacccattgtttatggtcagccccagttgatgctgacagcaggacccagtgttgccgtccctccccaggcaccttttggttatggttataccgcaccaccgtatggacagccacagcctggctttgggtacagcatgtgagatgaagcgctgatcctgtagtcacctattttcgtactgaaacatcgtctttacccacttctcagtttataatgggggaaaacaggcaacgtgttcttgtaacctttatttcatgaaggacttctttttgtttctaactataaacttggatcacctatgttaaaaccttatttcacattccacatcattttagaatttattttcgaaggggaatagtttcaatgttttattcacttgggctttttttcttccccctctttctttaaagaactgctcaatattcaatctgttgtgaagaacctgatttgcactctgtagtgtttaaagaaacaaagaaactctaatattgaatctcttaaatttagtgtatgtaaacagcttacaaatacgtattgtctaaatgcatttaaatctgttttattcaaagaaaagctaaagcaaaaacactggcatatgaccatgcaagactgtcagtgccaacaaagacaacactaatcagcacatcgtacactggattgcagtgcttcccagattattgaaaaatgttacagacaacttgcctgatttttaaatgagcgtaaaaggccctctaacctatgcaggtttccccattatgcatatagaaaatgctagtatgttttgctcacttcatatgtaacaggtgcccttatgttgtgctgtatcctgtgctttttctgtgggaccattccattcaggagcaaagagcaccatgattccaatcttgtgtgtgtttactaacccttccctgaggtttgtgtatgttggatattgtggtgttttagatcactgagtgtacagaagagagaaattcaaacaaaatattgctgttcttcagttttgtttgtggaatttgaaattactcaaatttaaaataaattactggactgtggaaataacatagaattgaagttttaattaaataccactcaaacgaaaagaacagtagtttttgtagttttatattggatactgaggcattagggaggcatgaaaggaagaggaatgaggattgagacatgtgaagacattgtgcattatatcaatgtgcattcctgtagttcattaacaaggtacatgcaatagtctaaagaaccagagtcactactatagtggcttaacatttaatctgtctccaatattttaaccaagtgacaccgaggtttttatcgaagcatttcacttaaatgaacaaatcatggctgttatattaacttgaaataaaatatatttaaacatgtagttaacatgctctttctcatcatgaattataaaggtgcccaaattatgggtatcttgatttttttcaaaaattggttgtgtgaatccagctcttgcttatggctgagaatgttcctaaagttcatttcactatcccttaatcctcaatagctacacatacccccttgcctagttagtcttgcactgctttacaactctcttaggcaaattacctaacataagctccacagaagagttttttaaaacttaaaatccctgtcccaccaggtgtggtggctcatgcctgtaatcccagcactttgggaggctgaggcaggcggattgcttgaggccaggagttcgagacaagcctgaccaacatggtgactccatctctactaaaaataaaaaatcagccaggtgtgatggtggatgcctataagatcctagctgctactcaggaggcaggaggctgaggcatgagaatcacttgaacctgtgaggcaaaggttgtagtgagccaagatcacgtcactgcactccatcctgggtgacagaatgagactcttgtctcaaaaaacaaaaaaacctatttagtttcatccaggacattaagtgaaagtgtttaatgtgagtgcaggtcagtgaagaatacaatggtgcccctgctttgatttgtgggaggtgccatcagttttccccaccactgcttttgcaccctcagtgcaaatatcaacacagagaaaaaaaaaataataatagtattatgaaaacattgactctgtggagaccctgtgggttctgcagagtatactttgaaaactataagattatgagttctataaaataccaagtacagatgaactagaaaacaagcatatatccacaattaccagaattttcatagtattccttttagtagatatgccatgacagttacttagccaccccatgccatcctgttgggaatgccactacctttgaatttggagccatcagtctatctgaggcaaacctcagaaattacctgagccagaatcatgcacttagcactgagttcaactcagtcttaacgttgcattttgttgcatcacttttgcagccagtaaacattctgtttagaaatagttgctattgtggcatcattcacagttgcaatttttctcctgtgctgtcatatgcctgtgcgaagtgtattaaatgaatcaaatattagaaatttcaaggctgtctttagtgttctgcccacaatactccaccaatgaccttagaccttgagatggtgctataacgctgcttatattgcagttaaccatagagaggtggagccacttaaaatgggcctattaccaaaattctccctggcatcattacagttcttggggatacactgattttagaaattactgtcagtatcctcctaaaagaaggcttaaatagtttctaacaagatgactatcaggaagctatgtggcttggggagttgggaccctctgcctcatattctgggtaactggtataacatagtaattattaggattgtatcaagtgtatctaaagatcaaaagggaaaaaaggcacccttaattgtcaaagttagttctaggaaaaaatactagcagggatgacaaactacgttcactttacagttaccataaattcttacttgggcccacccatttccatctgttaaggtccataaggttactcaagtttcagtggcttcattgttacaagaaaggggggaagtgagaaactttaataggctgtgatttagaaccactgctgattaacctttggccagtatgggtcagggaaggtgaacatgaaacactgcacagtaggttgtatcaatgctataaaac

SEQ ID NO: 119946 - DNA, 574 bp, Homo sapiens
  Payload ID: 3518
  Gene Symbol: CLTCL1
  Gene Name: clathrin, heavy chain-like 1
  ENST ID: ENST00000458188
  CDS Start-End: 1-132
ctctgtgagaaggcaggcctcctgcagcaagcactggagcactacaccgacctctatgacatcaagagggctgtggtccacactcacctcctcaatcccgaggcctcttctacttcctgggctcaatcgtgaacttcagccaagacccagatgtgcatctgaaatacattcaggctgcctgtaagacagggcagatcaaggaggtggagaggatatgccgagagagcagctgctacaacccagagcgtgtgaagaacttcctgaaggaggccaagctcacagaccagcttcccctcatcatcgtgtgtgatcgttttggctttgtccatgaccttgtcctatatttataccgcaacaacctgcagaggtacattgagatctacgtgcagaaggtcaaccctagccggaccccagctgtgattggagggctgcttgatgtggattgttctgaggaagtgattaaacacttaatcatggcagtgagaggacagttctctactgatgagttggtggctgaagtagaaaaaagaaataggctcaagctgctgcttccctggctggagtcccagattca

SEQ ID NO: 119947 - DNA, 5513 bp, Homo sapiens
  Payload ID: 3518
  Gene Symbol: CLTCL1
  Gene Name: clathrin, heavy chain-like 1
  Uniprot ID: P53675
  ENST ID: ENST00000427926
  CDS Start-End: 74-4996
cggtcagcccgcgcgaggggtcggcgttcattcctgccgctgccgccgccgccgccgaggtcccgcaccagccatggcgcagatcctccctgttcgctttcaggagcacttccagctccaaaaccttggaattaatccagctaacattggattcagcacactgaccatggaatctgacaagttcatatgtatccgagagaaagttggtgagcaggcacaggtcacgatcattgacatgagtgacccaatggctccgatccgacggcctatctctgcagagagtgccatcatgaatccagcctctaaggtgatagctctgaaagctgggaagacacttcagatctttaatattgagatgaagagtaaaatgaaggctcatactatggcagaagaagtgattttctggaaatgggtttctgtgaacactgttgccttggtgaccgagaccgcggtctaccactggagcatggaaggtgactcccagcccatgaagatgtttgatagacataccagtctggtgggctgccaggtgattcactaccggactgatgagtaccagaagtggctgctgctcgtaggcatctcggctcagcaaaaccgtgtggttggagcaatgcagctctactctgtggataggaaggtttcacaacccatagaaggccatgctgcggcttttgcagagttcaagatggaggggaatgccaagcctgccacccttttctgctttgctgtacgtaatcccacaggaggcaagttgcacatcattgaagttggacagcctgcagcgggaaaccaaccttttgtaaagaaagcagtagatgtgttttttcctccagaggcacagaatgattttccagtggctatgcagattggagctaaacatggtgttatttacttgatcacaaagtatggctatcttcatctgtacgacctagagtctggcgtgtgcatctgcatgaaccgtattagtgctgacacaatatttgtcactgctccacacaaaccaacctctggaattattggtgtcaacaaaaagggacaggtactgtcagtttgtgttgaggaagataacattgtgaattatgcaaccaacgtgcttcagaatccagaccttggtctgcgtttggccgttcgtagtaacctggctggggcagagaagttgtttgtgagaaaattcaataccctctttgcacagggcagctatgctgaagccgccaaagttgcagcgtctgcaccaaagggaatcctgcgtaccagagagacggtccagaaattccagagtatacccgctcagtctggccaggcttctccattgctgcagtacttcggaatcctgctcgaccagggtcagctcaataaacttgaatccttagaactttgccatctggttcttcagcaggggcgtaagcaactcctagagaagtggctgaaagaagataagctggagtgctcagaggagctcggagacttggtcaaaaccactgaccccatgctcgctctgagtgtgtaccttcgggcaaatgtgccaagcaaagtgatccagtgttttgcagaaacaggccaattccagaaaattgtgctctatgccaaaaaggttgggtacaccccagactggatctttctgctgaggggtgtaatgaagatcagtccggaacagggcctgcagttttctcgaatgctagtgcaggacgaggagccgctggccaacattagccagattgtggacattttcatggaaaacagtttaattcagcagtgtacttccttcttattggatgccttgaagaataatcgcccagctgagggactcctgcagacatggctgttggagatgaaccttgttcatgcaccccaggttgcagatgccatccttggaaataaaatgtttactcattacgaccgggcccacattgcccagctctgtgagaaggcaggcctcctgcagcaagcactggagcactacaccgacctctatgacatcaagagggctgtggtccacactcacctcctcaatcccgagtggcttgtcaatttctttggctccttatcggtggaggattctgtggagtgtctgcatgccatgctgtctgctaacatcagacagaaccttcagctgtgtgtgcaggtggcctctaagtaccacgagcagctgggcacgcaggccctggtggagctctttgaatccttcaagagttacaaaggcctcttctacttcctgggctcaatcgtgaacttcagccaagacccagatgtgcatctgaaatacattcaggctgcctgtaagacagggcagatcaaggaggtggagaggatatgccgagagagcagctgctacaacccagagcgtgtgaagaacttcctgaaggaggccaagctcacagaccagcttcccctcatcatcgtgtgtgatcgttttggctttgtccatgaccttgtcctatatttataccgcaacaacctgcagaggtacattgagatctacgtgcagaaggtcaaccctagccggaccccagctgtgattggagggctgcttgatgtggattgttctgaggaagtgattaaacacttaatcatggcagtgagaggacagttctctactgatgagttggtggctgaagtagaaaaaagaaataggctcaagctgctgcttccctggctggagtcccagattcaggaaggctgtgaggagcctgccactcacaatgcactggctaaaatctacatcgacagcaacaacagccccgagtgcttcctgagagagaatgcctactatgacagcagcgtggtgggccgctactgtgagaagcgagacccccatctggcctgtgttgcctatgagcgggggcagtgtgaccttgagctcatcaaggtgtgcaatgagaattctctgttcaaaagcgaggcccgctacctggtatgcagaaaggatccggagctctgggctcacgtccttgaggagaccaacccatccaggagacagctaattgaccaggtggtacagacagcattgtcagaaacacgggatcctgaagagatttcggtcactgtcaaagcctttatgacagccgacctgcctaatgaactgattgaactgctggagaagatagttctggataactctgtcttcagcgagcacaggaatctacagaatctgttgatcctgactgccatcaaggcagaccgcacacgggtcatggagtacatcagccgcctggacaactatgacgcactggacatcgcgagcatcgctgtcagcagcgcactgtatgaggaggccttcaccgttttccacaagtttgatatgaatgcctcagcaatccaggtcctgatcgagcacattggaaacctggaccgggcatatgagtttgcggagagatgcaatgagcctgctgtgtggagtcagctggcccaagcccagctccagaaagatttggtgaaggaagccatcaactcctatatcagaggggacgacccttcctcttacctggaagttgttcagtcagccagcaggagcaacaactgggaggatctagttaaatttctgcagatggccaggaaaaagggccgtgagtcctatatagagactgaacttatttttgccttggctaaaaccagccgtgtttctgagctagaagattttattaatggacccaacaatgcccacatccagcaggttggagaccgctgttacgaggagggaatgtacgaggctgccaagctgctctatagcaatgtttctaactttgcccgcctggcttccaccttggttcacctcggtgagtatcaggcagcagtggacaacagccgcaaggccagcagcacccggacgtggaaggaggtgtgctttgcctgcatggatggacaagagttccgcttcgcacagctgtgtggtcttcacatcgtcattcatgcagatgagctggaggagctgatgtgctattaccaggatcgtggctactttgaggagctgatcttgctgttggaagcggccctgggcctggagcgggcccacatgggcatgttcactgagctggccatcctctactccaaattcaagccacagaagatgctggagcatctggagcttttctggtcccgtgtcaacatcccaaaggtgctgagggctgcagagcaggcacacctgtgggctgagctggtgttcctctatgacaagtacgaggagtatgacaatgctgtgctcaccatgatgagccaccccactgaggcctggaaggagggtcagttcaaggacatcattaccaaggttgccaacgtcgagctctgttacagagccctgcagttctatttggattacaaaccactgctcatcaatgacctgctgctggtgctttcaccccggctggaccacacctggacagtcagtttcttttcaaaggcaggtcagctgcccctggtgaagccttacctgcggtcagtccagagccacaacaacaagagtgtgaatgaggcactcaaccacctgctgacagaggaggaggactatcagggcttaagggcatctatcgatgcctatgacaactttgacaacatcagcctggctcagcagctggagaagcatcagctgatggagttcaggtgcattgcggcctatctgtacaagggcaataactggtgggcccagagcgtggagctctgcaagaaggatcatctctacaaggatgccatgcagcatgctgcagagtcgcgggatgctgagctggcccagaagttgctgcagtggttcctggaggaaggcaagagggagtgcttcgcagcttgtctcttcacctgctatgacctgcttcgcccagacatggtgcttgagctggcctggaggcacaacctcgtggacttggccatgccctacttcatccaggtgatgagggagtacctgagcaaggtggacaaactggatgccttggagagtctgcgcaagcaagaggagcatgtgacagagcctgcccctctcgtgtttgattttgatgggcatgaatgagacccagctgattgcactaagccctgccgtgggcccagcccctgccagcttcccctatggatatgcctctgctcccaacttcgccagcctccaatgtacaacttccgcgtgtagtgggcgttgtcaccacccaccctacctgcagagttactaacttctccaaggagcatgtcactccagcagcacaggggacgcaatgggaggcagggacacctggacaatatttatttttgctgaaacccaatgacggcaacctctgagccatcccagagcctggggaggccagggtagaggctgacggcgcaagaccagctttagccgacaacagagactggactgtgggccctcctgctggagccaggccttcctcctgggcgcctccgactggctggagctgccccctccaggccagtttgaagactacatgaacacgtcttgtttggaggtaccggacctcataaaaggactctcagcctcttggcaatcataaatattaaagtcggtttatccaggcaaa

SEQ ID NO: 119948 - DNA, 582 bp, Homo sapiens
  Payload ID: 3518
  Gene Symbol: CLTCL1
  Gene Name: clathrin, heavy chain-like 1
  ENST ID: ENST00000449918
  CDS Start-End: 76-582
accggtcagcccgcgcgaggggtcggcgttcattcctgccgctgccgccgccgccgccgaggtcccgcaccagccatggcgcagatcctccctgttcgctttcaggagcacttccagctccaaaaccttggaattaatccagctaacattggattcagcacactgaccatggaatctgacaagttcatatgtatccgagagaaagttggtgagcaggcacaggtcacgatcattgacatgagtgacccaatggctccgatccgacggcctatctctgcagagagtgccatcatgaatccagcctctaaggtgatagctctgaaaggtgctcccggtttttgctctccagcctctaattctcagtctccaggctcctcactctgtccagctgggaagacacttcagatctttaatattgagatgaagagtaaaatgaaggctcatactatggcagaagaagtgattttctggaaatgggtttctgtgaacactgttgccttggtgaccgagaccgcggtctaccactggagcatggaaggtgactcccagcccatgaagatgtttgatagacataccagtctg

SEQ ID NO: 119949 - DNA, 448 bp, Homo sapiens
  Payload ID: 3518
  Gene Symbol: CLTCL1
  Gene Name: clathrin, heavy chain-like 1
  ENST ID: ENST00000538828
  CDS Start-End: 1-204
ggcttaagggcatctatcgatgcctatgacaactttgacaacatcagcctggctcagcagctggagaagcatcagctgatggagttcaggtgcattgcggcctatctgtacaagggcaataactggtgggcccagagcgtggagctctgcaagaaggatcatctctacaaggaacagtgtgggtcaggaggcagcgatcgatgagcagcatgccagcgggggagacttctttccggagccagctcagcacatcgggtccatgcagatgtgggcactgggcgtcctcaggggtctcccaaacggaactcagaggatgccatgcagcatgctgcagagtcgcgggatgctgagctggcccagaagttgctgcagtggttcctggaggaaggcaagagggagtgcttcgcagcttgtctcttcacctgctatgacctgcttcgcccagaca

SEQ ID NO: 119950 - DNA, 1714 bp, Homo sapiens
  Payload ID: 3518
  Gene Symbol: CLTCL1
  Gene Name: clathrin, heavy chain-like 1
  ENST ID: ENST00000622493
  CDS Start-End: 91-1200
acagatgaagcttcactcgcttgcctgctgctcacttgctgctatggggcgtgattcctaacaggccacagaccagcagcggtccgtggcatgggggttggggaccgctgctttagtgtgatgcagataaagatcatgagaagcaagccacacgaggaagttggagaccgctgttacgaggagggaatgtacgaggctgccaagctgctctatagcaatgtttctaactttgcccgcctggcttccaccttggttcacctcggtgagtatcaggcagcagtggacaacagccgcaaggccagcagcacccggacgtggaaggaggtgtgctttgcctgcatggatggacaagagttccgcttcgcacagctgtgtggtcttcacatcgtcattcatgcagatgagctggaggagctgatgtgctattaccaggatcgtggctactttgaggagctgatcttgctgttggaagcggccctgggcctggagcgggcccacatgggcatgttcactgagctggccatcctctactccaaattcaagccacagaagatgctggagcatctggagcttttctggtcccgtgtcaacatcccaaaggtgctgagggctgcagagcaggcacacctgtgggctgagctggtgttcctctatgacaagtacgaggagtatgacaatgctgtgctcaccatgatgagccaccccactgaggcctggaaggagggtcagttcaaggacatcattaccaaggttgccaacgtcgagctctgttacagagccctgcagttctatttggattacaaaccactgctcatcaatgacctgctgctggtgctttcaccccggctggaccacacctggacagtcagtttcttttcaaaggatgccatgcagcatgctgcagagtcgcgggatgctgagctggcccagaagttgctgcagtggttcctggaggaaggcaagagggagtgcttcgcagcttgtctcttcacctgctatgacctgcttcgcccagacatggtgcttgagctggcctggaggcacaacctcgtggacttggccatgccctacttcatccaggtgatgagggagtacctgagcaaggtggacaaactggatgccttggagagtctgcgcaagcaagaggagcatgtgacagagcctgcccctctcgtgtttgattttgatgggcatgaatgagacccagctgattgcactaagccctgccgtgggcccagcccctgccagcttcccctatggatatgcctctgctcccaacttcgccagcctccaatgtacaacttccgcgtgtagtgggcgttgtcaccacccaccctacctgcagagttactaacttctccaaggagcatgtcactccagcagcacaggggacgcaatgggaggcagggacacctggacaatatttatttttgctgaaacccaatgacggcaacctctgagccatcccagagcctggggaggccagggtagaggctgacggcgcaagaccagctttagccgacaacagagactggactgtgggccctcctgctggagccaggccttcctcctgggcgcctccgactggctggagctgccccctccaggccagtttgaagactacatgaacacgtcttgtttggaggtaccggacctcataaaaggactctcagcctcttggcaatcataaatattaaagtcggtttatccaggc

SEQ ID NO: 119951 - DNA, 4859 bp, Homo sapiens
  Payload ID: 3518
  Gene Symbol: CLTCL1
  Gene Name: clathrin, heavy chain-like 1
  ENST ID: ENST00000617103
  CDS Start-End: 21-3803
gccgaggtcccgcaccagccatggcgcagatcctccctgttcgctttcaggagcacttccagctccaaaaccttggaattaatccagctaacattggattcagcacactgaccatggaatctgacaagttcatatgtatccgagagaaagttggtgagcaggcacaggtcacgatcattgacatgagtgacccaatggctccgatccgacggcctatctctgcagagagtgccatcatgaatccagcctctaaggtgatagctctgaaagctgggaagacacttcagatctttaatattgagatgaagagtaaaatgaaggctcatactatggcagaagaagtgattttctggaaatgggtttctgtgaacactgttgccttggtgaccgagaccgcggtctaccactggagcatggaaggtgactcccagcccatgaagatgtttgatagacataccagtctggtgggctgccaggtgattcactaccggactgatgagtaccagaagtggctgctgctcgtaggcatctcggctcagcaaaaccgtgtggttggagcaatgcagctctactctgtggataggaaggtttcacaacccatagaaggccatgctgcggcttttgcagagttcaagatggaggggaatgccaagcctgccacccttttctgctttgctgtacgtaatcccacaggaggcaagttgcacatcattgaagttggacagcctgcagcgggaaaccaaccttttgtaaagaaagcagtagatgtgttttttcctccagaggcacagaatgattttccagtggctatgcagattggagctaaacatggtgttatttacttgatcacaaagtatggctatcttcatctgtacgacctagagtctggcgtgtgcatctgcatgaaccgtattagtgctgacacaatatttgtcactgctccacacaaaccaacctctggaattattggtgtcaacaaaaagggacaggtactgtcagtttgtgttgaggaagataacattgtgaattatgcaaccaacgtgcttcagaatccagaccttggtctgcgtttggccgttcgtagtaacctggctggggcagagaagttgtttgtgagaaaattcaataccctctttgcacagggcagctatgctgaagccgccaaagttgcagcgtctgcaccaaagggaatcctgcgtaccagagagacggtccagaaattccagagtatacccgctcagtctggccaggcttctccattgctgcagtacttcggaatcctgctcgaccagggtcagctcaataaacttgaatccttagaactttgccatctggttcttcagcaggggcgtaagcaactcctagagaagtggctgaaagaagataagctggagtgctcagaggagctcggagacttggtcaaaaccactgaccccatgctcgctctgagtgtgtaccttcgggcaaatgtgccaagcaaagtgatccagtgttttgcagaaacaggccaattccagaaaattgtgctctatgccaaaaaggttgggtacaccccagactggatctttctgctgaggggtgtaatgaagatcagtccggaacagggcctgcagttttctcgaatgctagtgcaggacgaggagccgctggccaacattagccagattgtggacattttcatggaaaacagtttaattcagcagtgtacttccttcttattggatgccttgaagaataatcgcccagctgagggactcctgcagacatggctgttggagatgaaccttgttcatgcaccccaggttgcagatgccatccttggaaataaaatgtttactcattacgaccgggcccacattgcccagctctgtgagaaggcaggcctcctgcagcaagcactggagcactacaccgacctctatgacatcaagagggctgtggtccacactcacctcctcaatcccgagtggcttgtcaatttctttggctccttatcggtggaggattctgtggagtgtctgcatgccatgctgtctgctaacatcagacagaaccttcagctgtgtgtgcaggtggcctctaagtaccacgagcagctgggcacgcaggccctggtggagctctttgaatccttcaagagttacaaaggcctcttctacttcctgggctcaatcgtgaacttcagccaagacccagatgtgcatctgaaatacattcaggctgcctgtaagacagggcagatcaaggaggtggagaggatatgccgagagagcagctgctacaacccagagcgtgtgaagaacttcctgaaggaggccaagctcacagaccagcttcccctcatcatcgtgtgtgatcgttttggctttgtccatgaccttgtcctatatttataccgcaacaacctgcagaggtacattgagatctacgtgcagaaggtcaaccctagccggaccccagctgtgattggagggctgcttgatgtggattgttctgaggaagtgattaaacacttaatcatggcagtgagaggacagttctctactgatgagttggtggctgaagtagaaaaaagaaataggctcaagctgctgcttccctggctggagtcccagattcaggaaggctgtgaggagcctgccactcacaatgcactggctaaaatctacatcgacagcaacaacagccccgagtgcttcctgagagagaatgcctactatgacagcagcgtggtgggccgctactgtgagaagcgagacccccatctggcctgtgttgcctatgagcgggggcagtgtgaccttgagctcatcaaggtgtgcaatgagaattctctgttcaaaagcgaggcccgctacctggtatgcagaaaggatccggagctctgggctcacgtccttgaggagaccaacccatccaggagacagctaattgaccaggtggtacagacagcattgtcagaaacacgggatcctgaagagatttcggtcactgtcaaagcctttatgacagccgacctgcctaatgaactgattgaactgctggagaagatagttctggataactctgtcttcagcgagcacaggaatctacagaatctgttgatcctgactgccatcaaggcagaccgcacacgggtcatggagtacatcagccgcctggacaactatgacgcactggacatcgcgagcatcgctgtcagcagcgcactgtatgaggaggccttcaccgttttccacaagtttgatatgaatgcctcagcaatccaggtcctgatcgagcacattggaaacctggaccgggcatatgagtttgcggagagatgcaatgagcctgctgtgtggagtcagctggcccaagcccagctccagaaagatttggtgaaggaagccatcaactcctatatcagaggggacgacccttcctcttacctggaagttgttcagtcagccagcaggagcaacaactgggaggatctagttaaatttctgcagatggccaggaaaaagggccgtgagtcctatatagagactgaacttatttttgccttggctaaaaccagccgtgtttctgagctagaagattttattaatggacccaacaatgcccacatccagcaggttggagaccgctgttacgaggagggaatgtacgaggctgccaagctgctctatagcaatgtttctaactttgcccgcctggcttccaccttggttcacctcggtgtgctttgcctgcatggatggacaagagttccgcttcgcacagctgtgtggtcttcacatcgtcattcatgcagatgagctggaggagctgatgtgctattaccaggatcgtggctactttgaggagctgatcttgctgttggaagcggccctgggcctggagcgggcccacatgggcatgttcactgagctggccatcctctactccaaattcaagccacagaagatgctggagcatctggagcttttctggtcccgtgtcaacatcccaaaggtgctgagggctgcagagcaggcacacctgtgggctgagctggtgttcctctatgacaagtacgaggagtatgacaatgctgtgctcaccatgatgagccaccccactgaggcctggaaggagggtcagttcaaggacatcattaccaaggttgccaacgtcgagctctgttacagagccctgcagttctatttggattacaaaccactgctcatcaatgacctgctgctggtgctttcaccccggctggaccacacctggacagtcagtttcttttcaaaggcaggtcagctgcccctggtgaagccttacctgcggtcagtccagagccacaacaacaagagtgtgaatgaggcactcaaccacctgctgacagaggaggaggactatcagggcttaagggcatctatcgatgcctatgacaactttgacaacatcagcctggctcagcagctggagaagcatcagctgatggagttcaggtgcattgcggcctatctgtacaagggcaataactggtgggcccagagcgtggagctctgcaagaaggatcatctctacaaggatgccatgcagcatgctgcagagtcgcgggatgctgagctggcccagaagttgctgcagtggttcctggaggaaggcaagagggagtgcttcgcagcttgtctcttcacctgctatgacctgcttcgcccagacatggtgcttgagctggcctggaggcacaacctcgtggacttggccatgccctacttcatccaggtgatgagggagtacctgagcaaggtggacaaactggatgccttggagagtctgcgcaagcaagaggagcatgtgacagagcctgcccctctcgtgtt

SEQ ID NO: 119952 - DNA, 1695 bp, Homo sapiens
  Payload ID: 3518
  Gene Symbol: CLTCL1
  Gene Name: clathrin, heavy chain-like 1
  ENST ID: ENST00000617926
  CDS Start-End: 89-1480
agatgaagcttcactcgcttgcctgctgctcacttgctgctatggggcgtgattcctaacaggccacagaccagcagcggtccgtggcatgggggttggggaccgctgctttagtgtgatgcagataaagatcatgagaagcaagccacacgaggaagttggagaccgctgttacgaggagggaatgtacgaggctgccaagctgctctatagcaatgtttctaactttgcccgcctggcttccaccttggttcacctcggtgagtatcaggcagcagtggacaacagccgcaaggccagcagcacccggacgtggaaggaggtgtgctttgcctgcatggatggacaagagttccgcttcgcacagctgtgtggtcttcacatcgtcattcatgcagatgagctggaggagctgatgtgctattaccaggatcgtggctactttgaggagctgatcttgctgttggaagcggccctgggcctggagcgggcccacatgggcatgttcactgagctggccatcctctactccaaattcaagccacagaagatgctggagcatctggagcttttctggtcccgtgtcaacatcccaaaggtgctgagggctgcagagcaggcacacctgtgggctgagctggtgttcctctatgacaagtacgaggagtatgacaatgctgtgctcaccatgatgagccaccccactgaggcctggaaggagggtcagttcaaggacatcattaccaaggttgccaacgtcgagctctgttacagagccctgcagttctatttggattacaaaccactgctcatcaatgacctgctgctggtgctttcaccccggctggaccacacctggacagtcagtttcttttcaaaggcaggtcagctgcccctggtgaagccttacctgcggtcagtccagagccacaacaacaagagtgtgaatgaggcactcaaccacctgctgacagaggaggaggactatcagggcttaagggcatctatcgatgcctatgacaactttgacaacatcagcctggctcagcagctggagaagcatcagctgatggagttcaggtgcattgcggcctatctgtacaagggcaataactggtgggcccagagcgtggagctctgcaagaaggatcatctctacaaggatgccatgcagcatgctgcagagtcgcgggatgctgagctggcccagaagttgctgcagtggttcctggaggaaggcaagagggagtgcttcgcagcttgtctcttcacctgctatgacctgcttcgcccagacatggtgcttgagctggcctggaggcacaacctcgtggacttggccatgccctacttcatccaggtgatgagggagtacctgagcaaggtggacaaactggatgccttggagagtctgcgcaagcaagaggagcatgtgacagagcctgcccctctcgtgtttgattttgatgggcatgaatgagacccagctgattgcactaagccctgccgtgggcccagcccctgccagcttcccctatggatatgcctctgctcccaacttcgccagcctccaatgtacaacttccgcgtgtagtgggcgttgtcaccacccaccctacctgcagagttactaacttctccaaggagcatgtcactccagcagcacaggggacgcaatgggaggcagggacacct

SEQ ID NO: 119953 - DNA, 5313 bp, Homo sapiens
  Payload ID: 3518
  Gene Symbol: CLTCL1
  Gene Name: clathrin, heavy chain-like 1
  Uniprot ID: P53675
  ENST ID: ENST00000621271
  CDS Start-End: 45-4796
attcctgccgctgccgccgccgccgccgaggtcccgcaccagccatggcgcagatcctccctgttcgctttcaggagcacttccagctccaaaaccttggaattaatccagctaacattggattcagcacactgaccatggaatctgacaagttcatatgtatccgagagaaagttggtgagcaggcacaggtcacgatcattgacatgagtgacccaatggctccgatccgacggcctatctctgcagagagtgccatcatgaatccagcctctaaggtgatagctctgaaagctgggaagacacttcagatctttaatattgagatgaagagtaaaatgaaggctcatactatggcagaagaagtgattttctggaaatgggtttctgtgaacactgttgccttggtgaccgagaccgcggtctaccactggagcatggaaggtgactcccagcccatgaagatgtttgatagacataccagtctggtgggctgccaggtgattcactaccggactgatgagtaccagaagtggctgctgctcgtaggcatctcggctcagcaaaaccgtgtggttggagcaatgcagctctactctgtggataggaaggtttcacaacccatagaaggccatgctgcggcttttgcagagttcaagatggaggggaatgccaagcctgccacccttttctgctttgctgtacgtaatcccacaggaggcaagttgcacatcattgaagttggacagcctgcagcgggaaaccaaccttttgtaaagaaagcagtagatgtgttttttcctccagaggcacagaatgattttccagtggctatgcagattggagctaaacatggtgttatttacttgatcacaaagtatggctatcttcatctgtacgacctagagtctggcgtgtgcatctgcatgaaccgtattagtgctgacacaatatttgtcactgctccacacaaaccaacctctggaattattggtgtcaacaaaaagggacaggtactgtcagtttgtgttgaggaagataacattgtgaattatgcaaccaacgtgcttcagaatccagaccttggtctgcgtttggccgttcgtagtaacctggctggggcagagaagttgtttgtgagaaaattcaataccctctttgcacagggcagctatgctgaagccgccaaagttgcagcgtctgcaccaaagggaatcctgcgtaccagagagacggtccagaaattccagagtatacccgctcagtctggccaggcttctccattgctgcagtacttcggaatcctgctcgaccagggtcagctcaataaacttgaatccttagaactttgccatctggttcttcagcaggggcgtaagcaactcctagagaagtggctgaaagaagataagctggagtgctcagaggagctcggagacttggtcaaaaccactgaccccatgctcgctctgagtgtgtaccttcgggcaaatgtgccaagcaaagtgatccagtgttttgcagaaacaggccaattccagaaaattgtgctctatgccaaaaaggttgggtacaccccagactggatctttctgctgaggggtgtaatgaagatcagtccggaacagggcctgcagttttctcgaatgctagtgcaggacgaggagccgctggccaacattagccagattgtggacattttcatggaaaacagtttaattcagcagtgtacttccttcttattggatgccttgaagaataatcgcccagctgagggactcctgcagacatggctgttggagatgaaccttgttcatgcaccccaggttgcagatgccatccttggaaataaaatgtttactcattacgaccgggcccacattgcccagctctgtgagaaggcaggcctcctgcagcaagcactggagcactacaccgacctctatgacatcaagagggctgtggtccacactcacctcctcaatcccgagtggcttgtcaatttctttggctccttatcggtggaggattctgtggagtgtctgcatgccatgctgtctgctaacatcagacagaaccttcagctgtgtgtgcaggtggcctctaagtaccacgagcagctgggcacgcaggccctggtggagctctttgaatccttcaagagttacaaaggcctcttctacttcctgggctcaatcgtgaacttcagccaagacccagatgtgcatctgaaatacattcaggctgcctgtaagacagggcagatcaaggaggtggagaggatatgccgagagagcagctgctacaacccagagcgtgtgaagaacttcctgaaggaggccaagctcacagaccagcttcccctcatcatcgtgtgtgatcgttttggctttgtccatgaccttgtcctatatttataccgcaacaacctgcagaggtacattgagatctacgtgcagaaggtcaaccctagccggaccccagctgtgattggagggctgcttgatgtggattgttctgaggaagtgattaaacacttaatcatggcagtgagaggacagttctctactgatgagttggtggctgaagtagaaaaaagaaataggctcaagctgctgcttccctggctggagtcccagattcaggaaggctgtgaggagcctgccactcacaatgcactggctaaaatctacatcgacagcaacaacagccccgagtgcttcctgagagagaatgcctactatgacagcagcgtggtgggccgctactgtgagaagcgagacccccatctggcctgtgttgcctatgagcgggggcagtgtgaccttgagctcatcaaggtgtgcaatgagaattctctgttcaaaagcgaggcccgctacctggtatgcagaaaggatccggagctctgggctcacgtccttgaggagaccaacccatccaggagacagctaattgaccaggtggtacagacagcattgtcagaaacacgggatcctgaagagatttcggtcactgtcaaagcctttatgacagccgacctgcctaatgaactgattgaactgctggagaagatagttctggataactctgtcttcagcgagcacaggaatctacagaatctgttgatcctgactgccatcaaggcagaccgcacacgggtcatggagtacatcagccgcctggacaactatgacgcactggacatcgcgagcatcgctgtcagcagcgcactgtatgaggaggccttcaccgttttccacaagtttgatatgaatgcctcagcaatccaggtcctgatcgagcacattggaaacctggaccgggcatatgagtttgcggagagatgcaatgagcctgctgtgtggagtcagctggcccaagcccagctccagaaagatttggtgaaggaagccatcaactcctatatcagaggggacgacccttcctcttacctggaagttgttcagtcagccagcaggagcaacaactgggaggatctagttaaatttctgcagatggccaggaaaaagggccgtgagtcctatatagagactgaacttatttttgccttggctaaaaccagccgtgtttctgagctagaagattttattaatggacccaacaatgcccacatccagcaggttggagaccgctgttacgaggagggaatgtacgaggctgccaagctgctctatagcaatgtttctaactttgcccgcctggcttccaccttggttcacctcggtgagtatcaggcagcagtggacaacagccgcaaggccagcagcacccggacgtggaaggaggtgtgctttgcctgcatggatggacaagagttccgcttcgcacagctgtgtggtcttcacatcgtcattcatgcagatgagctggaggagctgatgtgctattaccaggatcgtggctactttgaggagctgatcttgctgttggaagcggccctgggcctggagcgggcccacatgggcatgttcactgagctggccatcctctactccaaattcaagccacagaagatgctggagcatctggagcttttctggtcccgtgtcaacatcccaaaggtgctgagggctgcagagcaggcacacctgtgggctgagctggtgttcctctatgacaagtacgaggagtatgacaatgctgtgctcaccatgatgagccaccccactgaggcctggaaggagggtcagttcaaggacatcattaccaaggttgccaacgtcgagctctgttacagagccctgcagttctatttggattacaaaccactgctcatcaatgacctgctgctggtgctttcaccccggctggaccacacctggacagtcagtttcttttcaaaggcaggtcagctgcccctggtgaagccttacctgcggtcagtccagagccacaacaacaagagtgtgaatgaggcactcaaccacctgctgacagaggaggaggactatcaggatgccatgcagcatgctgcagagtcgcgggatgctgagctggcccagaagttgctgcagtggttcctggaggaaggcaagagggagtgcttcgcagcttgtctcttcacctgctatgacctgcttcgcccagacatggtgcttgagctggcctggaggcacaacctcgtggacttggccatgccctacttcatccaggtgatgagggagtacctgagcaaggtggacaaactggatgccttggagagtctgcgcaagcaagaggagcatgtgacagagcctgcccctctcgtgtttgattttgatgggcatgaatgagacccagctgattgcactaagccctgccgtgggcccagcccctgccagcttcccctatggatatgcctctgctcccaacttcgccagcctccaatgtacaacttccgcgtgtagtgggcgttgtcaccacccaccctacctgcagagttactaacttctccaaggagcatgtcactccagcagcacaggggacgcaatgggaggcagggacacctggacaatatttatttttgctgaaacccaatgacggcaacctctgagccatcccagagcctggggaggccagggtagaggctgacggcgcaagaccagctttagccgacaacagagactggactgtgggccctcctgctggagccaggccttcctcctgggcgcctccgactggctggagctgccccctccaggccagtttgaagactacatgaacacgtcttgtttggaggtaccggacctcataaaaggactctcagcctcttggcaatcataaatattaaagtcggtttatccaggcaaa

SEQ ID NO: 119954 - DNA, 1073 bp, Homo sapiens
  Payload ID: 3519
  Gene Symbol: CLTA
  Gene Name: clathrin, light chain A
  Uniprot ID: P09496
  ENST ID: ENST00000345519
  CDS Start-End: 135-791
gctttacccgtctccctcctggcgcttgtcctcctctcccagtcggcaccacagcggtggctgccgggcgtggtgtcggtgggtcggttggtttttgtctcaccgttggtgtccgtgccgttcagttgcccgccatggctgagctggatccgttcggcgcccctgccggcgcccctggcggtcccgcgctggggaacggagtggccggcgccggcgaagaagacccggctgcggccttcttggcgcagcaagagagcgagattgcgggcatcgagaacgacgaggccttcgccatcctggacggcggcgcccccgggccccagccgcacggcgagccgccggggggtccggatgctgttgatggagtaatgaatggtgaatactaccaggaaagtaatggtccaacagacagttatgcagctatttcacaagtggatcgattgcagtcagagcctgaaagtatccgtaaatggagagaagaacaaatggaacgcttggaagcccttgatgccaattctcggaagcaagaagcagagtggaaagaaaaggcaataaaggagctagaagaatggtatgcaagacaggacgagcagctacagaaaacaaaagcaaacaacagggcagcagaagaagcctttgtaaatgacattgacgagtcgtccccaggcactgagtgggaacgggtggcccggctgtgtgactttaaccccaagtctagcaagcaggccaaagatgtctcccgcatgcgctcagtcctcatctccctcaagcaggccccgctggtgcactgaagagccaccctgtggaaacactacatctgcaatatcttaatcctactcagtgaagctcttcacagtcattggattaattatgttgagttcttttggaccaaacctttttgtctttagagttgttcattgtttgtgattgcatgtttccttccttcaactgtgttctccctggcattcagagaggagggagaggaggaagaggaaggggagggaagcttcccaagagtagcctcaacctgtgcttctgtgcattattctgagaataaatttctgtttcaaact

SEQ ID NO: 119955 - DNA, 1152 bp, Homo sapiens
  Payload ID: 3519
  Gene Symbol: CLTA
  Gene Name: clathrin, light chain A
  Uniprot ID: P09496
  ENST ID: ENST00000242285
  CDS Start-End: 121-867
cctcctggcgcttgtcctcctctcccagtcggcaccacagcggtggctgccgggcgtggtgtcggtgggtcggttggtttttgtctcaccgttggtgtccgtgccgttcagttgcccgccatggctgagctggatccgttcggcgcccctgccggcgcccctggcggtcccgcgctggggaacggagtggccggcgccggcgaagaagacccggctgcggccttcttggcgcagcaagagagcgagattgcgggcatcgagaacgacgaggccttcgccatcctggacggcggcgcccccgggccccagccgcacggcgagccgccggggggtccggatgctgttgatggagtaatgaatggtgaatactaccaggaaagtaatggtccaacagacagttatgcagctatttcacaagtggatcgattgcagtcagagcctgaaagtatccgtaaatggagagaagaacaaatggaacgcttggaagcccttgatgccaattctcggaagcaagaagcagagtggaaagaaaaggcaataaaggagctagaagaatggtatgcaagacaggacgagcagctacagaaaacaaaagcaaacaacagggtggcagatgaagctttctacaaacaacccttcgctgacgtgattggttatgtcacaaacataaaccatccttgctacagcctagaacaggcagcagaagaagcctttgtaaatgacattgacgagtcgtccccaggcactgagtgggaacgggtggcccggctgtgtgactttaaccccaagtctagcaagcaggccaaagatgtctcccgcatgcgctcagtcctcatctccctcaagcaggccccgctggtgcactgaagagccaccctgtggaaacactacatctgcaatatcttaatcctactcagtgaagctcttcacagtcattggattaattatgttgagttcttttggaccaaacctttttgtctttagagttgttcattgtttgtgattgcatgtttccttccttcaactgtgttctccctggcattcagagaggagggagaggaggaagaggaaggggagggaagcttcccaagagtagcctcaacctgtgcttctgtgcattattctgagaataaatttctgtttcaaactgta

SEQ ID NO: 119956 - DNA, 1090 bp, Homo sapiens
  Payload ID: 3519
  Gene Symbol: CLTA
  Gene Name: clathrin, light chain A
  Uniprot ID: P09496
  ENST ID: ENST00000396603
  CDS Start-End: 95-805
agtcggcaccacagcggtggctgccgggcgtggtgtcggtgggtcggttggtttttgtctcaccgttggtgtccgtgccgttcagttgcccgccatggctgagctggatccgttcggcgcccctgccggcgcccctggcggtcccgcgctggggaacggagtggccggcgccggcgaagaagacccggctgcggccttcttggcgcagcaagagagcgagattgcgggcatcgagaacgacgaggccttcgccatcctggacggcggcgcccccgggccccagccgcacggcgagccgccggggggtccggatgctgttgatggagtaatgaatggtgaatactaccaggaaagtaatggtccaacagacagttatgcagctatttcacaagtggatcgattgcagtcagagcctgaaagtatccgtaaatggagagaagaacaaatggaacgcttggaagcccttgatgccaattctcggaagcaagaagcagagtggaaagaaaaggcaataaaggagctagaagaatggtatgcaagacaggacgagcagctacagaaaacaaaagcaaacaacagggtggcagatgaagctttctacaaacaacccttcgctgacgtgattggttatgtggcagcagaagaagcctttgtaaatgacattgacgagtcgtccccaggcactgagtgggaacgggtggcccggctgtgtgactttaaccccaagtctagcaagcaggccaaagatgtctcccgcatgcgctcagtcctcatctccctcaagcaggccccgctggtgcactgaagagccaccctgtggaaacactacatctgcaatatcttaatcctactcagtgaagctcttcacagtcattggattaattatgttgagttcttttggaccaaacctttttgtctttagagttgttcattgtttgtgattgcatgtttccttccttcaactgtgttctccctggcattcagagaggagggagaggaggaagaggaaggggagggaagcttcccaagagtagcctcaacctgtgcttctgtgcattattctgagaataaatttctgtttcaaactgta

SEQ ID NO: 119957 - DNA, 1235 bp, Homo sapiens
  Payload ID: 3519
  Gene Symbol: CLTA
  Gene Name: clathrin, light chain A
  Uniprot ID: P09496
  ENST ID: ENST00000433436
  CDS Start-End: 202-948
gattggttgttcccttttcggctctgcaacaccgcctagaccgaccggatacacgggtagggcttccgctttacccgtctccctcctggcgcttgtcctcctctcccagtcggcaccacagcggtggctgccgggcgtggtgtcggtgggtcggttggtttttgtctcaccgttggtgtccgtgccgttcagttgcccgccatggctgagctggatccgttcggcgcccctgccggcgcccctggcggtcccgcgctggggaacggagtggccggcgccggcgaagaagacccggctgcggccttcttggcgcagcaagagagcgagattgcgggcatcgagaacgacgaggccttcgccatcctggacggcggcgcccccgggccccagccgcacggcgagccgccggggggtccggatgctgttgatggagtaatgaatggtgaatactaccaggaaagtaatggtccaacagacagttatgcagctatttcacaagtggatcgattgcagtcagagcctgaaagtatccgtaaatggagagaagaacaaatggaacgcttggaagcccttgatgccaattctcggaagcaagaagcagagtggaaagaaaaggcaataaaggagctagaagaatggtatgcaagacaggacgagcagctacagaaaacaaaagcaaacaacagggtggcagatgaagctttctacaaacaacccttcgctgacgtgattggttatgtcacaaacataaaccatccttgctacagcctagaacaggcagcagaagaagcctttgtaaatgacattgacgagtcgtccccaggcactgagtgggaacgggtggcccggctgtgtgactttaaccccaagtctagcaagcaggccaaagatgtctcccgcatgcgctcagtcctcatctccctcaagcaggccccgctggtgcactgaagagccaccctgtggaaacactacatctgcaatatcttaatcctactcagtgaagctcttcacagtcattggattaattatgttgagttcttttggaccaaacctttttgtctttagagttgttcattgtttgtgattgcatgtttccttccttcaactgtgttctccctggcattcagagaggagggagaggaggaagaggaaggggagggaagcttcccaagagtagcctcaacctgtgcttctgtgcattattctgagaataaatttctgtttcaaactgtatt

SEQ ID NO: 119958 - DNA, 695 bp, Homo sapiens
  Payload ID: 3519
  Gene Symbol: CLTA
  Gene Name: clathrin, light chain A
  ENST ID: ENST00000466396
  CDS Start-End: 95-685
agtcggcaccacagcggtggctgccgggcgtggtgtcggtgggtcggttggtttttgtctcaccgttggtgtccgtgccgttcagttgcccgccatggctgagctggatccgttcggcgcccctgccggcgcccctggcggtcccgcgctggggaacggagtggccggcgccggcgaagaagacccggctgcggccttcttggcgcagcaagagagcgagattgcgggcatcgagaacgacgaggccttcgccatcctggacggcggcgcccccgggccccagccgcacggcgagccgccggggggtccggatgccaattctcggaagcaagaagcagagtggaaagaaaaggcaataaaggagctagaagaatggtatgcaagacaggacgagcagctacagaaaacaaaagcaaacaacagggtggcagatgaagctttctacaaacaacccttcgctgacgtgattggttatgtcacaaacataaaccatccttgctacagcctagaacaggcagcagaagaagcctttgtaaatgacattgacgagtcgtccccaggcactgagtgggaacgggtggcccggctgtgtgactttaaccccaagtctagcaagcaggccaaagatgtctcccgcatgcgctcagtcctcatctccctcaagcaggccccgctggtgcactgaagagccaccc

SEQ ID NO: 119959 - DNA, 1890 bp, Homo sapiens
  Payload ID: 3519
  Gene Symbol: CLTA
  Gene Name: clathrin, light chain A
  ENST ID: ENST00000464497
  CDS Start-End: 127-909
cgtctccctcctggcgcttgtcctcctctcccagtcggcaccacagcggtggctgccgggcgtggtgtcggtgggtcggttggtttttgtctcaccgttggtgtccgtgccgttcagttgcccgccatggctgagctggatccgttcggcgcccctgccggcgcccctggcggtcccgcgctggggaacggagtggccggcgccggcgaagaagacccggctgcggccttcttggcgcagcaagagagcgagattgcgggcatcgagaacgacgaggccttcgccatcctggacggcggcgcccccgggccccagccgcacggcgagccgccggggggtccggatgctgttgatggagtaatgaatggtgaatactaccaggaaagtaatggtccaacagacagttatgcagctatttcacaagtggatcgattgcagtcagagcctgaaagtatccgtaaatggagagaagaacaaatggaacgcttggaagcccttgatgccaattctcggaagcaagaagcagagtggaaagaaaaggcaataaaggagctagaagaatggtatgcaagacaggacgagcagctacagaaaacaaaagcaaacaacagggtttcactcttgcccaggctggagtgcaatggcgtcatctcggctcactgcaacctctgcctcccgggttcaagcaattctcctgcctcagcctcccgaggagctgggattacagacatgtgtcaccgcgcccggctaatttttgtatttttagtagagatggggtttcaccatgttggccaggctggtctcaaaattctgacctcaaatgatctgcccgcctcggccagggcccggattacagggagatggaagggagtcaaggatgttgccatgtatgtgccatctctgccctaagccaatatcatgaagaaatcaacaagaggtggaataaactgagcaattcatcaccatattaagctggatattcctgtttagtaaatatctttccctagctggatgtggtctaggaggaagccttggaattttctcactctggattgtggaaccacaaagtcagcctggagctgcctacatctggacacctaggctcctgtcagagccagtttattatttccagtcactcattactgggattctcctctccctggggcgttatgaaggaattaaaagaaattaaagaggccgggcgcagtggctcacgcctgtaatcccagtaatttgggaggccaaggcaggcggatcacctgaggtccagagttcaagaccagcctgaccaacatagagaaaccctgtctctactaaaaatacaaaaaattagccaggtgtggtggtgcatgcctgtaatcccagctactccagaggctgaggcaggagaatggcttgaacctgggaggcggaggttgctgtgagccgagatcgcacctttgcactctagcctgggcaacaagagcgaaactccgtctcaaaagaaaaaaaaaagaaattaaagaatgtgtaagcaaaaactcagttgtatgtaagaaaacccaattctccctgagaaagaaaaaaagctgaagtcctttaaaaattgactgcctgtttttctgtggctagtgagccttatctctccctttcccaggcattgtgaagactctgtttctctagctgtgtagctgcaaggtcactaggcagataatctcaagtcgtaaaacatgttgttccttggaaagtaagaaatgatgtaatgcatgtcttaattaaataactgtctttgtttcttgcttctgtaatatgcttccccctgcacagatctcccaccgccccacaaaatgcttaaaaggtagcttgactctttgttcatggctcagtcctttggatgttaatccgactggg

SEQ ID NO: 119960 - DNA, 1102 bp, Homo sapiens
  Payload ID: 3519
  Gene Symbol: CLTA
  Gene Name: clathrin, light chain A
  Uniprot ID: P09496
  ENST ID: ENST00000470744
  CDS Start-End: 126-818
gtctccctcctggcgcttgtcctcctctcccagtcggcaccacagcggtggctgccgggcgtggtgtcggtgggtcggttggtttttgtctcaccgttggtgtccgtgccgttcagttgcccgccatggctgagctggatccgttcggcgcccctgccggcgcccctggcggtcccgcgctggggaacggagtggccggcgccggcgaagaagacccggctgcggccttcttggcgcagcaagagagcgagattgcgggcatcgagaacgacgaggccttcgccatcctggacggcggcgcccccgggccccagccgcacggcgagccgccggggggtccggatgctgttgatggagtaatgaatggtgaatactaccaggaaagtaatggtccaacagacagttatgcagctatttcacaagtggatcgattgcagtcagagcctgaaagtatccgtaaatggagagaagaacaaatggaacgcttggaagcccttgatgccaattctcggaagcaagaagcagagtggaaagaaaaggcaataaaggagctagaagaatggtatgcaagacaggacgagcagctacagaaaacaaaagcaaacaacagcacaaacataaaccatccttgctacagcctagaacaggcagcagaagaagcctttgtaaatgacattgacgagtcgtccccaggcactgagtgggaacgggtggcccggctgtgtgactttaaccccaagtctagcaagcaggccaaagatgtctcccgcatgcgctcagtcctcatctccctcaagcaggccccgctggtgcactgaagagccaccctgtggaaacactacatctgcaatatcttaatcctactcagtgaagctcttcacagtcattggattaattatgttgagttcttttggaccaaacctttttgtctttagagttgttcattgtttgtgattgcatgtttccttccttcaactgtgttctccctggcattcagagaggagggagaggaggaagaggaaggggagggaagcttcccaagagtagcctcaacctgtgcttctgtgcattattctgagaataaatttctgtttcaaactgt

SEQ ID NO: 119961 - DNA, 989 bp, Homo sapiens
  Payload ID: 3519
  Gene Symbol: CLTA
  Gene Name: clathrin, light chain A
  Uniprot ID: P09496
  ENST ID: ENST00000540080
  CDS Start-End: 202-702
gattggttgttcccttttcggctctgcaacaccgcctagaccgaccggatacacgggtagggcttccgctttacccgtctccctcctggcgcttgtcctcctctcccagtcggcaccacagcggtggctgccgggcgtggtgtcggtgggtcggttggtttttgtctcaccgttggtgtccgtgccgttcagttgcccgccatggctgagctggatccgttcggcgcccctgccggcgcccctggcggtcccgcgctggggaacggagtggccggcgccggcgaagaagacccggctgcggccttcttggcgcagcaagagagcgagattgcgggcatcgagaacgacgaggccttcgccatcctggacggcggcgcccccgggccccagccgcacggcgagccgccggggggtccggatgccaattctcggaagcaagaagcagagtggaaagaaaaggcaataaaggagctagaagaatggtatgcaagacaggacgagcagctacagaaaacaaaagcaaacaacagggcagcagaagaagcctttgtaaatgacattgacgagtcgtccccaggcactgagtgggaacgggtggcccggctgtgtgactttaaccccaagtctagcaagcaggccaaagatgtctcccgcatgcgctcagtcctcatctccctcaagcaggccccgctggtgcactgaagagccaccctgtggaaacactacatctgcaatatcttaatcctactcagtgaagctcttcacagtcattggattaattatgttgagttcttttggaccaaacctttttgtctttagagttgttcattgtttgtgattgcatgtttccttccttcaactgtgttctccctggcattcagagaggagggagaggaggaagaggaaggggagggaagcttcccaagagtagcctcaacctgtgcttctgtgcattattctgagaataaatttctgtttcaaactgtatt

SEQ ID NO: 119962 - DNA, 1181 bp, Homo sapiens
  Payload ID: 3519
  Gene Symbol: CLTA
  Gene Name: clathrin, light chain A
  Uniprot ID: P09496
  ENST ID: ENST00000538225
  CDS Start-End: 202-894
gattggttgttcccttttcggctctgcaacaccgcctagaccgaccggatacacgggtagggcttccgctttacccgtctccctcctggcgcttgtcctcctctcccagtcggcaccacagcggtggctgccgggcgtggtgtcggtgggtcggttggtttttgtctcaccgttggtgtccgtgccgttcagttgcccgccatggctgagctggatccgttcggcgcccctgccggcgcccctggcggtcccgcgctggggaacggagtggccggcgccggcgaagaagacccggctgcggccttcttggcgcagcaagagagcgagattgcgggcatcgagaacgacgaggccttcgccatcctggacggcggcgcccccgggccccagccgcacggcgagccgccggggggtccggatgctgttgatggagtaatgaatggtgaatactaccaggaaagtaatggtccaacagacagttatgcagctatttcacaagtggatcgattgcagtcagagcctgaaagtatccgtaaatggagagaagaacaaatggaacgcttggaagcccttgatgccaattctcggaagcaagaagcagagtggaaagaaaaggcaataaaggagctagaagaatggtatgcaagacaggacgagcagctacagaaaacaaaagcaaacaacagcacaaacataaaccatccttgctacagcctagaacaggcagcagaagaagcctttgtaaatgacattgacgagtcgtccccaggcactgagtgggaacgggtggcccggctgtgtgactttaaccccaagtctagcaagcaggccaaagatgtctcccgcatgcgctcagtcctcatctccctcaagcaggccccgctggtgcactgaagagccaccctgtggaaacactacatctgcaatatcttaatcctactcagtgaagctcttcacagtcattggattaattatgttgagttcttttggaccaaacctttttgtctttagagttgttcattgtttgtgattgcatgtttccttccttcaactgtgttctccctggcattcagagaggagggagaggaggaagaggaaggggagggaagcttcccaagagtagcctcaacctgtgcttctgtgcattattctgagaataaatttctgtttcaaactgtatt

SEQ ID NO: 119963 - DNA, 714 bp, Homo sapiens
  Payload ID: 3519
  Gene Symbol: CLTA
  Gene Name: clathrin, light chain A
  ENST ID: ENST00000493185
  CDS Start-End: 1-195
gcgcagcaagagagcgagattgcgggcatcgagaacgacgaggccttcgccatcctggacggcggcgcccccgggccccagccgcacggcgagccgccggggggtccggatgctgttgatggagtaatgaatggtgaatactaccagatgccaattctcggaagcaagaagcagagtggaaagaaaaggcaataaaggagctagaagaatggtatgcaagacaggacgagcagctacagaaaacaaaagcaaacaacagggcagcagaagaagcctttgtaaatgacattgacgagtcgtccccaggcactgagtgggaacgggtggcccggctgtgtgactttaaccccaagtctagcaagcaggccaaagatgtctcccgcatgcgctcagtcctcatctccctcaagcaggccccgctggtgcactgaagagccaccctgtggaaacactacatctgcaatatcttaatcctactcagtgaagctcttcacagtcattggattaattatgttgagttcttttggaccaaacctttttgtctttagagttgttcattgtttgtgattgcatgtttccttccttcaactgtgttctccctggcattcagagaggagggagaggaggaagaggaaggggagggaagcttcccaagagtagcctcaacctgtgcttctgtgcattattctgagaataaatttctgtttcaaactg

SEQ ID NO: 119964 - DNA, 1215 bp, Homo sapiens
  Payload ID: 3520
  Gene Symbol: CLTB
  Gene Name: clathrin, light chain B
  Uniprot ID: P09497
  ENST ID: ENST00000310418
  CDS Start-End: 207-896
ccgctcctcccgccgcggcgcccgcaccgcagtgacagccagccgggcccggtggcggagaggaagtgcggtccgcgccaagcccgtccccgccgacgccggctcccccgcggctcgggtgacagcgtcgcggccgccggacgcagcgcggggcaggcgcgggcagagccgagcgcagcggaggctccggcggaggcgcggggaaaatggctgatgactttggcttcttctcgtcgtcggagagcggtgccccggaggcggcggaggaggacccggcggccgccttcctggcccagcaggagagcgagattgcaggcatagagaacgacgagggcttcggggcacctgccggcagccatgcggcccccgcgcagccgggccccacgagtggggctggttctgaggacatggggaccacagtcaatggagatgtgtttcaggaggccaacggtcctgctgatggctacgcagccattgcccaggctgacaggctgacccaggagcctgagagcatccgcaagtggcgagaggagcagaggaaacggctgcaagagctggatgctgcatctaaggtcacggaacaggaatggcgggagaaggccaagaaggacctggaggagtggaaccagcgccagagtgaacaagtagagaagaacaagatcaacaaccggatcgctgacaaagcattctaccagcagccagatgctgatatcatcggctacgtggcatccgaggaggctttcgtgaaggaatccaaggaggagaccccaggcacagagtgggagaaggtggcccagctatgtgacttcaaccccaagagcagcaagcagtgcaaagatgtgtcccgcctgcgctcggtgctcatgtccctgaagcagacgccactgtcccgctaggtgcctgctaggtgcatggccacagagcatgggctgggcctgggcacaggaggagcagctgctttggtcggggtggagactcgcagcagctgctacccacagcctattccactcctccccatctccaggcgctgggaggggggccctcaccccatcacgcctcgctccctcctggccctctggtccagcccctcacgcctcctctcagtctactcaattgtgactgtccctcctgatgtattttttttcttggcttaaagggtgtgttgttgactctttttacacttatttattatcattctcacttctctggaagcca

SEQ ID NO: 119965 - DNA, 1161 bp, Homo sapiens
  Payload ID: 3520
  Gene Symbol: CLTB
  Gene Name: clathrin, light chain B
  Uniprot ID: P09497
  ENST ID: ENST00000345807
  CDS Start-End: 207-842
ccgctcctcccgccgcggcgcccgcaccgcagtgacagccagccgggcccggtggcggagaggaagtgcggtccgcgccaagcccgtccccgccgacgccggctcccccgcggctcgggtgacagcgtcgcggccgccggacgcagcgcggggcaggcgcgggcagagccgagcgcagcggaggctccggcggaggcgcggggaaaatggctgatgactttggcttcttctcgtcgtcggagagcggtgccccggaggcggcggaggaggacccggcggccgccttcctggcccagcaggagagcgagattgcaggcatagagaacgacgagggcttcggggcacctgccggcagccatgcggcccccgcgcagccgggccccacgagtggggctggttctgaggacatggggaccacagtcaatggagatgtgtttcaggaggccaacggtcctgctgatggctacgcagccattgcccaggctgacaggctgacccaggagcctgagagcatccgcaagtggcgagaggagcagaggaaacggctgcaagagctggatgctgcatctaaggtcacggaacaggaatggcgggagaaggccaagaaggacctggaggagtggaaccagcgccagagtgaacaagtagagaagaacaagatcaacaaccgggcatccgaggaggctttcgtgaaggaatccaaggaggagaccccaggcacagagtgggagaaggtggcccagctatgtgacttcaaccccaagagcagcaagcagtgcaaagatgtgtcccgcctgcgctcggtgctcatgtccctgaagcagacgccactgtcccgctaggtgcctgctaggtgcatggccacagagcatgggctgggcctgggcacaggaggagcagctgctttggtcggggtggagactcgcagcagctgctacccacagcctattccactcctccccatctccaggcgctgggaggggggccctcaccccatcacgcctcgctccctcctggccctctggtccagcccctcacgcctcctctcagtctactcaattgtgactgtccctcctgatgtattttttttcttggcttaaagggtgtgttgttgactctttttacacttatttattatcattctcacttctctggaagcca

SEQ ID NO: 119966 - DNA, 1489 bp, Homo sapiens
  Payload ID: 3520
  Gene Symbol: CLTB
  Gene Name: clathrin, light chain B
  ENST ID: ENST00000510734
  CDS Start-End: 177-581
agtgacagccagccgggcccggtggcggagaggaagtgcggtccgcgccaagcccgtccccgccgacgccggctcccccgcggctcgggtgacagcgtcgcggccgccggacgcagcgcggggcaggcgcgggcagagccgagcgcagcggaggctccggcggaggcgcggggaaaatggctgatgactttggcttcttctcgtcgtcggagagcggtgccccggaggcggcggaggaggacccggcggccgccttcctggcccagcaggagagcgagattgcaggcatagagaacgacgagggcttcggggcacctgccggcagccatgcggcccccgcgcagccgggccccacgagtggggctggttctgaggacatggggaccacagtcaatggagatgtgtttcagcccgtgcaccaccagcgggtccagctacaaacccagttgccaatacagcctaaggacgagcctgcccacaactattccagttccatttggcacagccaggggcagggacagaagggccctgcaggactccgcctccccacctctgcacagatcctctctcctttcccctaatactcccatcatcctccttttagcttcttagaggaatcagcagctcagcttagcttagatttagctgatcaatcccaaagaaggatgtggctcatcctcttggccatccctggagtcgcagcacacgcttggctggtgtgggtccacagaggttctcatgggtgggcccagcagaggggcccctcaggagagggattctagggagctagactgagacaagcctggccctgactgtcgcctcctgccttctggtcctggccattcctgcccctttctctctccagagcttgggaggagtcagaacattgctctagccgctggtgatctctcctggttgccaaccctcctggccatgactgatctccccactgagatgctcaggaggccaacggtcctgctgatggctacgcagccattgcccaggctgacaggctgacccaggagcctgagagcatccgcaagtggcgagaggagcagaggaaacggctgcaagagctggatgctgcatctaaggtcacggaacaggaatggcgggagaaggccaagaaggacctggaggagtggaaccagcgccagagtgaacaagtagagaagaacaagatcaacaaccgggcatccgaggaggctttcgtgaaggaatccaaggaggagaccccaggcacagagtgggagaaggtggcccagctatgtgacttcaaccccaagagcagcaagcagtgcaaagatgtgtcccgcctgcgctcggtgctcatgtccctgaagcagacgccactgtcccgctaggtgcctgctaggtgcatggccacagagcatgggctgggcctgggcacaggaggagcagctgctttggtcggggtggagactcgcagcagctgctacccacagcctattccactcctccccatctc

SEQ ID NO: 119967 - DNA, 527 bp, Homo sapiens
  Payload ID: 3520
  Gene Symbol: CLTB
  Gene Name: clathrin, light chain B
  ENST ID: ENST00000508425
  CDS Start-End: 1-246
attgcaggcatagagaacgacgagggcttcggggcacctgccggcagccatgcggcccccgcgcagccgggccccacgagtggggctggttctgaggacatggggaccacagtcaatggagatgtgtttcaggaggccaacggtcctgctgatggctacgcagccattgcccaggctgacaggctgacccaggagcctgagagcatccgcaagtggcgagaggagcagaggaaacggctttcgtgaaggaatccaaggaggagaccccaggcacagagtgggagaaggtggcccagctatgtgacttcaaccccaagagcagcaagcagtgcaaagatgtgtcccgcctgcgctcggtgctcatgtccctgaagcagacgccactgtcccgctaggtgcctgctaggtgcatggccacagagcatgggctgggcctgggcacaggaggagcagctgctttggtcggggtggagactcgcagcagctgctacccacagcctattccactcctccccatctccaggcgc

SEQ ID NO: 119968 - DNA, 552 bp, Homo sapiens
  Payload ID: 3520
  Gene Symbol: CLTB
  Gene Name: clathrin, light chain B
  ENST ID: ENST00000502877
  CDS Start-End: 176-552
gtgacagccagccgggcccggtggcggagaggaagtgcggtccgcgccaagcccgtccccgccgacgccggctcccccgcggctcgggtgacagcgtcgcggccgccggacgcagcgcggggcaggcgcgggcagagccgagcgcagcggaggctccggcggaggcgcggggaaaatggctgatgactttggcttcttctcgtcgtcggagagcggtgccccggaggcggcggaggaggacccggcggccgccttcctggcccagcaggagagcgagattgcaggcatagagaacgacgagggcttcggggcacctgccggcagccatgcggcccccgcgcagccgggccccacgagtggggctggttctgaggacatggggaccacagtcaatggagatgtgtttcaggaggctttcgtgaaggaatccaaggaggagaccccaggcacagagtgggagaaggtggcccagctatgtgacttcaaccccaagagcagcaagcagtgcaaagatgtgtcccgcctgcgctcggtgctcatgtccctgaagca

SEQ ID NO: 119969 - DNA, 3481 bp, Homo sapiens
  Payload ID: 3521
  Gene Symbol: CLDN1
  Gene Name: claudin 1
  Uniprot ID: O95832
  ENST ID: ENST00000295522
  CDS Start-End: 270-905
ctttaaatcgcggcgcccagcggttctgcgtctcagttcccgagcctgggagcaaccgcagcttctagtatccagactccagcgccgccccgggcgcggaccccaaccccgacccagagcttctccagcggcggcgcagcgagcagggctccccgccttaacttcctccgcggggcccagccaccttcgggagtccgggttgcccacctgcaaactctccgccttctgcacctgccacccctgagccagcgcgggcgcccgagcgagtcatggccaacgcggggctgcagctgttgggcttcattctcgccttcctgggatggatcggcgccatcgtcagcactgccctgccccagtggaggatttactcctatgccggcgacaacatcgtgaccgcccaggccatgtacgaggggctgtggatgtcctgcgtgtcgcagagcaccgggcagatccagtgcaaagtctttgactccttgctgaatctgagcagcacattgcaagcaacccgtgccttgatggtggttggcatcctcctgggagtgatagcaatctttgtggccaccgttggcatgaagtgtatgaagtgcttggaagacgatgaggtgcagaagatgaggatggctgtcattgggggtgcgatatttcttcttgcaggtctggctattttagttgccacagcatggtatggcaatagaatcgttcaagaattctatgaccctatgaccccagtcaatgccaggtacgaatttggtcaggctctcttcactggctgggctgctgcttctctctgccttctgggaggtgccctactttgctgttcctgtccccgaaaaacaacctcttacccaacaccaaggccctatccaaaacctgcaccttccagcgggaaagactacgtgtgacacagaggcaaaaggagaaaatcatgttgaaacaaaccgaaaatggacattgagatactatcattaacattaggaccttagaattttgggtattgtaatctgaagtatggtattacaaaacaaacaaacaaacaaaaaacccatgtgttaaaatactcagtgctaaacatggcttaatcttattttatcttctttcctcaatataggagggaagatttttccatttgtattactgcttcccattgagtaatcatactcaactgggggaaggggtgctccttaaatatatatagatatgtatatatacatgtttttctattaaaaatagacagtaaaatactattctcattatgttgatactagcatacttaaaatatctctaaaataggtaaatgtatttaattccatattgatgaagatgtttattggtatattttctttttcgtctatatatacatatgtaacagtcaaatatcatttactcttcttcattagctttgggtgcctttgccacaagacctagcctaatttaccaaggatgaattctttcaattcttcatgcgtgcccttttcatatacttattttattttttaccataatcttatagcacttgcatcgttattaagcccttatttgttttgtgtttcattggtctctatctcctgaatctaacacatttcatagcctacattttagtttctaaagccaagaagaatttattacaaatcagaactttggaggcaaatctttctgcatgaccaaagtgataaattcctgttgaccttcccacacaatccctgtactctgacccatagcactcttgtttgctttgaaaatatttgtccaattgagtagctgcatgctgttcccccaggtgttgtaacacaactttattgattgaatttttaagctacttattcatagttttatatccccctaaactacctttttgttccccattccttaattgtattgttttcccaagtgtaattatcatgcgttttatatcttcctaataaggtgtggtctgtttgtctgaacaaagtgctagactttctggagtgataatctggtgacaaatattctctctgtagctgtaagcaagtcacttaatctttctacctcttttttctatctgccaaattgagataatgatacttaaccagttagaagaggtagtgtgaatattaattagtttatattactctcattctttgaacatgaactatgcctatgtagtgtctttatttgctcagctggctgagacactgaagaagtcactgaacaaaacctacacacgtaccttcatgtgattcactgccttcctctctctaccagtctatttccactgaacaaaacctacacacataccttcatgtggttcagtgccttcctctctctaccagtctatttccactgaacaaaacctacgcacataccttcatgtggctcagtgccttcctctctctaccagtctatttccattctttcagctgtgtctgacatgtttgtgctctgttccattttaacaactgctcttacttttccagtctgtacagaatgctatttcacttgagcaagatgatgtaatggaaagggtgttggcattggtgtctggagacctggatttgagtcttggtgctatcaatcaccgtctgtgtttgagcaaggcatttggctgctgtaagcttattgcttcatctgtaagcggtggtttgtaattcctgatcttcccacctcacagtgatgttgtggggatccagtgagatagaatacatgtaagtgtggttttgtaatttaaaaagtgctatactaagggaaagaattgaggaattaactgcatacgttttggtgttgcttttcaaatgtttgaaaacaaaaaaaatgttaagaaatgggtttcttgccttaaccagtctctcaagtgatgagacagtgaagtaaaattgagtgcactaaacaaataagattctgaggaagtcttatcttctgcagtgagtatggcccgatgctttctgtggctaaacagatgtaatgggaagaaataaaagcctacgtgttggtaaatccaacagcaagggagatttttgaatcataataactcataaggtgctatctgttcagtgatgccctcagagctcttgctgttagctggcagctgacgctgctaggatagttagtttggaaatggtacttcataataaactacacaaggaaagtcagccactgtgtcttatgaggaattggacctaataaattttagtgtgccttccaaacctgagaatatatgcttttggaagttaaaatttaaatggcttttgccacatacatagatcttcatgatgtgtgagtgtaattccatgtggatatcagttaccaaacattacaaaaaaattttatggcccaaaatgaccaacgaaattgttacaatagaatttatccaattttgatctttttatattcttctaccacacctggaaacagaccaatagacattttggggttttataataggaatttgtataaagcattactctttttcaataaattgttttttaatttaaaaaaaggatta

SEQ ID NO: 119970 - DNA, 949 bp, Homo sapiens
  Payload ID: 3522
  Gene Symbol: CLDN10
  Gene Name: claudin 10
  Uniprot ID: P78369
  ENST ID: ENST00000299339
  CDS Start-End: 30-716
ggagagcgagcgcggctgcagccggcggcatggctagcacggcttcggagatcatcgccttcatggtctccatctcaggctgggtactggtgtcctccacgctgcccaccgactactggaaggtgtctaccatcgacggcacggtcatcacaaccgccacctattgggccaacctgtggaaggcgtgcgttaccgactccacgggcgtctccaactgcaaggacttcccctccatgctggcgctggacggttatatacaggcatgtagaggacttatgatcgctgctgtcagcctgggcttctttggttccatatttgcgctctttggaatgaagtgtaccaaagtcggaggctccgataaagccaaagctaaaattgcttgtttggctgggattgtattcatactgtcagggctgtgctcaatgactggatgttccctatatgcaaacaaaatcacaacggaattctttgatcctctctttgttgagcaaaagtatgaattaggagccgctctgtttattggatgggcaggagcctcactgtgcataattggtggtgtcatattttgcttttcaatatctgacaacaacaaaacacccagatacacatacaacggggccacatctgtcatgtcttctcggacaaagtatcatggtggagaagattttaaaacaacaaacccttcaaaacagtttgataaaaatgcttatgtctaaaagagctcgctggcaagctgcctcttgagtttgttataaaagcgaactgttcacaaaatgatcccatcaaggccctcccataattaacactcaaaactatttttaaaatatgcatttgaagcatctgttgattgtatggatgtaagtgttcttacatagttagttatatactaatcattttctgttgtggctttctataaaaaataaacagtttatttacaggatttgtaaaa

SEQ ID NO: 119971 - DNA, 701 bp, Homo sapiens
  Payload ID: 3522
  Gene Symbol: CLDN10
  Gene Name: claudin 10
  ENST ID: ENST00000376855
  CDS Start-End: 9-230
gaggacttatgatcgctgctgtcagcctgggcttctttggttccatatttgcgctctttggaatgaagtgtaccaaagtcggaggctccgataaagccaaagctaaaattgcttgtttggctgggattgtattcatactgtcagggctgtgctcaatgactggatgttccctatatgcaaacaaaatcacaacggaattctttgatcctctctttgttgagcaaaagtaagtactcttctcagtctgtttccagctcacaggaagtgtatataaattaatattctcaaccaagagacatgaatttcctatatgacttttgaaagtaagacatactgataaatggtaactgatgacatcattcaagattaaatgtgtcatatgccacatacgcaaaatatgcatttaattagtttgctagtgttgcagtgtcttgtctcgaaacagttcaaggcatcaaatttagaactataaacttcatcgtttgctgtacatcatgaaactgaggtcaagtagaggaaacgtgaaaggtgtcagacggagaggaaagaatgatgcggtgtgcgaatagaaaattaaaaccttgccttgattgttgcccactcaaaatgatatttgccagatgctagtttctgggtcttttaaatttgctgtattaactactgtcttaacaagctcctcctaataaacctttataaagaaa

SEQ ID NO: 119972 - DNA, 2656 bp, Homo sapiens
  Payload ID: 3522
  Gene Symbol: CLDN10
  Gene Name: claudin 10
  Uniprot ID: P78369
  ENST ID: ENST00000376873
  CDS Start-End: 231-911
atatccgtgtagaaaatcagaacgactctttcaggccatctttaaaatgtcattggtaaaccatacttgatcctaaattcctgtacttcctcaggccatccgagcatgaaacgctgtcacctacccacatccgctggctgtgacgcttgtcaaagtgttctctatcggctgcatgcctagaccaccaaagcgttctgaccggacagtgtcactggagaaggcggcgcgacatgtccagggcgcagatctgggctctggtgtctggtgtcggagggtttggagctctcgttgctgctaccacgtccaatgagtggaaagtgaccacgcgagcctcctcggtgataacagccacttgggtttaccagggtctgtggatgaactgcgcaggtaacgcgttgggttctttccattgccgaccgcattttactatcttcaaagtagcaggttatatacaggcatgtagaggacttatgatcgctgctgtcagcctgggcttctttggttccatatttgcgctctttggaatgaagtgtaccaaagtcggaggctccgataaagccaaagctaaaattgcttgtttggctgggattgtattcatactgtcagggctgtgctcaatgactggatgttccctatatgcaaacaaaatcacaacggaattctttgatcctctctttgttgagcaaaagtatgaattaggagccgctctgtttattggatgggcaggagcctcactgtgcataattggtggtgtcatattttgcttttcaatatctgacaacaacaaaacacccagatacacatacaacggggccacatctgtcatgtcttctcggacaaagtatcatggtggagaagattttaaaacaacaaacccttcaaaacagtttgataaaaatgcttatgtctaaaagagctcgctggcaagctgcctcttgagtttgttataaaagcgaactgttcacaaaatgatcccatcaaggccctcccataattaacactcaaaactatttttaaaatatgcatttgaagcatctgttgattgtatggatgtaagtgttcttacatagttagttatatactaatcattttctgttgtggctttctataaaaaataaacagtttatttacaggatttgtaaaatgttttctacatttatatagaacatgaaaagcatttagtaccaaaggttcaagaagtattcgtactctagcctttttaatcattcatagatagaagtctttgtacccactccttatgtttcttttcattcataaacaggtgtataaggaacaatgtcttataaacagcatgggggcaatctgagaatattcctcaaaaggtgtccaggttaaatagacatgttactggctgcacacaggcaaattctagtttgttttttttaagtattctacaacatttatttaaaaaggtaaatctttttgttgaagcagcaagttatctggtagaacttaacttctacaggatcagagaggatcttgctcattcatggccatatccacatgcccatggccactcagtagattgttgaaaaagcaaagccacaccattctctttgatgtatgcagagagttacgtagcaggggatgttctctgatttattccactggcaccattagtgaatatttagttgttttcataaacgatgctgtgatgaagactcatgtacatatttagcaaattttggtttcttacatgtgcctgtcatgactgtaattcattatgactgctccaggaagggctaatggggccaatatattattgcctgtcatgtggcacatccatgttaaggggctgaggcgtccctggcacggaatgcagagccctgagctagggcatcagcagaagctgagatagagatattggtcatggttgactgaggagccaattaaaacctgtttatgcctagtgttccattattggaacactaagcatgtgggagttatttatatcctactgctcaaggtcatcgccaaggtgtgattggaaaaattcaaaaaattgcaacctcaggcataaatgggttaaggacatcccaagcccaagtggtacgtgcctcactcagaactgacgggccgagttctatctaggtgtgtcttccagaacctgtttacggctaactggataactgagagacttgtcatttctaaagacatttaagttgctccagggatttctgaaaaaagacacaggcttcttcctagagccagccctatataacatgcccacaagggcaacagttatcacagttcatacacacctttcatgtcctgtctcactcactcctcacagccatcctaggagatacatattgttttcatcctgcatttacagaaaaagaaatgaaaacagagagcttaaataatttgccacagtaatgtcgaaactaggcctttgaaccaaggcagtctagggtaaaatatagtttcaaagtatgaataagaattggtatttgtgttatctttgagtaagaaactgtccgatatgaatcacaacgtgggtgaatgtagtattttcctgaagtgtgaaagacttaaaaaaaagaatcacattgttcagaggtgctcaatggaaagaaaaggaaatgaacaagtttgttaaaagataaaaaataaaaaaaattccataccttga

SEQ ID NO: 119973 - DNA, 2169 bp, Homo sapiens
  Payload ID: 3523
  Gene Symbol: CLDN11
  Gene Name: claudin 11
  Uniprot ID: O75508
  ENST ID: ENST00000064724
  CDS Start-End: 203-826
agcagcgctgctgtccccgccgtgcgcccttcgccgctgagctcgcagcctccggcgcccacctccacctccagtgtcccgcctcgggccgtcgccctccagcggctcgcgagcgtgggagacgtacctgggcaggcactgtccagcccaggcccaggcacagccgtgaggggcgaggcacggggacatcctggcggccaccatggtggccacgtgcctgcaggtggtgggcttcgtcacgagcttcgtgggctggatcggggtcatcgtgaccacctccaccaatgactgggtggtgacctgcggctacaccatccccacctgccgcaagctggatgagctgggctccaaggggctgtgggccgactgcgtcatggccacggggctgtaccactgcaagcccctggtggacatcctcatcctgccgggctacgtgcaggcctgccgcgccctgatgattgctgcctcggtcctgggtctgccggccattttactgctgctgactgttcttccctgcatccggatgggccaggagcccggtgtggctaagtacaggcgggcccagctggctggtgttttgctcattctgctggctctctgcgcccttgttgccaccatctggttccctgtgtgcgcccaccgtgagaccaccatcgtgagctttggctactccctgtatgcaggctggattggtgctgtgctgtgcctcgtgggtggctgtgtcatcctctgctgcgctggagatgcccaggcctttggtgaaaaccgtttctactacactgcgggctctagctccccgactcatgcgaagagtgcccacgtataagagggctgcccggctgcccacagaggtgctgtagatgctgggcccagggccctaggtttgctcgtcacagtgtggggaagcccattcctctgccaggctctaaagccaaaggtctagaaaagcatcctgtctggcattttgtagtcttaacttctccccatttcccccatcttttggttgccttaaaagaaatctctagctcagataatgcccagacatttttttcccttggtgttgcccctattagctcttttcttgggcattcttttgctgtttattaaaaatatattatatatattttgtttctttaaatttcaaatgttttgcaaacatcactgagttaggtgggggtggggaagagaaatacaagatacttttttttttttttttttttttttttttttaaatagggcctcactctgttgctcaggctggagtgcggtggtgtgatctcggctcatgtagcctcaacctccccggctcaagtgatcctcctgcctcagcctcccaagtagctgggactacaggcgttcactactacacccagctaatttttaagttttttatagagatgagggctccctatgttgcccaggttggtctcgaactcctggactcaaagtatcctcccgcctcggcctcccaaagtgttgggattataggagtgagccaccacaccggccaagatgcttttcaaactgatacagatgacaatgggagcctcataaagatggcttttgtttcttcccttcaaggtcatttacttgtacgagacagaaaaagatagcattggggacatgggatgggggagggagggcaatagtggaacgaactttccatgggaaactttcccttttgtaagttgagggccaggggtagggatattttttagtttgtgattttacatttatctgtacatactttttcaagattgatcatttttataaccatggttttcctgaaatcctcaattcatcaatatgaaggaaatgaaccacatagactttatgcaataaataacagtgcaagtgagtataactctaactgatgttccacaaaacatttttgatttcaggtttgtatgatgtagtttttaatcgtacattttcatatgcttcaaactaacacatttttaaagctttcccccacttttctctctatttgtattgttagccatcttgaagtgatgttgtttaacataaattgtactgttgaatttggctttacgggtgtaaacactgatggtatatcagtatctgagaccccaaactctccaaatactgatggtgcattttattcttgaagtgaaatctgtgcaataaaataacagactgtctgcaaaa

SEQ ID NO: 119974 - DNA, 1139 bp, Homo sapiens
  Payload ID: 3523
  Gene Symbol: CLDN11
  Gene Name: claudin 11
  ENST ID: ENST00000486975
  CDS Start-End: 200-697
agcgctgctgtccccgccgtgcgcccttcgccgctgagctcgcagcctccggcgcccacctccacctccagtgtcccgcctcgggccgtcgccctccagcggctcgcgagcgtgggagacgtacctgggcaggcactgtccagcccaggcccaggcacagccgtgaggggcgaggcacggggacatcctggcggccaccatggtggccacgtgcctgcaggtggtgggcttcgtcacgagcttcgtgggctggatcggggtcatcgtgaccacctccaccaatgactgggtggtgacctgcggctacaccatccccacctgccgcaagctggatgagctgggctccaaggggctgtgggccgactgcgtcatggccacggggctgtaccactgcaagcccctggtggacatcctcatcctgccgggctacgtgcaggcctgccgcgccctgatgattgctgcctcggtcctgggtctgccggccattttactgctgctgactgttcttccctgcatccggatgggccaggagcccggtgtggctaagtacaggcgggcccagctggctggtgttttgctcattctgctgggctgtcagcttctttgggcaaagactgagtcatctctgcattctcagcacctggtgcaatttaagcagaaatatcttgaagatttttcgtatcttcagggagattaggaatgggaatggaatgggaacgccaatgcaggaaggatgagaagtctgcagatgcctccaaggagtccgaaaccaagtccgaagtcaacgacaagcaatgatggcgatggcgatcctagttaataaaaaggggggagatgtgggctgcaagccacccaggtgccgaggcaagagaccgaggacatgagctgttccagtataataaaatataaaacaagaatagttataccagatatagatcttagatatgattatatatgaatataattaatcattagtttgtggcaattactctttattccaatattataataatcctcgctctataatcataacctaggaaaaaccaggccatacagagataggagctgaggggacatagtgaggagtgaccagaagacaagagtgcgagccttctgttatgcccagacagggccaccag

SEQ ID NO: 119975 - DNA, 3565 bp, Homo sapiens
  Payload ID: 3524
  Gene Symbol: CLDN12
  Gene Name: claudin 12
  Uniprot ID: P56749
  ENST ID: ENST00000287916
  CDS Start-End: 288-1022
gccatccagggcattgccgttcagggccacgggaaaacctgactgcgctcccagaagcctccggtgtacctcgctgggaacgcacttcctgggacgctgagagggagacgctccaagaggctcctcagtgtgggcgagtaaaatgccctgcgtgtgagaagcaggctcagattattgctactctgtattcagatcttcatgtgtctcttctaagctgaataaagctgttttggaactgtcaggtacctcaaagctctgactgacagtactccacaagcttgcctgccatgggctgtcgggatgtccacgcagccacagtcctttccttcctgtgtggaatcgcctcagtagcaggcctctttgcagggactctgcttcccaactggagaaaattacgattgatcacattcaacagaaacgagaagaacctgactgtttacacaggcctgtgggtgaaatgtgcccggtatgacgggagcagtgactgcctgatgtacgacactacttggtactcatcagttgaccagctggacctgcgtgtcctccagtttgccctacccctcagcatgctgatcgccatgggtgccctgctgctctgcctgattggaatgtgcaacactgccttcaggtcctcggtgcccaacatcaaactggccaagtgtctggtcaatagtgcaggttgccacctggtggctgggctgctatttttcctggcaggtactgtgagcctctccccatctatctgggtcatcttttataacatccatctgaacaagaagtttgagccagtcttttcatttgactatgcagtgtatgtcactattgctagtgctgggggcctgtttatgacttcccttatactatttatttggtattgtacatgcaaatctttgccttctcctttctggcaaccattgtactcccatccacccagtatgcatacttactcacagccctattcagcacgctctcgcctctctgccattgaaattgacattccagtagtttcacacaccacttaatggggaaatagttaattgttaaagaaaacttcttgtagcctcacattccccttgtgcaaagagctcttttggacctacatacattttcctttgtttttgaccaatcaatgaagccaaatttatatgtcctagtagaatgaagtgctgctagtttttatgagaagtatattatattaaatgtgaattttttaaattttgcttcttatactggaaggaattttagccttcatattgatatctaattaattatttaagtggaagaggcctgcatcacaattgaggtaatgtagagcaacatgttaaagaatgatggttagcagaagctgttgtatacaatcttcatgaaaatttcagtgtgtatttttctttttctataatacctttaactgcaaagaaaaggcagtttcaaatataagaaatttatttcaggtaagggtaatattttaatagtagtcaataatctagcttaaggctgtaactcttctatcggggctaattgtatgaataggtgtcagtatgttgaagattactttcttttgtgactttcttctacctcatgccactgtttaaaagtaaaacgtattttaacgatgttagaataagactaccattctaaatatcacctacttatgaataacatgtaataatttttaacattaatgattccataaattgtattattgggattagaatgtgctttatgacaggttagtgtttcctctgaggcagaaaactcttttttggagatatcttccatcaagcagtactcgtgcccatatacaatctcttagtggctaggagaaataaataaaagggccataatggtttgttctctttcagacataatttagtaggggacaagaagtctgttcttcagtgagtacactagagatttactctggtgactgccttttgagttatgggtgaagtaaggtatggctttaccataaccttgattcattcacccttgattcatttctcgcccccgtcactgattatttccttgagcatatatctctgcctaacactttagtaggtgctatagaggatacatgaaaagtatgagatctggttccatccagtaagacattttaatagagaagatcaaaatgttacctggcagttggggaataatctgacttcgttggcagttggccttaacttcttaatcattgatccaggaatatttcaaccagagacacaactttctggcagacagacaaattgtacaacaccaacaatatcctggaccttgaaattctgtttacttcagtccattgtatcctttaaggcacctgtgctagcctagattttgtaataacactgatttatgagaatggacaaaagtggtagggaaattgttccctctccacttctgaaagtatgatgatgtattaaggatggaggagttattaaaaatgtctcttctgatgaggtaacaattagatgaaaccatgttaaagctgagatgaacacttagaaattcagggatattgggtctttagccttatgaatttgagctgcttatttaattggtgtaatttactacatattagtactatattcgtaaggattttttattaaccattacagattttacaaacagctagttatatggtaaacagattattatgcctttttgcaattctgaatatgattctagtatttgtgtagatgtatttggtactttttcccctaattccaacactagtttatatatatagcgaataaatctagttgtataaatttttaaatgccgtcagtagaaagcacacaaggttatgatttttttaattactggcttctgatttctttcacttctgatccttttcctttttctcagatgtagctgagtcttgatcattttaagacaacgatgggtagaattttgagattaatgttaattttccctttttgttaatttcagtcccctctcactatgcttttgtccagaaggatcaagaattctaccatcccttgggtctttgtgtataaacaatgttaaataaaggtagactcagtctttaagatattagacagtttttttagtccatgggattgtaaatataaacattaactttcctataagaatattttggctttgtaatctatagcctcaaattggtatttattatggattcactagacaaacagctgtttccttattgtcttttttctttagtgtttctgatttgctatcagtagctgtttttaaagccgtccaaggaaaataattatttacagtttttgaagtcacttttgagccctcatcaagctctcattgtgatgggagggatacctttttgttgttaaaagcctattattgttaaaggccttttatggaaaccaacttggaaaacaaccttaaatgtggatgtatcagatttggtttatccagccatgggagagaaaacaaacctaagtttactttacttgtacatatacactacaatggatagtatatttgctgtaaactacaatgtaaaacctcaataaaagtgcgctgtacttcttaatgtttattaaaagatgtatttttacaa

SEQ ID NO: 119976 - DNA, 846 bp, Homo sapiens
  Payload ID: 3524
  Gene Symbol: CLDN12
  Gene Name: claudin 12
  ENST ID: ENST00000394604
  CDS Start-End: 285-846
ggtgtacctcgctgggaacgcacttcctgggacgctgagagggagacgctccaagaggctcctcagtgtgggcgagtaaaatgccctgcgtgtgagaagcaggctcagattattgctactctgtattcagatcttcatgtgtctcttctaagctgaataaagctgttttggaactgtcaggtacctcaaagcgtaaatgaagaaaacgaggcacagggaagttctgaatctggcccaaggtcagtgagctatctgactgacagtactccacaagcttgcctgccatgggctgtcgggatgtccacgcagccacagtcctttccttcctgtgtggaatcgcctcagtagcaggcctctttgcagggactctgcttcccaactggagaaaattacgattgatcacattcaacagaaacgagaagaacctgactgtttacacaggcctgtgggtgaaatgtgcccggtatgacgggagcagtgactgcctgatgtacgacactacttggtactcatcagttgaccagctggacctgcgtgtcctccagtttgccctacccctcagcatgctgatcgccatgggtgccctgctgctctgcctgattggaatgtgcaacactgccttcaggtcctcggtgcccaacatcaaactggccaagtgtctggtcaatagtgcaggttgccacctggtggctgggctgctatttttcctggcaggtactgtgagcctctccccatctatctgggtcatcttttataacatccatctgaacaagaagtttgagccagtcttttcatttgactatgcagtgtatgtcactattgctagtgctgggggcctgtttatga

SEQ ID NO: 119977 - DNA, 3488 bp, Homo sapiens
  Payload ID: 3524
  Gene Symbol: CLDN12
  Gene Name: claudin 12
  Uniprot ID: P56749
  ENST ID: ENST00000394605
  CDS Start-End: 211-945
gcacttcctgggacgctgagagggagacgctccaagaggctcctcagtgtgggcgagtaaaatgccctgcgtgtgagaagcaggctcagattattgctactctgtattcagatcttcatgtgtctcttctaagctgaataaagctgttttggaactgtcaggtacctcaaagcgtaatctgactgacagtactccacaagcttgcctgccatgggctgtcgggatgtccacgcagccacagtcctttccttcctgtgtggaatcgcctcagtagcaggcctctttgcagggactctgcttcccaactggagaaaattacgattgatcacattcaacagaaacgagaagaacctgactgtttacacaggcctgtgggtgaaatgtgcccggtatgacgggagcagtgactgcctgatgtacgacactacttggtactcatcagttgaccagctggacctgcgtgtcctccagtttgccctacccctcagcatgctgatcgccatgggtgccctgctgctctgcctgattggaatgtgcaacactgccttcaggtcctcggtgcccaacatcaaactggccaagtgtctggtcaatagtgcaggttgccacctggtggctgggctgctatttttcctggcaggtactgtgagcctctccccatctatctgggtcatcttttataacatccatctgaacaagaagtttgagccagtcttttcatttgactatgcagtgtatgtcactattgctagtgctgggggcctgtttatgacttcccttatactatttatttggtattgtacatgcaaatctttgccttctcctttctggcaaccattgtactcccatccacccagtatgcatacttactcacagccctattcagcacgctctcgcctctctgccattgaaattgacattccagtagtttcacacaccacttaatggggaaatagttaattgttaaagaaaacttcttgtagcctcacattccccttgtgcaaagagctcttttggacctacatacattttcctttgtttttgaccaatcaatgaagccaaatttatatgtcctagtagaatgaagtgctgctagtttttatgagaagtatattatattaaatgtgaattttttaaattttgcttcttatactggaaggaattttagccttcatattgatatctaattaattatttaagtggaagaggcctgcatcacaattgaggtaatgtagagcaacatgttaaagaatgatggttagcagaagctgttgtatacaatcttcatgaaaatttcagtgtgtatttttctttttctataatacctttaactgcaaagaaaaggcagtttcaaatataagaaatttatttcaggtaagggtaatattttaatagtagtcaataatctagcttaaggctgtaactcttctatcggggctaattgtatgaataggtgtcagtatgttgaagattactttcttttgtgactttcttctacctcatgccactgtttaaaagtaaaacgtattttaacgatgttagaataagactaccattctaaatatcacctacttatgaataacatgtaataatttttaacattaatgattccataaattgtattattgggattagaatgtgctttatgacaggttagtgtttcctctgaggcagaaaactcttttttggagatatcttccatcaagcagtactcgtgcccatatacaatctcttagtggctaggagaaataaataaaagggccataatggtttgttctctttcagacataatttagtaggggacaagaagtctgttcttcagtgagtacactagagatttactctggtgactgccttttgagttatgggtgaagtaaggtatggctttaccataaccttgattcattcacccttgattcatttctcgcccccgtcactgattatttccttgagcatatatctctgcctaacactttagtaggtgctatagaggatacatgaaaagtatgagatctggttccatccagtaagacattttaatagagaagatcaaaatgttacctggcagttggggaataatctgacttcgttggcagttggccttaacttcttaatcattgatccaggaatatttcaaccagagacacaactttctggcagacagacaaattgtacaacaccaacaatatcctggaccttgaaattctgtttacttcagtccattgtatcctttaaggcacctgtgctagcctagattttgtaataacactgatttatgagaatggacaaaagtggtagggaaattgttccctctccacttctgaaagtatgatgatgtattaaggatggaggagttattaaaaatgtctcttctgatgaggtaacaattagatgaaaccatgttaaagctgagatgaacacttagaaattcagggatattgggtctttagccttatgaatttgagctgcttatttaattggtgtaatttactacatattagtactatattcgtaaggattttttattaaccattacagattttacaaacagctagttatatggtaaacagattattatgcctttttgcaattctgaatatgattctagtatttgtgtagatgtatttggtactttttcccctaattccaacactagtttatatatatagcgaataaatctagttgtataaatttttaaatgccgtcagtagaaagcacacaaggttatgatttttttaattactggcttctgatttctttcacttctgatccttttcctttttctcagatgtagctgagtcttgatcattttaagacaacgatgggtagaattttgagattaatgttaattttccctttttgttaatttcagtcccctctcactatgcttttgtccagaaggatcaagaattctaccatcccttgggtctttgtgtataaacaatgttaaataaaggtagactcagtctttaagatattagacagtttttttagtccatgggattgtaaatataaacattaactttcctataagaatattttggctttgtaatctatagcctcaaattggtatttattatggattcactagacaaacagctgtttccttattgtcttttttctttagtgtttctgatttgctatcagtagctgtttttaaagccgtccaaggaaaataattatttacagtttttgaagtcacttttgagccctcatcaagctctcattgtgatgggagggatacctttttgttgttaaaagcctattattgttaaaggccttttatggaaaccaacttggaaaacaaccttaaatgtggatgtatcagatttggtttatccagccatgggagagaaaacaaacctaagtttactttacttgtacatatacactacaatggatagtatatttgctgtaaactacaatgtaaaacctcaataaaagtgcgctgtacttcttaatgtttattaaaagatgtatttttacaa

SEQ ID NO: 119978 - DNA, 618 bp, Homo sapiens
  Payload ID: 3524
  Gene Symbol: CLDN12
  Gene Name: claudin 12
  ENST ID: ENST00000427904
  CDS Start-End: 240-618
gttccgatttctgggtcttttgcataagtaactgaggattttatgtaaaatggctaaatccaggagaatcaggagcgttggaaaacgctgaccacatctgtggatgtgaaaattgagctcagattattgctactctgtattcagatcttcatgtgtctcttctaagctgaataaagctgttttggaactgtcaggtacctcaaagctctgactgacagtactccacaagcttgcctgccatgggctgtcgggatgtccacgcagccacagtcctttccttcctgtgtggaatcgcctcagtagcaggcctctttgcagggactctgcttcccaactggagaaaattacgattgatcacattcaacagaaacgagaagaacctgactgtttacacaggcctgtgggtgaaatgtgcccggtatgacgggagcagtgactgcctgatgtacgacactacttggtactcatcagttgaccagctggacctgcgtgtcctccagtttgccctacccctcagcatgctgatcgccatgggtgccctgctgctctgcctgattggaatgtgcaacactgccttcaggtcctcggtgcccaacatcaaactggccaagtgtctgg

SEQ ID NO: 119979 - DNA, 1163 bp, Homo sapiens
  Payload ID: 3524
  Gene Symbol: CLDN12
  Gene Name: claudin 12
  ENST ID: ENST00000416322
  CDS Start-End: 637-1163
caatggtggtttcattcagagtctagtagagaacctcatgcacaaatgaggaaaagtagggtgtatgattttctgcatttatttgaaaaaaacatgattccagagaggactgtagagttccaacatatcatccccatatctgcagttactggagaaggaatcgaagaattaaagaattgtataagaaagtcactggatgaacaggccaaccaggaaaatgatgcacttcataagaaacagttgcttaatttgtggatttctgatacaatgtcttctactgagccaccatcaaagcatgctgttactacttccaaaatggatataatttaaatatattaaaaatggtattgatggaacagtatttaatgcttaaaaacaaggaaatcctttcatctgtgacaacctggaggacatgctcagattattgctactctgtattcagatcttcatgtgtctcttctaagctgaataaagctgttttggaactgtcaggtacctcaaagcaacaaccctgcaaggttggcactgttattttttccatttcacagatgaagaaaacgaggcacagggaagttctgaatctggcccaaggtcagtgagctatctgactgacagtactccacaagcttgcctgccatgggctgtcgggatgtccacgcagccacagtcctttccttcctgtgtggaatcgcctcagtagcaggcctctttgcagggactctgcttcccaactggagaaaattacgattgatcacattcaacagaaacgagaagaacctgactgtttacacaggcctgtgggtgaaatgtgcccggtatgacgggagcagtgactgcctgatgtacgacactacttggtactcatcagttgaccagctggacctgcgtgtcctccagtttgccctacccctcagcatgctgatcgccatgggtgccctgctgctctgcctgattggaatgtgcaacactgccttcaggtcctcggtgcccaacatcaaactggccaagtgtctggtcaatagtgcaggttgccacctggtggctgggctgctatttttcctggcaggtactgtgagcctctccccatctatctgggtcatcttttataacatccatctgaacaagaagtttgagccagtcttttcatttgactatgcagtgta

SEQ ID NO: 119980 - DNA, 1098 bp, Homo sapiens
  Payload ID: 3524
  Gene Symbol: CLDN12
  Gene Name: claudin 12
  Uniprot ID: P56749
  ENST ID: ENST00000496677
  CDS Start-End: 364-1098
gcggcccagtggattctgggaattgtagtcccagccatccagggcattgccgttcagggccacgggaaaacctgactgcgctcccagaagcctccggtgtacctcgctgggaacgcacttcctgggacgctgagagggagacgctccaagaggctcctcagtgtgggcgagtaaaatgccctgcgtgtgagaagcaggctcagattattgctactctgtattcagatcttcatgtgtctcttctaagctgaataaagctgttttggaactgtcaggtacctcaaagcatgaagaaaacgaggcacagggaagttctgaatctggcccaagtctgactgacagtactccacaagcttgcctgccatgggctgtcgggatgtccacgcagccacagtcctttccttcctgtgtggaatcgcctcagtagcaggcctctttgcagggactctgcttcccaactggagaaaattacgattgatcacattcaacagaaacgagaagaacctgactgtttacacaggcctgtgggtgaaatgtgcccggtatgacgggagcagtgactgcctgatgtacgacactacttggtactcatcagttgaccagctggacctgcgtgtcctccagtttgccctacccctcagcatgctgatcgccatgggtgccctgctgctctgcctgattggaatgtgcaacactgccttcaggtcctcggtgcccaacatcaaactggccaagtgtctggtcaatagtgcaggttgccacctggtggctgggctgctatttttcctggcaggtactgtgagcctctccccatctatctgggtcatcttttataacatccatctgaacaagaagtttgagccagtcttttcatttgactatgcagtgtatgtcactattgctagtgctgggggcctgtttatgacttcccttatactatttatttggtattgtacatgcaaatctttgccttctcctttctggcaaccattgtactcccatccacccagtatgcatacttactcacagccctattcagcacgctctcgcctctctgccattgaaattgacattccagtagtttcacacaccacttaa

SEQ ID NO: 119981 - DNA, 1453 bp, Homo sapiens
  Payload ID: 3525
  Gene Symbol: CLDN14
  Gene Name: claudin 14
  Uniprot ID: O95500
  ENST ID: ENST00000342108
  CDS Start-End: 379-1098
ggggagggcaagctgggaaaagctgagagaggcaggcagcccagccaggcagaagtcacgagccaggcacctgccaagagagggagtaagatgttcaagaggagctccggaagaactttcagatatagcactggacttggctgaggacacagcagcacggggctgcaaggcccagagatctggacacaagccaagaagtcaagaactgttgaagccgcagtctccactctcctactgacaccagagaccacccagcccagccaaaccatatggcctcttgttttcctgatgtatgagggctccggctggcacctgaggagcggcgtgaccccgagggcccagggagctgcccggctggcctaggcaggcagccgcaccatggccagcacggccgtgcagcttctgggcttcctgctcagcttcctgggcatggtgggcacgttgatcaccaccatcctgccgcactggcggaggacagcgcacgtgggcaccaacatcctcacggccgtgtcctacctgaaagggctctggatggagtgtgtgtggcacagcacaggcatctaccagtgccagatctaccgatccctgctggcgctgccccaagacctccaggctgcccgcgccctcatggtcatctcctgcctgctctcgggcatagcctgcgcctgcgccgtcatcgggatgaagtgcacgcgctgcgccaagggcacacccgccaagaccacctttgccatcctcggcggcaccctcttcatcctggccggcctcctgtgcatggtggccgtctcctggaccaccaacgacgtggtgcagaacttctacaacccgctgctgcccagcggcatgaagtttgagattggccaggccctgtacctgggcttcatctcctcgtccctctcgctcattggtggcaccctgctttgcctgtcctgccaggacgaggcaccctacaggccctaccaggccccgcccagggccaccacgaccactgcaaacaccgcacctgcctaccagccaccagctgcctacaaagacaatcgggccccctcagtgacctcggccacgcacagcgggtacaggctgaacgactacgtgtgagtccccacagcctgcttctcccctgggctgctgtgggctgggtccccggcgggactgtcaatggaggcaggggttccagcacaaagtttacttctgggcaatttttgtatccaaggaaataatgtgaatgcgaggaaatgtctttagagcacagggacagagggggaaataagaggaggagaaagctctctataccaaagactgaaaaaaaaaatcctgtctgtttttgtatttattatatatatttatgtgggtgatttgataacaagtttaatataaagtgacttgggagtttggtcagtggggttggtttgtgatccaggaataaaccttgcggatgtggctgtttatgaaa

SEQ ID NO: 119982 - DNA, 1752 bp, Homo sapiens
  Payload ID: 3525
  Gene Symbol: CLDN14
  Gene Name: claudin 14
  Uniprot ID: O95500
  ENST ID: ENST00000399135
  CDS Start-End: 678-1397
cgccaggtggtggctcagaggaggacacagtcgctgtgggcaggtggtcagggcgcaggagggaatgagctgtggatttttagtaatctacaacaatcaggcagttccaggacacagggaagtgagtgtgaacagccaatggacccggagccgagagcctgggcaggcgtaggctggactatggacgccctgcaaccctgccaggctgggaaggggaggcttgatcctgagcgcgtgttaggaaggagatgcccaggttcaggtgtatcgtgcattttttttccacagtgcagaaatgacatttctggttggtcttgaatgtctgctctggccaagccacctcctctcatgctagctaaccaagtggcacgtgtgcccacgcaggccattctaaggaacactgtaattgtctagacaattttctctcaaatactccgtcctggaagcgtctggttggcagaagagggaaggcaggagggtggcagcgtcccggctgagtcctcttgcacatgggagctggagtccagccaggctccagagcggctccggctggcaagggacctgaacaggaagatgagactcgaggttttctgcatggctccggctggcacctgaggagcggcgtgaccccgagggcccagggagctgcccggctggcctaggcaggcagccgcaccatggccagcacggccgtgcagcttctgggcttcctgctcagcttcctgggcatggtgggcacgttgatcaccaccatcctgccgcactggcggaggacagcgcacgtgggcaccaacatcctcacggccgtgtcctacctgaaagggctctggatggagtgtgtgtggcacagcacaggcatctaccagtgccagatctaccgatccctgctggcgctgccccaagacctccaggctgcccgcgccctcatggtcatctcctgcctgctctcgggcatagcctgcgcctgcgccgtcatcgggatgaagtgcacgcgctgcgccaagggcacacccgccaagaccacctttgccatcctcggcggcaccctcttcatcctggccggcctcctgtgcatggtggccgtctcctggaccaccaacgacgtggtgcagaacttctacaacccgctgctgcccagcggcatgaagtttgagattggccaggccctgtacctgggcttcatctcctcgtccctctcgctcattggtggcaccctgctttgcctgtcctgccaggacgaggcaccctacaggccctaccaggccccgcccagggccaccacgaccactgcaaacaccgcacctgcctaccagccaccagctgcctacaaagacaatcgggccccctcagtgacctcggccacgcacagcgggtacaggctgaacgactacgtgtgagtccccacagcctgcttctcccctgggctgctgtgggctgggtccccggcgggactgtcaatggaggcaggggttccagcacaaagtttacttctgggcaatttttgtatccaaggaaataatgtgaatgcgaggaaatgtctttagagcacagggacagagggggaaataagaggaggagaaagctctctataccaaagactgaaaaaaaaaatcctgtctgtttttgtatttattatatatatttatgtgggtgatttgataacaagtttaatataaagtgacttgggagtttggtcagtggggttggtttgtgatccaggaataaaccttgcggatgtggctgtttatgaaa

SEQ ID NO: 119983 - DNA, 1330 bp, Homo sapiens
  Payload ID: 3525
  Gene Symbol: CLDN14
  Gene Name: claudin 14
  Uniprot ID: O95500
  ENST ID: ENST00000399136
  CDS Start-End: 256-975
agcggccatgagctggtgtgcagccgcccaggaggggggctgcaaggcccagagatctggacacaagccaagaagtcaagaactgttgaagccgcagtctccactctcctactgacaccagagaccacccagcccagccaaaccatatggcctcttgttttcctgatgtatgagggctccggctggcacctgaggagcggcgtgaccccgagggcccagggagctgcccggctggcctaggcaggcagccgcaccatggccagcacggccgtgcagcttctgggcttcctgctcagcttcctgggcatggtgggcacgttgatcaccaccatcctgccgcactggcggaggacagcgcacgtgggcaccaacatcctcacggccgtgtcctacctgaaagggctctggatggagtgtgtgtggcacagcacaggcatctaccagtgccagatctaccgatccctgctggcgctgccccaagacctccaggctgcccgcgccctcatggtcatctcctgcctgctctcgggcatagcctgcgcctgcgccgtcatcgggatgaagtgcacgcgctgcgccaagggcacacccgccaagaccacctttgccatcctcggcggcaccctcttcatcctggccggcctcctgtgcatggtggccgtctcctggaccaccaacgacgtggtgcagaacttctacaacccgctgctgcccagcggcatgaagtttgagattggccaggccctgtacctgggcttcatctcctcgtccctctcgctcattggtggcaccctgctttgcctgtcctgccaggacgaggcaccctacaggccctaccaggccccgcccagggccaccacgaccactgcaaacaccgcacctgcctaccagccaccagctgcctacaaagacaatcgggccccctcagtgacctcggccacgcacagcgggtacaggctgaacgactacgtgtgagtccccacagcctgcttctcccctgggctgctgtgggctgggtccccggcgggactgtcaatggaggcaggggttccagcacaaagtttacttctgggcaatttttgtatccaaggaaataatgtgaatgcgaggaaatgtctttagagcacagggacagagggggaaataagaggaggagaaagctctctataccaaagactgaaaaaaaaaatcctgtctgtttttgtatttattatatatatttatgtgggtgatttgataacaagtttaatataaagtgacttgggagtttggtcagtggggttggtttgtgatccaggaataaaccttgcggatgtggctgtttatgaaa

SEQ ID NO: 119984 - DNA, 1942 bp, Homo sapiens
  Payload ID: 3525
  Gene Symbol: CLDN14
  Gene Name: claudin 14
  Uniprot ID: O95500
  ENST ID: ENST00000399137
  CDS Start-End: 868-1587
cgccaggtggtggctcagaggaggacacagtcgctgtgggcaggtggtcagggcgcaggagggaatgagctgtggatttttagtaatctacaacaatcaggcagttccaggacacagggaagtgagtgtgaacagccaatggacccggagccgagagcctgggcaggcgtaggctggactatggacgccctgcaaccctgccaggctgggaaggggaggcttgatcctgagcgcgtgttaggaaggagatgcccaggttcaggtgtatcgtgcattttttttccacagtgcagaaatgacatttctggttggtcttgaatgtctgctctggccaagccacctcctctcatgctagctaaccaagtggcacgtgtgcccacgcaggccattctaaggaacactgtaattgtctagacaattttctctcaaatactccgtcctggaagcgtctggttggcagaagagggaaggcaggagggtggcagcgtcccggctgagtcctcttgcacatgggagctggagtccagccaggctccagagcggctccggctggcaagggacctgaacaggaagatgagactcgaggttttctgcatgcctggaagtgcacatgctcatctacagctttcttggaagaagaaagaaacaaaaactgagatttagaacaccaggtctgtttccactggcggccactcttgggcactggagaccagcaagagctttgtttttaaaaggctcttccatggcagatattcgcagaggcatcagggctacacttaaatgaagggctccggctggcacctgaggagcggcgtgaccccgagggcccagggagctgcccggctggcctaggcaggcagccgcaccatggccagcacggccgtgcagcttctgggcttcctgctcagcttcctgggcatggtgggcacgttgatcaccaccatcctgccgcactggcggaggacagcgcacgtgggcaccaacatcctcacggccgtgtcctacctgaaagggctctggatggagtgtgtgtggcacagcacaggcatctaccagtgccagatctaccgatccctgctggcgctgccccaagacctccaggctgcccgcgccctcatggtcatctcctgcctgctctcgggcatagcctgcgcctgcgccgtcatcgggatgaagtgcacgcgctgcgccaagggcacacccgccaagaccacctttgccatcctcggcggcaccctcttcatcctggccggcctcctgtgcatggtggccgtctcctggaccaccaacgacgtggtgcagaacttctacaacccgctgctgcccagcggcatgaagtttgagattggccaggccctgtacctgggcttcatctcctcgtccctctcgctcattggtggcaccctgctttgcctgtcctgccaggacgaggcaccctacaggccctaccaggccccgcccagggccaccacgaccactgcaaacaccgcacctgcctaccagccaccagctgcctacaaagacaatcgggccccctcagtgacctcggccacgcacagcgggtacaggctgaacgactacgtgtgagtccccacagcctgcttctcccctgggctgctgtgggctgggtccccggcgggactgtcaatggaggcaggggttccagcacaaagtttacttctgggcaatttttgtatccaaggaaataatgtgaatgcgaggaaatgtctttagagcacagggacagagggggaaataagaggaggagaaagctctctataccaaagactgaaaaaaaaaatcctgtctgtttttgtatttattatatatatttatgtgggtgatttgataacaagtttaatataaagtgacttgggagtttggtcagtggggttggtttgtgatccaggaataaaccttgcggatgtggctgtttatgaaa

SEQ ID NO: 119985 - DNA, 1231 bp, Homo sapiens
  Payload ID: 3525
  Gene Symbol: CLDN14
  Gene Name: claudin 14
  Uniprot ID: O95500
  ENST ID: ENST00000399139
  CDS Start-End: 157-876
tgtaaagaggatgtgtttgcttcaccttctgccaggattgtaagtttcctgaggcctccccagtcctgcggaactggctccggctggcacctgaggagcggcgtgaccccgagggcccagggagctgcccggctggcctaggcaggcagccgcaccatggccagcacggccgtgcagcttctgggcttcctgctcagcttcctgggcatggtgggcacgttgatcaccaccatcctgccgcactggcggaggacagcgcacgtgggcaccaacatcctcacggccgtgtcctacctgaaagggctctggatggagtgtgtgtggcacagcacaggcatctaccagtgccagatctaccgatccctgctggcgctgccccaagacctccaggctgcccgcgccctcatggtcatctcctgcctgctctcgggcatagcctgcgcctgcgccgtcatcgggatgaagtgcacgcgctgcgccaagggcacacccgccaagaccacctttgccatcctcggcggcaccctcttcatcctggccggcctcctgtgcatggtggccgtctcctggaccaccaacgacgtggtgcagaacttctacaacccgctgctgcccagcggcatgaagtttgagattggccaggccctgtacctgggcttcatctcctcgtccctctcgctcattggtggcaccctgctttgcctgtcctgccaggacgaggcaccctacaggccctaccaggccccgcccagggccaccacgaccactgcaaacaccgcacctgcctaccagccaccagctgcctacaaagacaatcgggccccctcagtgacctcggccacgcacagcgggtacaggctgaacgactacgtgtgagtccccacagcctgcttctcccctgggctgctgtgggctgggtccccggcgggactgtcaatggaggcaggggttccagcacaaagtttacttctgggcaatttttgtatccaaggaaataatgtgaatgcgaggaaatgtctttagagcacagggacagagggggaaataagaggaggagaaagctctctataccaaagactgaaaaaaaaaatcctgtctgtttttgtatttattatatatatttatgtgggtgatttgataacaagtttaatataaagtgacttgggagtttggtcagtggggttggtttgtgatccaggaataaaccttgcggatgtggctgtttatgaaa

SEQ ID NO: 119986 - DNA, 1370 bp, Homo sapiens
  Payload ID: 3526
  Gene Symbol: CLDN15
  Gene Name: claudin 15
  Uniprot ID: P56746
  ENST ID: ENST00000308344
  CDS Start-End: 366-1052
ggctccagggtaagtctgccccccccaccctcgtggggcggggagcccggggcagcccagaggctggggggagggggtggacttttggcccgtttcggttattccctccatctcgtcaacagctgccgcgcgcaggcttagctcattcctctgacctgccaggaagcagagagacccacagagcaggagggaggcagaaagtggagacggacctgagcccgaggaagaggcaggcagaggctgaggctgattccaccccagcctgcctggacaaccctccttagccgcagccccttccagttccctaggggttctgcccctccccctctctggggcaccagccccccagggtcctgcatcccaccatgtcgatggctgtggaaacctttggcttcttcatggcaactgtggggctgctgatgctgggggtgactctgccaaacagctactggcgagtgtccactgtgcacgggaacgtcatcaccaccaacaccatcttcgagaacctctggtttagctgtgccaccgactccctgggcgtctacaactgctgggagttcccgtccatgctggccctctctgggtatattcaggcctgccgggcactcatgatcaccgccatcctcctgggcttcctcggcctcttgctaggcatagcgggcctgcgctgcaccaacattgggggcctggagctctccaggaaagccaagctggcggccaccgcaggggccctccacattctggccggtatctgcgggatggtggccatctcctggtacgccttcaacatcacccgggacttcttcgaccccttgtaccccggaaccaagtacgagctgggccccgccctctacctggggtggagcgcctcactgatctccatcctgggtggcctctgcctctgctccgcctgctgctgcggctctgacgaggacccagccgccagcgcccggcggccctaccaggctccagtgtccgtgatgcccgtcgccacctcggaccaagaaggcgacagcagctttggcaaatacggcagaaacgcctacgtgtagcagctctggcccgtgggccccgctgtcttcccactgccccaaggagaggggacctggccggggcccattcccctatagtaacctcaggggccggccacgccccgctcccgtagccccgccccggccacggccccgtgtcttgcactctcatggcccctccaggccaagaactgctcttgggaagtcgcatatctcccctctgaggctggatccctcatcttctgaccctgggttctgggctgtgaaggggacggtgtccccgcacgtttgtattgtgtataaatacattcattaataaatgcatattgtgaccgttca

SEQ ID NO: 119987 - DNA, 2131 bp, Homo sapiens
  Payload ID: 3526
  Gene Symbol: CLDN15
  Gene Name: claudin 15
  Uniprot ID: P56746
  ENST ID: ENST00000401528
  CDS Start-End: 1127-1813
ctgcactggctcgggatggggaccagaggctgctaatccatcatcattaacgaatagagtgggtgacagtccctgataactgggaacaggttgcagagcttagccacaggatcacgctccaggctgttggccagcaggaccaggctcgatgctgagtcaaagatcaacttaggaggaaatttgagttttgggtgagagcgactccctggtggcctcagccctgtgacactcacatccaggacagttcccggtgccaagcgctggttatgtgtggggggcttgactccctggtcccaacgaggtctcagtgtgttgcccaggctggtcttgaactcctgagttcaagcaatcgtctcagcccagcctcccaaagtggtaggattacaggcgagagccactgcgcccggcccctggtcccagttctcaccacagcccctgcagtaagcagtcgggtatgtcactgacagagcagaagctcaggggactaaaactccccgcctgagttccctggtgaatggatggtggggccgagttccattccaggctggatggagcccagagctgtgggtctcctaccctcccatcccctcattccagcttgatcttccttaagagactcatacgccccaaccccttggtctgagtatcttagattgttctcgtggttcctccgtccttcaccactgaaggctgctgttcattctctctccgtctctgtcccttattgctctcacgtctgtctctgtcatcttttcactccttgtccctcttactccgttctttggcccccaatgaaagctgagtcagagacagacgcttcccctcagttcccagtgcctcccttgggggcccctccttggctgtatccgtcagtggctccaggctgccgcgcgcaggcttagctcattcctctgacctgccaggaagcagagagacccacagagcaggagggaggcagaaagtggagacggacctgagcccgaggaagaggcaggcagaggctgaggctgattccaccccagcctgcctggacaaccctccttagccgcagccccttccagttccctaggggttctgcccctccccctctctggggcaccagccccccagggtcctgcatcccaccatgtcgatggctgtggaaacctttggcttcttcatggcaactgtggggctgctgatgctgggggtgactctgccaaacagctactggcgagtgtccactgtgcacgggaacgtcatcaccaccaacaccatcttcgagaacctctggtttagctgtgccaccgactccctgggcgtctacaactgctgggagttcccgtccatgctggccctctctgggtatattcaggcctgccgggcactcatgatcaccgccatcctcctgggcttcctcggcctcttgctaggcatagcgggcctgcgctgcaccaacattgggggcctggagctctccaggaaagccaagctggcggccaccgcaggggccctccacattctggccggtatctgcgggatggtggccatctcctggtacgccttcaacatcacccgggacttcttcgaccccttgtaccccggaaccaagtacgagctgggccccgccctctacctggggtggagcgcctcactgatctccatcctgggtggcctctgcctctgctccgcctgctgctgcggctctgacgaggacccagccgccagcgcccggcggccctaccaggctccagtgtccgtgatgcccgtcgccacctcggaccaagaaggcgacagcagctttggcaaatacggcagaaacgcctacgtgtagcagctctggcccgtgggccccgctgtcttcccactgccccaaggagaggggacctggccggggcccattcccctatagtaacctcaggggccggccacgccccgctcccgtagccccgccccggccacggccccgtgtcttgcactctcatggcccctccaggccaagaactgctcttgggaagtcgcatatctcccctctgaggctggatccctcatcttctgaccctgggttctgggctgtgaaggggacggtgtccccgcacgtttgtattgtgtataaatacattcattaataaatgcatattgtgaccgttca

SEQ ID NO: 119988 - DNA, 691 bp, Homo sapiens
  Payload ID: 3526
  Gene Symbol: CLDN15
  Gene Name: claudin 15
  ENST ID: ENST00000412417
  CDS Start-End: 180-691
gagggaggcagaaagtggagacggacctgagcccgaggaagaggcaggcagaggctgaggctgattccaccccagcctgcctggacaaccctccttagccgcagccccttccagttccctaggggttctgcccctccccctctctggggcaccagccccccagggtcctgcatcccaccatgtcgatggctgtggaaacctttggcttcttcatggcaactgtggggctgctgatgctgggggtgactctgccaaacagctactggcgagtgtccactgtgcacgggaacgtcatcaccaccaacaccatcttcgagaacctctggtttagctgtgccaccgactccctgggcgtctacaactgctgggagttcccgtccatgctggccctctctggcatagcgggcctgcgctgcaccaacattgggggcctggagctctccaggaaagccaagctggcggccaccgcaggggccctccacattctggccggtatctgcgggatggtggccatctcctggtacgccttcaacatcacccgggacttcttcgaccccttgtaccccggaaccaagtacgagctgggccccgccctctacctggggtggagcgcctcactgatctccatcctgggtggcctctgcctctgctccgcctgctgctgcggctctgacgaggacccagccgccag

SEQ ID NO: 119989 - DNA, 632 bp, Homo sapiens
  Payload ID: 3526
  Gene Symbol: CLDN15
  Gene Name: claudin 15
  ENST ID: ENST00000414035
  CDS Start-End: 189-632
acagagcaggagggaggcagaaagtggagacggacctgagcccgaggaagaggcaggcagaggctgaggctgattccaccccagcctgcctggacaaccctccttagccgcagccccttccagttccctaggggttctgcccctccccctctctggggcaccagccccccagggtcctgcatcccaccatgtcgatggctgtggaaacctttggcttcttcatggcaactgtggggctgctgatgctgggggtgactctgccaaacagctactggcgagtgtccactgtgcacgggaacgtcatcaccaccaacaccatcttcgagaacctctggtttagctgtgccaccgactccctgggcgtctacaactgctgggagttcccgtccatgctggccctctctggtatctgcgggatggtggccatctcctggtacgccttcaacatcacccgggacttcttcgaccccttgtaccccggaaccaagtacgagctgggccccgccctctacctggggtggagcgcctcactgatctccatcctgggtggcctctgcctctgctccgcctgctgctgcggctctgacgaggacccagccgccagcgcccggcggccctaccaggctccagtg

SEQ ID NO: 119990 - DNA, 832 bp, Homo sapiens
  Payload ID: 3526
  Gene Symbol: CLDN15
  Gene Name: claudin 15
  ENST ID: ENST00000433833
  CDS Start-End: 1-319
cgggaacgtcatcaccaccaacaccatcttcgagaacctctggtttagctgtgccaccgactccctgggcgtctacaactgctgggagttcccgtccatgctggccctctctgggtatattcaggcctgccgggcactcatgatcaccgccatcctcctgggcttcctcggcctcttgctaggcatagcgggcctgcgctgcaccaacattgggggcctggagctctccaggaaagccaagctggcggccaccgcaggggccctccacattctggccgatctcctggctgcaaatcagcccatcggcagtgtttcttgagctcccagtaggggctggccacggccaggtgtgggagggacttcgaagataagagtgagcggctgcctccgggagcttacatcctagctggggagcagagttagggtgcacgctatggcgcacacacacagtgcacgtccacagtgccataccacggggcatggtggctcatgcctgtaatcccagcactttggtaggctgaggtatctgcgggatggtggccatctcctggtacgccttcaacatcacccgggacttcttcgaccccttgtaccccggaaccaagtacgagctgggccccgccctctacctggggtggagcgcctcactgatctccatcctgggtggcctctgcctctgctccgcctgctgctgcggctctgacgaggacccagccgccagcgcccggcggccctaccaggctccagtgtccgtgatgcccgtcgccacctcggaccaagaaggcgacagcagctttggcaaatacggcagaaacgcctacgtgtagcagct

SEQ ID NO: 119991 - DNA, 1509 bp, Homo sapiens
  Payload ID: 3526
  Gene Symbol: CLDN15
  Gene Name: claudin 15
  ENST ID: ENST00000611078
  CDS Start-End: 366-752
ggctccagggtaagtctgccccccccaccctcgtggggcggggagcccggggcagcccagaggctggggggagggggtggacttttggcccgtttcggttattccctccatctcgtcaacagctgccgcgcgcaggcttagctcattcctctgacctgccaggaagcagagagacccacagagcaggagggaggcagaaagtggagacggacctgagcccgaggaagaggcaggcagaggctgaggctgattccaccccagcctgcctggacaaccctccttagccgcagccccttccagttccctaggggttctgcccctccccctctctggggcaccagccccccagggtcctgcatcccaccatgtcgatggctgtggaaacctttggcttcttcatggcaactgtggggctgctgatgctgggggtgactctgccaaacagctactggcgagtgtccactgtgcacgggaacgtcatcaccaccaacaccatcttcgagaacctctggtttagctgtgccaccgactccctgggcgtctacaactgctgggagttcccgtccatgctggccctctctggctccacagactccccagcctcactgtcggggggcactggtctccttgtccggctgatgtctataaagggcccctgtgaagggaggcgtcttgcaagttgcaggttgagcgtccgctgtaaggaggcggtgtgtgtgcagggtatattcaggcctgccgggcactcatgatcaccgccatcctcctgggcttcctcggcctcttgctaggcatagcgggcctgcgctgcaccaacattgggggcctggagctctccaggaaagccaagctggcggccaccgcaggggccctccacattctggccggtatctgcgggatggtggccatctcctggtacgccttcaacatcacccgggacttcttcgaccccttgtaccccggaaccaagtacgagctgggccccgccctctacctggggtggagcgcctcactgatctccatcctgggtggcctctgcctctgctccgcctgctgctgcggctctgacgaggacccagccgccagcgcccggcggccctaccaggctccagtgtccgtgatgcccgtcgccacctcggaccaagaaggcgacagcagctttggcaaatacggcagaaacgcctacgtgtagcagctctggcccgtgggccccgctgtcttcccactgccccaaggagaggggacctggccggggcccattcccctatagtaacctcaggggccggccacgccccgctcccgtagccccgccccggccacggccccgtgtcttgcactctcatggcccctccaggccaagaactgctcttgggaagtcgcatatctcccctctgaggctggatccctcatcttctgaccctgggttctgggctgtgaaggggacggtgtccccgcacgtttgtattgtgtataaatacattcattaataaatgcatattgtgaccgttc

SEQ ID NO: 119992 - DNA, 3273 bp, Homo sapiens
  Payload ID: 3527
  Gene Symbol: CLDN16
  Gene Name: claudin 16
  Uniprot ID: Q9Y5I7
  ENST ID: ENST00000264734
  CDS Start-End: 249-1166
cttcttccgagtggggaggagaatagctcactctccctagagggcctaagaaagatcagtttacaggttccagcatggggtgggacccttcctccttcccccgtcttggcactggcacttggtctggtgaccaccactagcccacagttgggtcagaaaacgttacagaactcctctctcccccacccgaaacacactcagcccttgcactgacctgccttctgattggaggctggttgcttcggataatgacctccaggaccccactgttggttacagcctgtttgtattattcttactgcaactcaagacacctgcagcagggcgtgagaaaaagtaaaagaccagtattttcacattgccaggtaccagaaacacagaagactgacacccgccacttaagtggggccagggctggtgtctgcccatgttgccatcctgatgggctgcttgccacaatgagggatcttcttcaatacatcgcttgcttctttgcctttttctctgctgggtttttgattgtggccacctggactgactgttggatggtgaatgctgatgactctctggaggtgagcacaaaatgccgaggcctctggtgggaatgcgtcacaaatgcttttgatgggattcgcacctgtgatgagtacgattccatacttgcggagcatcccttgaagctggtggtaactcgagcgttgatgattactgcagatattctagctgggtttggatttctcaccctgctccttggtcttgactgcgtgaaattcctccctgatgagccgtacattaaagtccgcatctgctttgttgctggagccacgttactaatagcaggtaccccaggaatcattggctctgtgtggtatgctgttgatgtgtatgtggaacgttctactttggttttgcacaatatatttcttggtatccaatataaatttggttggtcctgttggctcggaatggctgggtctctgggttgctttttggctggagctgttctcacctgctgcttatatctttttaaagatgttggacctgagagaaactatccttattccttgaggaaagcctattcagccgcgggtgtttccatggccaagtcatactcagcccctcgcacagagacggccaaaatgtatgctgtagacacaagggtgtaaaatgcacgtttcagggtgtgtttgcatatgatttaatcaatcagtatggttacattgataaaatagtaagtcaatccaggaacagttatttagaattcatattgaattaaattaattgctagcttaatcaaaatgtttgattctcctatactttttctttctattactcttatattttcccgtcattctctctgctaaccttccaccttatgcacacactttccctatattttaagataagtctgctaggatgtagaaatatttgtttgtgatttctatatagctattagagattatgacatagtaatattaaaatgaaatgatacttaaacagaaagcaatttccaaagaggccagggaccctaatctttgaagagatgaagaaacttacttttctccctggcttttggttcactttttgtacttttaacaagtgggtgaattatttgataattttgaggaagattattcttttaaattcaaactagtatgtcaatgcctaccattactctgattatattaaaacagaaaaaggaaataacaacttcgtataccagccactggtgagagttaaagacaagagctgcccccccacccccaaatgtcaaaggcaaatgctaaattgatactggagctcgtggtgactttctacctcactaacaacataagggatctccatattatttcaccactattctagctttgctgatatattgccaaatgattagactacagaatagttcaaccagagaatttactcatttattgattaaacatccaaatactattgtaatatactatgttaaaattcatcaattcaagtgcccacacaccactgaatcatcagcaccaagcaatatattagacatatggcaaaattcaacaaatatattttgatataaataaataaacgttcacgactttacttaaaaaatcaatgttgcggctgggcacggtagctcgcgtctgtaatccccgcactttgggaggccaaggcgggtggatcacgaggtcaagagacggagaccatcctggctaacatggtgaaaccctgtctctactaaaaatacaaaaattagccgggcgtggtggcggtgcctgtagtcccagctactcgggaggctgaggcaggagaatcgtttgaacccaggaggtggaggttgcagtgagcggagatcgcaccattgcactccagtctggcaacagagcgagactccatctcaaaaaacaaaaataaataaataaataaatattcttcataaaatgtgggttttggggaaaatatagaattacatatacatttaacgaagtcgctaatgacatttcattcatattcataatgtaaccatcttgaatttttttaattgtagcgattttaaaaatgtttgtaaaatttaatttccagttttctaattacttgtcagtcacattaataacattagtacctttatggtacccttgcagtacctgaaaagaatatcaacctgaaaagaatatcaactcacccagaaattagttctttgaaaaaaaagaaattaagttgtgaatttctaaagaccttgaaataagtgtttcaaatttaaagaacaaagaatgatgtgaaaatgagattatgattcctactacatgaattaacgtttcgagattgctgtttattacttcccagagtatctttaacagtattctctgaagcagttccaatctagttggagaattaacagcaattgatttaactatctcatttttattaactgtaatttactttaaaaatatttgcaaatcatactcattagttatttgatcattgttctatgcattttaaaattaattttgtgttgttcctctcaatatttgtttttaacatttattcccatttttattttatactattgtctgtcatgctttatgtattccaataagtgtcttgaaatccttgtggggaaaggcaggacaaaaataattagttaattagatttgaaaaatgtaatttttccattttaaatatttcatttgtataagaaaatatttcagagaaccatgatgataatggatatgtgtgactgttttgaatttttttctcaattaaaacattttgtatgtaatggga

SEQ ID NO: 119993 - DNA, 430 bp, Homo sapiens
  Payload ID: 3527
  Gene Symbol: CLDN16
  Gene Name: claudin 16
  ENST ID: ENST00000456423
  CDS Start-End: 1-360
atgacctccaggaccccactgttggttacagcctgtttgtattattcttactgcaactcaagacacctgcagcagggcgtgagaaaaagtaaaagaccagtattttcacattgccaggtaccagaaacacagaagactgacacccgccacttaagtggggccagggctggtgtctgcccatgttgccatcctgatgggctgcttgccacaatgagggatcttcttcaatacatcgcttgcttctttgcctttttctctgctgggtttttgattgtggccacctggactgactgttggatggtgaatgctgatgactctctggagatgttggacctgagagaaactatccttattccttgaggaaagcctattcagccgcgggtgtttccatggccaagtcatactcagcccctcgcacagagacggccaa

SEQ ID NO: 119994 - DNA, 1193 bp, Homo sapiens
  Payload ID: 3528
  Gene Symbol: CLDN17
  Gene Name: claudin 17
  Uniprot ID: P56750
  ENST ID: ENST00000286808
  CDS Start-End: 140-814
ctgatttggactaaaacgttatgggcagcagccaaggagaacatcatcaaagacttctctagactcaaaaggcttccacgttctacatcttgagcatcttctaccactccgaattgaaccagtcttcaaagtaaaggcaatggcattttatcccttgcaaattgctgggctggttcttgggttccttggcatggtggggactcttgccacaacccttctgcctcagtggagagtatcagcttttgttggcagcaacattattgtctttgagaggctctgggaagggctctggatgaattgcatccgacaagccagggtccggttgcaatgcaagttctatagctccttgttggctctcccgcctgccctggaaacagcccgggccctcatgtgtgtggctgttgctctctccttgatcgccctgcttattggcatctgtggcatgaagcaggtccagtgcacaggctctaacgagagggccaaagcataccttctgggaacttcaggagtcctcttcatcctgacgggcatcttcgttctgattccggtgagctggacagccaatataatcatcagagatttctacaacccagccatccacataggtcagaaacgagagctgggagcagcacttttccttggctgggcaagcgctgctgtcctcttcattggagggggtctgctttgtggattttgctgctgcaacagaaagaagcaagggtacagatatccagtgcctggctaccgtgtgccacacacagataagcgaagaaatacgacaatgcttagtaagacctccaccagttatgtctaatgcctccttttggctccaagtatggactatggtcaatgttttttataaagtcctgctagaaactgtaagtatgtgaggcaggagaacttgctttatgtctagatttacattgatacgaaagtttcaatttgttactggtggtaggaatgaaaatgacttacttggacattctgacttcaggtgtattaaatgcattgactattgttggacccaatcgctgctccaattttcatattctaaattcaagtatacccataatcattagcaagtgtacaatgatggactacttattactttttgaccatcatgtattatctgataagaatctaaagttgaaattgatattctataacaataaaacatatacctattctaaaat

SEQ ID NO: 119995 - DNA, 3520 bp, Homo sapiens
  Payload ID: 3529
  Gene Symbol: CLDN18
  Gene Name: claudin 18
  Uniprot ID: P56856
  ENST ID: ENST00000183605
  CDS Start-End: 227-1012
gagcagacaagtgcctcttgggcccgcttctctaacaaatgtaaaaataatgcccttgaaccaggagcgaaactgagctatctaaggaaaacactgtgagcaaatactgagagcctagggaaaccatctgattagaagagctcccctcaggagcgcgttagcttcacaccttcggcagcaggagggcggcagcttctcgcaggcggcagggcgggcggccaggatcatgtccaccaccacatgccaagtggtggcgttcctcctgtccatcctggggctggccggctgcatcgcggccaccgggatggacatgtggagcacccaggacctgtacgacaaccccgtcacctccgtgttccagtacgaagggctctggaggagctgcgtgaggcagagttcaggcttcaccgaatgcaggccctatttcaccatcctgggacttccagccatgctgcaggcagtgcgagccctgatgatcgtaggcatcgtcctgggtgccattggcctcctggtatccatctttgccctgaaatgcatccgcattggcagcatggaggactctgccaaagccaacatgacactgacctccgggatcatgttcattgtctcaggtctttgtgcaattgctggagtgtctgtgtttgccaacatgctggtgactaacttctggatgtccacagctaacatgtacaccggcatgggtgggatggtgcagactgttcagaccaggtacacatttggtgcggctctgttcgtgggctgggtcgctggaggcctcacactaattgggggtgtgatgatgtgcatcgcctgccggggcctggcaccagaagaaaccaactacaaagccgtttcttatcatgcctcaggccacagtgttgcctacaagcctggaggcttcaaggccagcactggctttgggtccaacaccaaaaacaagaagatatacgatggaggtgcccgcacagaggacgaggtacaatcttatccttccaagcacgactatgtgtaatgctctaagacctctcagcacgggcggaagaaactcccggagagctcacccaaaaaacaaggagatcccatctagatttcttcttgcttttgactcacagctggaagttagaaaagcctcgatttcatctttggagaggccaaatggtcttagcctcagtctctgtctctaaatattccaccataaaacagctgagttatttatgaattagaggctatagctcacattttcaatcctctatttctttttttaaatataactttctactctgatgagagaatgtggttttaatctctctctcacattttgatgatttagacagactccccctcttcctcctagtcaataaacccattgatgatctatttcccagcttatccccaagaaaacttttgaaaggaaagagtagacccaaagatgttattttctgctgtttgaattttgtctccccacccccaacttggctagtaataaacacttactgaagaagaagcaataagagaaagatatttgtaatctctccagcccatgatctcggttttcttacactgtgatcttaaaagttaccaaaccaaagtcattttcagtttgaggcaaccaaacctttctactgctgttgacatcttcttattacagcaacaccattctaggagtttcctgagctctccactggagtcctctttctgtcgcgggtcagaaattgtccctagatgaatgagaaaattattttttttaatttaagtcctaaatatagttaaaataaataatgttttagtaaaatgatacactatctctgtgaaatagcctcacccctacatgtggatagaaggaaatgaaaaaataattgctttgacattgtctatatggtactttgtaaagtcatgcttaagtacaaattccatgaaaagctcactgatcctaattctttccctttgaggtctctatggctctgattgtacatgatagtaagtgtaagccatgtaaaaagtaaataatgtctgggcacagtggctcacgcctgtaatcctagcactttgggaggctgaggaggaaggatcacttgagcccagaagttcgagactagcctgggcaacatggagaagccctgtctctacaaaatacagagagaaaaaatcagccagtcatggtggcctacacctgtagtcccagcattccgggaggctgaggtgggaggatcacttgagcccagggaggttggggctgcagtgagccatgatcacaccactgcactccagccaggtgacatagcgagatcctgtctaaaaaaataaaaaataaataatggaacacagcaagtcctaggaagtaggttaaaactaattctttaaaaaaaaaaaaaagttgagcctgaattaaatgtaatgtttccaagtgacaggtatccacatttgcatggttacaagccactgccagttagcagtagcactttcctggcactgtggtcggttttgttttgttttgctttgtttagagacggggtctcactttccaggctggcctcaaactcctgcactcaagcaattcttctaccctggcctcccaagtagctggaattacaggtgtgcgccatcacaactagctggtggtcagttttgttactctgagagctgttcacttctctgaattcacctagagtggttggaccatcagatgtttgggcaaaactgaaagctctttgcaaccacacaccttccctgagcttacatcactgcccttttgagcagaaagtctaaattccttccaagacagtagaattccatcccagtaccaaagccagataggccccctaggaaactgaggtaagagcagtctctaaaaactacccacagcagcattggtgcaggggaacttggccattaggttattatttgagaggaaagtcctcacatcaatagtacatatgaaagtgacctccaaggggattggtgaatactcataaggatcttcaggctgaacagactatgtctggggaaagaacggattatgccccattaaataacaagttgtgttcaagagtcagagcagtgagctcagaggcccttctcactgagacagcaacatttaaaccaaaccagaggaagtatttgtggaactcactgcctcagtttgggtaaaggatgagcagacaagtcaactaaagaaaaaagaaaagcaaggaggagggttgagcaatctagagcatggagtttgttaagtgctctctggatttgagttgaagagcatccatttgagttgaaggccacagggcacaatgagctctcccttctaccaccagaaagtccctggtcaggtctcaggtagtgcggtgtggctcagctgggtttttaattagcgcattctctatccaacatttaattgtttgaaagcctccatatagttagattgtgctttgtaattttgttgttgttgctctatcttattgtatatgcattgagtattaacctgaatgttttgttacttaaatattaaaaacactgttatcctaca

SEQ ID NO: 119996 - DNA, 3434 bp, Homo sapiens
  Payload ID: 3529
  Gene Symbol: CLDN18
  Gene Name: claudin 18
  Uniprot ID: P56856
  ENST ID: ENST00000343735
  CDS Start-End: 135-920
aaccgcctccattacatggtccgttcctgacgtgtacaccagcctctcagagaaaactccatccctacactcggtagtctcagaattgcgctgtccacttgtcgtgtggctctgtgtcgacactgtgcgccaccatggccgtgactgcctgtcagggcttggggttcgtggtttcactgattgggattgcgggcatcattgctgccacctgcatggaccagtggagcacccaagacttgtacaacaaccccgtaacagctgttttcaactaccaggggctgtggcgctcctgtgtccgagagagctctggcttcaccgagtgccggggctacttcaccctgctggggctgccagccatgctgcaggcagtgcgagccctgatgatcgtaggcatcgtcctgggtgccattggcctcctggtatccatctttgccctgaaatgcatccgcattggcagcatggaggactctgccaaagccaacatgacactgacctccgggatcatgttcattgtctcaggtctttgtgcaattgctggagtgtctgtgtttgccaacatgctggtgactaacttctggatgtccacagctaacatgtacaccggcatgggtgggatggtgcagactgttcagaccaggtacacatttggtgcggctctgttcgtgggctgggtcgctggaggcctcacactaattgggggtgtgatgatgtgcatcgcctgccggggcctggcaccagaagaaaccaactacaaagccgtttcttatcatgcctcaggccacagtgttgcctacaagcctggaggcttcaaggccagcactggctttgggtccaacaccaaaaacaagaagatatacgatggaggtgcccgcacagaggacgaggtacaatcttatccttccaagcacgactatgtgtaatgctctaagacctctcagcacgggcggaagaaactcccggagagctcacccaaaaaacaaggagatcccatctagatttcttcttgcttttgactcacagctggaagttagaaaagcctcgatttcatctttggagaggccaaatggtcttagcctcagtctctgtctctaaatattccaccataaaacagctgagttatttatgaattagaggctatagctcacattttcaatcctctatttctttttttaaatataactttctactctgatgagagaatgtggttttaatctctctctcacattttgatgatttagacagactccccctcttcctcctagtcaataaacccattgatgatctatttcccagcttatccccaagaaaacttttgaaaggaaagagtagacccaaagatgttattttctgctgtttgaattttgtctccccacccccaacttggctagtaataaacacttactgaagaagaagcaataagagaaagatatttgtaatctctccagcccatgatctcggttttcttacactgtgatcttaaaagttaccaaaccaaagtcattttcagtttgaggcaaccaaacctttctactgctgttgacatcttcttattacagcaacaccattctaggagtttcctgagctctccactggagtcctctttctgtcgcgggtcagaaattgtccctagatgaatgagaaaattattttttttaatttaagtcctaaatatagttaaaataaataatgttttagtaaaatgatacactatctctgtgaaatagcctcacccctacatgtggatagaaggaaatgaaaaaataattgctttgacattgtctatatggtactttgtaaagtcatgcttaagtacaaattccatgaaaagctcactgatcctaattctttccctttgaggtctctatggctctgattgtacatgatagtaagtgtaagccatgtaaaaagtaaataatgtctgggcacagtggctcacgcctgtaatcctagcactttgggaggctgaggaggaaggatcacttgagcccagaagttcgagactagcctgggcaacatggagaagccctgtctctacaaaatacagagagaaaaaatcagccagtcatggtggcctacacctgtagtcccagcattccgggaggctgaggtgggaggatcacttgagcccagggaggttggggctgcagtgagccatgatcacaccactgcactccagccaggtgacatagcgagatcctgtctaaaaaaataaaaaataaataatggaacacagcaagtcctaggaagtaggttaaaactaattctttaaaaaaaaaaaaaagttgagcctgaattaaatgtaatgtttccaagtgacaggtatccacatttgcatggttacaagccactgccagttagcagtagcactttcctggcactgtggtcggttttgttttgttttgctttgtttagagacggggtctcactttccaggctggcctcaaactcctgcactcaagcaattcttctaccctggcctcccaagtagctggaattacaggtgtgcgccatcacaactagctggtggtcagttttgttactctgagagctgttcacttctctgaattcacctagagtggttggaccatcagatgtttgggcaaaactgaaagctctttgcaaccacacaccttccctgagcttacatcactgcccttttgagcagaaagtctaaattccttccaagacagtagaattccatcccagtaccaaagccagataggccccctaggaaactgaggtaagagcagtctctaaaaactacccacagcagcattggtgcaggggaacttggccattaggttattatttgagaggaaagtcctcacatcaatagtacatatgaaagtgacctccaaggggattggtgaatactcataaggatcttcaggctgaacagactatgtctggggaaagaacggattatgccccattaaataacaagttgtgttcaagagtcagagcagtgagctcagaggcccttctcactgagacagcaacatttaaaccaaaccagaggaagtatttgtggaactcactgcctcagtttgggtaaaggatgagcagacaagtcaactaaagaaaaaagaaaagcaaggaggagggttgagcaatctagagcatggagtttgttaagtgctctctggatttgagttgaagagcatccatttgagttgaaggccacagggcacaatgagctctcccttctaccaccagaaagtccctggtcaggtctcaggtagtgcggtgtggctcagctgggtttttaattagcgcattctctatccaacatttaattgtttgaaagcctccatatagttagattgtgctttgtaattttgttgttgttgctctatcttattgtatatgcattgagtattaacctgaatgttttgttacttaaatattaaaaacactgttatcctacagttgaa

SEQ ID NO: 119997 - DNA, 2039 bp, Homo sapiens
  Payload ID: 3529
  Gene Symbol: CLDN18
  Gene Name: claudin 18
  ENST ID: ENST00000479660
  CDS Start-End: 11-451
ggccaggatcatgtccaccaccacatgccaagtggtggcgttcctcctgtccatcctggggctggccggctgcatcgcggccaccgggatggacatgtggagcacccaggacctgtacgacaaccccgtcacctccgtgttccagtacgaagggctctggaggagctgcgtgaggcagagttcaggcttcaccgaatgcaggccctatttcaccatcctgggacttccagccatgctgcaggcagtgcgagccctgatgatcgtaggcatcgtcctgggtgccattggcctcctggtatccatctttgccctgaaatgcatccgcattggcagcatggaggactctgccaaagccaacatgacactgacctccgggatcatgttcattgtctcaggtacacatttggtgcggctctgttcgtgggctgggtcgctggaggcctcacactaattgggggtgtgatgatgtgcatcgcctgccggggcctggcaccagaagaaaccaactacaaagccgtttcttatcatgcctcaggccacagtgttgcctacaagcctggaggcttcaaggccagcactggctttgggtccaacaccaaaaacaagaagatatacgatggaggtgcccgcacagaggacgaggtacaatcttatccttccaagcacgactatgtgtaatgctctaagacctctcagcacgggcggaagaaactcccggagagctcacccaaaaaacaaggagatcccatctagatttcttcttgcttttgactcacagctggaagttagaaaagcctcgatttcatctttggagaggccaaatggtcttagcctcagtctctgtctctaaatattccaccataaaacagctgagttatttatgaattagaggctatagctcacattttcaatcctctatttctttttttaaatataactttctactctgatgagagaatgtggttttaatctctctctcacattttgatgatttagacagactccccctcttcctcctagtcaataaacccattgatgatctatttcccagcttatccccaagaaaacttttgaaaggaaagagtagacccaaagatgttattttctgctgtttgaattttgtctccccacccccaacttggctagtaataaacacttactgaagaagaagcaataagagaaagatatttgtaatctctccagcccatgatctcggttttcttacactgtgatcttaaaagttaccaaaccaaagtcattttcagtttgaggcaaccaaacctttctactgctgttgacatcttcttattacagcaacaccattctaggagtttcctgagctctccactggagtcctctttctgtcgcgggtcagaaattgtccctagatgaatgagaaaattattttttttaatttaagtcctaaatatagttaaaataaataatgttttagtaaaatgatacactatctctgtgaaatagcctcacccctacatgtggatagaaggaaatgaaaaaataattgctttgacattgtctatatggtactttgtaaagtcatgcttaagtacaaattccatgaaaagctcactgatcctaattctttccctttgaggtctctatggctctgattgtacatgatagtaagtgtaagccatgtaaaaagtaaataatgtctgggcacagtggctcacgcctgtaatcctagcactttgggaggctgaggaggaaggatcacttgagcccagaagttcgagactagcctgggcaacatggagaagccctgtctctacaaaatacagagagaaaaaatcagccagtcatggtggcctacacctgtagtcccagcattccgggaggctgaggtgggaggatcacttgagcccagggaggttggggctgcagtgagccatgatcacaccactgcactccagccaggtgacatagcgagatcctgtctaaaaaaataaaaaataaataatggaacacagcaagtcctaggaagtaggttaaaactaattctttaaaaaaaaaaaaaa

SEQ ID NO: 119998 - DNA, 2859 bp, Homo sapiens
  Payload ID: 3530
  Gene Symbol: CLDN19
  Gene Name: claudin 19
  Uniprot ID: Q8N6F1
  ENST ID: ENST00000296387
  CDS Start-End: 192-866
attctggagtccagagccactgcctttgctccagccgctgccgccgcaccacctctccttctctgcctctgaccctccttctcgctgctccccctgcccagctgctcctcccacctggccatgaccaaagcccctgctggcaccctggcccagctctgagtcctgggaccctcggtcctctctcctgggccatggccaactcaggcctccagctcctgggctacttcttggccctgggtggctgggtgggcatcattgctagcacagccctgccacagtggaagcagtcttcctacgcaggcgacgccatcatcactgccgtgggcctctatgaagggctctggatgtcctgcgcctcccagagcactgggcaagtgcagtgcaagctctacgactcgctgctcgccctggacggtcacatccaatcagcgcgggccctgatggtggtggccgtgctcctgggcttcgtggccatggtcctcagcgtagttggcatgaagtgtacgcgggtgggagacagcaaccccattgccaagggccgtgttgccatcgccgggggagccctcttcatcctggcaggcctctgcactttgactgctgtctcgtggtatgccaccctggtgacccaggagttcttcaacccaagcacacctgtcaatgccaggtatgaatttggcccagccctgttcgtgggctgggcctcagctggcctggccgtgctgggcggctccttcctctgctgcacatgcccggagccagagagacccaacagcagcccacagccctatcggcctggaccctctgctgctgcccgagaaccagttgttaaattgcccgcctccgccaagggccccctgggtgtgtaatgtccagtccccagccaggctctgtcccctgccatacctagactgtgtgtttcatatttttttggaaagagaagtgaacatccagccccaatcatggtatcattcggtctgtcctcagcgtggcttggacggggcctgtgtcagagtggtcagtgctgacccctggggctcttgggcagaaagatgaggagacagaggtccagggtgggttacatagcacatccagggctaagcaagaaataattcagaggtcctaccctctgtctagggacccccctcccaagcctggccttggccttggcacaaagtcctccttgataggagatcccactcactcctggaggctgcccctgaggcttggcccagctctaggagcagtccccagggtcagggagcccctggtgtggaaagaggccccaaggtagtaaaccctgcccctgttactgtgctccagagacctcctaagggaagggacagttcctggaaggccctccagctggatgctggggatcagcgataggtgaggggacacagtgtaggagctccccatgtagaaaagggaatgtggggagggcgttaggagcttgcaggcattaggactgtcctgagcaaggtctgcagcccccagctctgctcaccccgaatcctgccccttgtttccacacctaccattcctcctctcctgatccccagcatccagctgaggtccaaggtctttgtcctagaatcagagtggggaggggacagcctggggctgcccagagactgtgggtggagctgcctgctgcactcagcagtgcggtcagagaagggcttttggtcttgaagtccaggtaccatccccccttagcatacagggggaagggcctgagaggaatgtaaggaaaccagcccagatcagtcccaaggccagagtcctttgtcctacatctccctgaaccagagtgtgccctgcccctcatgctcagacctctcccaccccaaaccctctcccgggactcagtctccctggccactgcgtatcaggcttctggggaaagcatccatcacagaacctccccttccctgccacgcaccttccttggccagctccattctggcctcctccaccacctgccttgtgaccacatctcccaccacgtccccagatctcaagaacgcagctcagcttctccttcgagcttgactctgagagggaaagtgacggaaaccaagtcagatgagatgactgccatgtacactgcagtcaagggcagggaggggaggaatgacacaaatggcagggagctgctgggggactgacccctcggcgcctggcctggccggtgctgcacatccaccggggcacaacagggacttgtccagcctctggtcagaggatgtggccacctgaccctaaataggttccccagagtcctgcccctctaatgaatgagaactgcaggagtttctcctctgggtgcctgaagctatagtgcaatggttcccaaccctgcatgcacattcgaatcacctgggggcacaatgcctaggctccaaccccagacactcttatttcattggtctgggtggacctggcatcagaagtcatgtagctcctcaggggactgtagtgtgtggtcagcactgagggctcctctatgaggcctcaagcccaggtgactctgtgaggtctgcagagggagaaaagaacccacaagggaagaggtggaggtcaggcacggtggctcacgcttgtaatcccagcactttgggaggccgaggtgggtagatacctgaagtcaggagttcgagactagcctggccaatatggtaaaaccccgtgtctattaaaaatacaaaaattagctggctgtggtggtgggcacctgtaatcccagctactcgggaggctgaggcaggagaatcgcttgaactcgggaggtggaggttgcagtcagccaagatcgtgccactgcacaccatcctggatgacagagcaagactccatcac

SEQ ID NO: 119999 - DNA, 1586 bp, Homo sapiens
  Payload ID: 3530
  Gene Symbol: CLDN19
  Gene Name: claudin 19
  Uniprot ID: Q8N6F1
  ENST ID: ENST00000372539
  CDS Start-End: 78-713
ctggccatgaccaaagcccctgctggcaccctggcccagctctgagtcctgggaccctcggtcctctctcctgggccatggccaactcaggcctccagctcctgggctacttcttggccctgggtggctgggtgggcatcattgctagcacagccctgccacagtggaagcagtcttcctacgcaggcgacgccatcatcactgccgtgggcctctatgaagggctctggatgtcctgcgcctcccagagcactgggcaagtgcagtgcaagctctacgactcgctgctcgccctggacggtcacatccaatcagcgcgggccctgatggtggtggccgtgctcctgggcttcgtggccatggtcctcagcgtagttggcatgaagtgtacgcgggtgggagacagcaaccccattgccaagggccgtgttgccatcgccgggggagccctcttcatcctggcaggcctctgcactttgactgctgtctcgtggtatgccaccctggtgacccaggagttcttcaacccaagcacacctgtcaatgccaggtatgaatttggcccagccctgttcgtgggctgggcctcagctggcctggccgtgctgggcggctccttcctctgctgcacatgcccggagccagagagacccaacagcagcccacagccctatcggcctggaccctctgctgctgcccgagagtacgtctgagctccgcctgccctggccagccccccacccagtggcccccttgcccagcatccagccagcctcgcagcaccctgggcagggccactggggcataggatgggcataggtgctctgagcagcttgtcctcaacacaagcacccaccctgcaatctgagacccagatcctcagagagacaccagaggcaggacccagcccccaggcatacacacagatgcaggtccaggcacggtcttgtctgcacagcctggtgggcaccagcatgcatccctggagacaggccctcaggcaccagcccggctgtttactcactgaagagctgcttgggtgtctgctacgtgctgggccctagagatagagcagtggccaagacgtaccttagtacccaggtccttggggtgagcagaaaccttcaccctccccagtcccatgggctcctcacagcaaccccacaagggcagtgccgggatgctgaacgttcacacaaggacagggagggtctgagtttaggtctcaggttcttccagtgcgcccagggctgggggccacctacacagatggtgaggtcggaccatggcgcccctgcccccgggaatgggccccaggcagggctgctgtgagggccaaggtctggccacgctggccagtacccatgtccgggcctgaatgcacagcccctgcccccgaccccacagctcactccactaaccagctctctctcttttgactttcagaccagttgttaaattgcccgcctccgccaagggccccctgggtgtgtaatgtccagtccccagccaggctctgtcccctgccatacctagactgtgtgtttcatatttttttggaaagagaagtgaacatccagccccaa

SEQ ID NO: 120000 - DNA, 3517 bp, Homo sapiens
  Payload ID: 3530
  Gene Symbol: CLDN19
  Gene Name: claudin 19
  Uniprot ID: Q8N6F1
  ENST ID: ENST00000539749
  CDS Start-End: 192-848
attctggagtccagagccactgcctttgctccagccgctgccgccgcaccacctctccttctctgcctctgaccctccttctcgctgctccccctgcccagctgctcctcccacctggccatgaccaaagcccctgctggcaccctggcccagctctgagtcctgggaccctcggtcctctctcctgggccatggccaactcaggcctccagctcctgggctacttcttggccctgggtggctgggtgggcatcattgctagcacagccctgccacagtggaagcagtcttcctacgcaggcgacgccatcatcactgccgtgggcctctatgaagggctctggatgtcctgcgcctcccagagcactgggcaagtgcagtgcaagctctacgactcgctgctcgccctggacggtcacatccaatcagcgcgggccctgatggtggtggccgtgctcctgggcttcgtggccatggtcctcagcgtagttggcatgaagtgtacgcgggtgggagacagcaaccccattgccaagggccgtgttgccatcgccgggggagccctcttcatcctggcaggtatgaatttggcccagccctgttcgtgggctgggcctcagctggcctggccgtgctgggcggctccttcctctgctgcacatgcccggagccagagagacccaacagcagcccacagccctatcggcctggaccctctgctgctgcccgagagtacgtctgagctccgcctgccctggccagccccccacccagtggcccccttgcccagcatccagccagcctcgcagcaccctgggcagggccactggggcataggatgggcataggtgctctgagcagcttgtcctcaacacaagcacccaccctgcaatctgagacccagatcctcagagagacaccagaggcaggacccagcccccaggcatacacacagatgcaggtccaggcacggtcttgtctgcacagcctggtgggcaccagcatgcatccctggagacaggccctcaggcaccagcccggctgtttactcactgaagagctgcttgggtgtctgctacgtgctgggccctagagatagagcagtggccaagacgtaccttagtacccaggtccttggggtgagcagaaaccttcaccctccccagtcccatgggctcctcacagcaaccccacaagggcagtgccgggatgctgaacgttcacacaaggacagggagggtctgagtttaggtctcaggttcttccagtgcgcccagggctgggggccacctacacagatggtgaggtcggaccatggcgcccctgcccccgggaatgggccccaggcagggctgctgtgagggccaaggtctggccacgctggccagtacccatgtccgggcctgaatgcacagcccctgcccccgaccccacagctcactccactaaccagctctctctcttttgactttcagaccagttgttaaattgcccgcctccgccaagggccccctgggtgtgtaatgtccagtccccagccaggctctgtcccctgccatacctagactgtgtgtttcatatttttttggaaagagaagtgaacatccagccccaatcatggtatcattcggtctgtcctcagcgtggcttggacggggcctgtgtcagagtggtcagtgctgacccctggggctcttgggcagaaagatgaggagacagaggtccagggtgggttacatagcacatccagggctaagcaagaaataattcagaggtcctaccctctgtctagggacccccctcccaagcctggccttggccttggcacaaagtcctccttgataggagatcccactcactcctggaggctgcccctgaggcttggcccagctctaggagcagtccccagggtcagggagcccctggtgtggaaagaggccccaaggtagtaaaccctgcccctgttactgtgctccagagacctcctaagggaagggacagttcctggaaggccctccagctggatgctggggatcagcgataggtgaggggacacagtgtaggagctccccatgtagaaaagggaatgtggggagggcgttaggagcttgcaggcattaggactgtcctgagcaaggtctgcagcccccagctctgctcaccccgaatcctgccccttgtttccacacctaccattcctcctctcctgatccccagcatccagctgaggtccaaggtctttgtcctagaatcagagtggggaggggacagcctggggctgcccagagactgtgggtggagctgcctgctgcactcagcagtgcggtcagagaagggcttttggtcttgaagtccaggtaccatccccccttagcatacagggggaagggcctgagaggaatgtaaggaaaccagcccagatcagtcccaaggccagagtcctttgtcctacatctccctgaaccagagtgtgccctgcccctcatgctcagacctctcccaccccaaaccctctcccgggactcagtctccctggccactgcgtatcaggcttctggggaaagcatccatcacagaacctccccttccctgccacgcaccttccttggccagctccattctggcctcctccaccacctgccttgtgaccacatctcccaccacgtccccagatctcaagaacgcagctcagcttctccttcgagcttgactctgagagggaaagtgacggaaaccaagtcagatgagatgactgccatgtacactgcagtcaagggcagggaggggaggaatgacacaaatggcagggagctgctgggggactgacccctcggcgcctggcctggccggtgctgcacatccaccggggcacaacagggacttgtccagcctctggtcagaggatgtggccacctgaccctaaataggttccccagagtcctgcccctctaatgaatgagaactgcaggagtttctcctctgggtgcctgaagctatagtgcaatggttcccaaccctgcatgcacattcgaatcacctgggggcacaatgcctaggctccaaccccagacactcttatttcattggtctgggtggacctggcatcagaagtcatgtagctcctcaggggactgtagtgtgtggtcagcactgagggctcctctatgaggcctcaagcccaggtgactctgtgaggtctgcagagggagaaaagaacccacaagggaagaggtggaggtcaggcacggtggctcacgcttgtaatcccagcactttgggaggccgaggtgggtagatacctgaagtcaggagttcgagactagcctggccaatatggtaaaaccccgtgtctattaaaaatacaaaaattagctggctgtggtggtgggcacctgtaatcccagctactcgggaggctgaggcaggagaatcgcttgaactcgggaggtggaggttgcagtcagccaagatcgtgccactgcacaccatcctggatgacagagcaagactccatcac

SEQ ID NO: 120001 - DNA, 2959 bp, Homo sapiens
  Payload ID: 3531
  Gene Symbol: CLDN2
  Gene Name: claudin 2
  Uniprot ID: P57739
  ENST ID: ENST00000336803
  CDS Start-End: 327-1019
agatggattttgcaaagctgtggttaacgattagaaatcctttatcacctcagcccgtggccccttgtacttcgctcccctccctcaggatccctttctccctctccaggggcatctccccctccaaggctctgcaaagaactgccctgtcttctagatgccttcttgaggctgcttgtggccacccacagacacttgtaaggaggagagaagtcagcctggcagagagactctgaaatgagggattagaggtgttcaaggagcaagagcttcagcctgaagacaagggagcagtccctgaagacgcttctactgagaggtctgccatggcctctcttggcctccaacttgtgggctacatcctaggccttctggggcttttgggcacactggttgccatgctgctccccagctggaaaacaagttcttatgtcggtgccagcattgtgacagcagttggcttctccaagggcctctggatggaatgtgccacacacagcacaggcatcacccagtgtgacatctatagcacccttctgggcctgcccgctgacatccaggctgcccaggccatgatggtgacatccagtgcaatctcctccctggcctgcattatctctgtggtgggcatgagatgcacagtcttctgccaggaatcccgagccaaagacagagtggcggtagcaggtggagtctttttcatccttggaggcctcctgggattcattcctgttgcctggaatcttcatgggatcctacgggacttctactcaccactggtgcctgacagcatgaaatttgagattggagaggctctttacttgggcattatttcttccctgttctccctgatagctggaatcatcctctgcttttcctgctcatcccagagaaatcgctccaactactacgatgcctaccaagcccaacctcttgccacaaggagctctccaaggcctggtcaacctcccaaagtcaagagtgagttcaattcctacagcctgacagggtatgtgtgaagaaccaggggccagagctggggggtggctgggtctgtgaaaaacagtggacagcaccccgagggccacaggtgagggacactaccactggatcgtgtcagaaggtgctgctgaggatagactgactttggccattggattgagcaaaggcagaaatgggggctagtgtaacagcatgcaggttgaattgccaaggatgctcgccatgccagcctttctgttttcctcaccttgctgctcccctgccctaagtccccaaccctcaacttgaaaccccattcccttaagccaggactcagaggatccctttgccctctggtttacctgggactccatccccaaacccactaatcacatcccactgactgaccctctgtgatcaaagaccctctctctggctgaggttggctcttagctcattgctggggatgggaaggagaagcagtggcttttgtgggcattgctctaacctacttctcaagcttccctccaaagaaactgattggccctggaacctccatcccactcttgttatgactccacagtgtccagactaatttgtgcatgaactgaaataaaaccatcctacggtatccagggaacagaaagcaggatgcaggatgggaggacaggaaggcagcctgggacatttaaaaaaataaaaatgaaaaaaaaacccagaacccatttctcagggcactttccagaattctctcatatttgtgggctgggatcaagcctgcagcttgaggaaagcacaaggaaaggaaagaagatctggtggaaagctcaggtggcagcggactctgactccactgaggaactgcctcagaagctgcgatcacaactttggctgaagcccctgcctcactctagggcacctgacctggcctcttgcctaaaccacaaggctaagggctatagacaatggtttccttaggaacagtaaaccagtttttctagggatggcccttggctgggggatgacagtgtgggagctgtggggtactgaggaagacaccattccttgacggtgtctaagaagccaggtggatgtgtgtggtggctccagtgggtgtttctactctgccagtgagaggcagccccctagaaactcttcaggcgtaatggaaaatcagctcaaatgagatcaggcccccccagggtccacccacagagcactacagagcctctgaaagaccatagcaccaagcgagccccttcagattcccccactgtccatcggaagatgctccagagtggctagagggcatctaagggctccagcatggcatatccatgcccacggtgctgtgtccatgatctgagtgatagctgcactgctgcctgggattgcagctgaggtgggagtggagaatggttcccaggaagacagttccacctctaaggtccgaaaatgttccctttaccctggagtgggagtgaggggtcatacaccaaaggtattttccctcaccagtctaggcatgactggcttctgaaaaattccagcacacctcctcgaacctcattgtcagcagagagggcccatctgttgtctgtaacatgcctttcacatgtccaccttcttgccatgttccagctgctctcccaacctggaaggccgtctccccttagccaagtcctcctcaggcttggagaacttcctcagcgtcacctccttcattgagccttctctgatcactccatccctctcctacccctccctcccccaaccctcaatgtataaattgcttcttgatgcttagcattcacaatttttgattgatcgttatttgtgtgtgtgtgtccgatctcacaagtatattgtaaacccttcggtgggtgggggccatatcctagacctctctgtatcccccagactatctgtaacagtgccaggcacacagtaggtgatcaataaacacttgttgattgag

SEQ ID NO: 120002 - DNA, 3150 bp, Homo sapiens
  Payload ID: 3531
  Gene Symbol: CLDN2
  Gene Name: claudin 2
  Uniprot ID: P57739
  ENST ID: ENST00000541806
  CDS Start-End: 520-1212
cccagagcaagccgattctctacacactgccttcccttcctgtaagactcatcaaaaaggcaccccaaccttgcatggatctgctgttggtattccttggggtgaagccagaagtcaggctttccacagagagacgggactacatggccacctgggaaggctagggagtcaaagggcctgaggaatgactacttccctccacaagggcattccctgccctgctctgcttcctgggggcttcagcaagccttccttctagagctcctagaaccctcccatggtcaacacaacagcagcccagacaatgagatgcaagaggcctgagctcacaggccattcaggtcttctagatgccttcttgaggctgcttgtggccacccacagacacttgtaaggaggagagaagtcagcctggcagagagactctgaaatgagggattagaggtgttcaaggagcaagagcttcagcctgaagacaagggagcagtccctgaagacgcttctactgagaggtctgccatggcctctcttggcctccaacttgtgggctacatcctaggccttctggggcttttgggcacactggttgccatgctgctccccagctggaaaacaagttcttatgtcggtgccagcattgtgacagcagttggcttctccaagggcctctggatggaatgtgccacacacagcacaggcatcacccagtgtgacatctatagcacccttctgggcctgcccgctgacatccaggctgcccaggccatgatggtgacatccagtgcaatctcctccctggcctgcattatctctgtggtgggcatgagatgcacagtcttctgccaggaatcccgagccaaagacagagtggcggtagcaggtggagtctttttcatccttggaggcctcctgggattcattcctgttgcctggaatcttcatgggatcctacgggacttctactcaccactggtgcctgacagcatgaaatttgagattggagaggctctttacttgggcattatttcttccctgttctccctgatagctggaatcatcctctgcttttcctgctcatcccagagaaatcgctccaactactacgatgcctaccaagcccaacctcttgccacaaggagctctccaaggcctggtcaacctcccaaagtcaagagtgagttcaattcctacagcctgacagggtatgtgtgaagaaccaggggccagagctggggggtggctgggtctgtgaaaaacagtggacagcaccccgagggccacaggtgagggacactaccactggatcgtgtcagaaggtgctgctgaggatagactgactttggccattggattgagcaaaggcagaaatgggggctagtgtaacagcatgcaggttgaattgccaaggatgctcgccatgccagcctttctgttttcctcaccttgctgctcccctgccctaagtccccaaccctcaacttgaaaccccattcccttaagccaggactcagaggatccctttgccctctggtttacctgggactccatccccaaacccactaatcacatcccactgactgaccctctgtgatcaaagaccctctctctggctgaggttggctcttagctcattgctggggatgggaaggagaagcagtggcttttgtgggcattgctctaacctacttctcaagcttccctccaaagaaactgattggccctggaacctccatcccactcttgttatgactccacagtgtccagactaatttgtgcatgaactgaaataaaaccatcctacggtatccagggaacagaaagcaggatgcaggatgggaggacaggaaggcagcctgggacatttaaaaaaataaaaatgaaaaaaaaacccagaacccatttctcagggcactttccagaattctctcatatttgtgggctgggatcaagcctgcagcttgaggaaagcacaaggaaaggaaagaagatctggtggaaagctcaggtggcagcggactctgactccactgaggaactgcctcagaagctgcgatcacaactttggctgaagcccctgcctcactctagggcacctgacctggcctcttgcctaaaccacaaggctaagggctatagacaatggtttccttaggaacagtaaaccagtttttctagggatggcccttggctgggggatgacagtgtgggagctgtggggtactgaggaagacaccattccttgacggtgtctaagaagccaggtggatgtgtgtggtggctccagtgggtgtttctactctgccagtgagaggcagccccctagaaactcttcaggcgtaatggaaaatcagctcaaatgagatcaggcccccccagggtccacccacagagcactacagagcctctgaaagaccatagcaccaagcgagccccttcagattcccccactgtccatcggaagatgctccagagtggctagagggcatctaagggctccagcatggcatatccatgcccacggtgctgtgtccatgatctgagtgatagctgcactgctgcctgggattgcagctgaggtgggagtggagaatggttcccaggaagacagttccacctctaaggtccgaaaatgttccctttaccctggagtgggagtgaggggtcatacaccaaaggtattttccctcaccagtctaggcatgactggcttctgaaaaattccagcacacctcctcgaacctcattgtcagcagagagggcccatctgttgtctgtaacatgcctttcacatgtccaccttcttgccatgttccagctgctctcccaacctggaaggccgtctccccttagccaagtcctcctcaggcttggagaacttcctcagcgtcacctccttcattgagccttctctgatcactccatccctctcctacccctccctcccccaaccctcaatgtataaattgcttcttgatgcttagcattcacaatttttgattgatcgttatttgtgtgtgtgtgtccgatctcacaagtatattgtaaacccttcggtgggtgggggccatatcctagacctctctgtatcccccagactatctgtaacagtgccaggcacacagtaggtgatcaataaacacttgttgattg

SEQ ID NO: 120003 - DNA, 2919 bp, Homo sapiens
  Payload ID: 3531
  Gene Symbol: CLDN2
  Gene Name: claudin 2
  Uniprot ID: P57739
  ENST ID: ENST00000540876
  CDS Start-End: 289-981
aggcatggctgcccttttagcgtgtcccagcctgccaagagggagtgccctggagagacccttgctcaggagcactgccaggggatcagtgccccatttgtacctgcaaggtcttctagatgccttcttgaggctgcttgtggccacccacagacacttgtaaggaggagagaagtcagcctggcagagagactctgaaatgagggattagaggtgttcaaggagcaagagcttcagcctgaagacaagggagcagtccctgaagacgcttctactgagaggtctgccatggcctctcttggcctccaacttgtgggctacatcctaggccttctggggcttttgggcacactggttgccatgctgctccccagctggaaaacaagttcttatgtcggtgccagcattgtgacagcagttggcttctccaagggcctctggatggaatgtgccacacacagcacaggcatcacccagtgtgacatctatagcacccttctgggcctgcccgctgacatccaggctgcccaggccatgatggtgacatccagtgcaatctcctccctggcctgcattatctctgtggtgggcatgagatgcacagtcttctgccaggaatcccgagccaaagacagagtggcggtagcaggtggagtctttttcatccttggaggcctcctgggattcattcctgttgcctggaatcttcatgggatcctacgggacttctactcaccactggtgcctgacagcatgaaatttgagattggagaggctctttacttgggcattatttcttccctgttctccctgatagctggaatcatcctctgcttttcctgctcatcccagagaaatcgctccaactactacgatgcctaccaagcccaacctcttgccacaaggagctctccaaggcctggtcaacctcccaaagtcaagagtgagttcaattcctacagcctgacagggtatgtgtgaagaaccaggggccagagctggggggtggctgggtctgtgaaaaacagtggacagcaccccgagggccacaggtgagggacactaccactggatcgtgtcagaaggtgctgctgaggatagactgactttggccattggattgagcaaaggcagaaatgggggctagtgtaacagcatgcaggttgaattgccaaggatgctcgccatgccagcctttctgttttcctcaccttgctgctcccctgccctaagtccccaaccctcaacttgaaaccccattcccttaagccaggactcagaggatccctttgccctctggtttacctgggactccatccccaaacccactaatcacatcccactgactgaccctctgtgatcaaagaccctctctctggctgaggttggctcttagctcattgctggggatgggaaggagaagcagtggcttttgtgggcattgctctaacctacttctcaagcttccctccaaagaaactgattggccctggaacctccatcccactcttgttatgactccacagtgtccagactaatttgtgcatgaactgaaataaaaccatcctacggtatccagggaacagaaagcaggatgcaggatgggaggacaggaaggcagcctgggacatttaaaaaaataaaaatgaaaaaaaaacccagaacccatttctcagggcactttccagaattctctcatatttgtgggctgggatcaagcctgcagcttgaggaaagcacaaggaaaggaaagaagatctggtggaaagctcaggtggcagcggactctgactccactgaggaactgcctcagaagctgcgatcacaactttggctgaagcccctgcctcactctagggcacctgacctggcctcttgcctaaaccacaaggctaagggctatagacaatggtttccttaggaacagtaaaccagtttttctagggatggcccttggctgggggatgacagtgtgggagctgtggggtactgaggaagacaccattccttgacggtgtctaagaagccaggtggatgtgtgtggtggctccagtgggtgtttctactctgccagtgagaggcagccccctagaaactcttcaggcgtaatggaaaatcagctcaaatgagatcaggcccccccagggtccacccacagagcactacagagcctctgaaagaccatagcaccaagcgagccccttcagattcccccactgtccatcggaagatgctccagagtggctagagggcatctaagggctccagcatggcatatccatgcccacggtgctgtgtccatgatctgagtgatagctgcactgctgcctgggattgcagctgaggtgggagtggagaatggttcccaggaagacagttccacctctaaggtccgaaaatgttccctttaccctggagtgggagtgaggggtcatacaccaaaggtattttccctcaccagtctaggcatgactggcttctgaaaaattccagcacacctcctcgaacctcattgtcagcagagagggcccatctgttgtctgtaacatgcctttcacatgtccaccttcttgccatgttccagctgctctcccaacctggaaggccgtctccccttagccaagtcctcctcaggcttggagaacttcctcagcgtcacctccttcattgagccttctctgatcactccatccctctcctacccctccctcccccaaccctcaatgtataaattgcttcttgatgcttagcattcacaatttttgattgatcgttatttgtgtgtgtgtgtccgatctcacaagtatattgtaaacccttcggtgggtgggggccatatcctagacctctctgtatcccccagactatctgtaacagtgccaggcacacagtaggtgatcaataaacacttgttgattg

SEQ ID NO: 120004 - DNA, 1209 bp, Homo sapiens
  Payload ID: 3532
  Gene Symbol: CLDN20
  Gene Name: claudin 20
  Uniprot ID: P56880
  ENST ID: ENST00000367165
  CDS Start-End: 381-1040
aaagttcgaagtgggatgatcacgggcagacctgggtggttgggaacaggaagcatatggcatcttgcaggctataggcaccacaaaatggaacgcaggaggacaggggcttgggagagccacttcactgtcgggtaaaacaacggagcaagatgagtgcctccggatgcttggtttccccaccctccagtgtctgcttgctcttcaagtacctccaccaagctaatgacagtccactttaggacatcacgggcctcgaggttacaactttcccaggctttgttatttggttctctactgcacagaaatagatagaattctgacagccatcattgttaaacatcaggattttctaagaggacagacttaacagtaacatcatggcctcagcaggactccagctccttgctttcatcctggccttatctggggtctctggagtgctcacagccactctgctgcccaactggaaggtgaatgtggatgtggactccaacatcataacagccattgtacagctgcacgggctctggatggactgtacgtggtacagcactgggatgttcagctgtgccctgaaacactccattctgtccctccccatccacgtgcaggctgcgagagccaccatggtcctggcgtgtgttctgtctgctttggggatctgcacttccacagtaggaatgaaatgtactcgcttaggaggggacagagaaaccaagagccatgcttcctttgctggaggagtctgtttcatgtctgcaggaatctctagtttaatctcgacagtgtggtacacaaaggagatcatagcaaactttctggatctgacagttccagaaagcaacaaacatgaacctggaggagctatctatatcggattcatttctgcaatgctgttgtttatctctggcatgattttctgcacctcctgtataaaaaggaatccagaagctagactcgacccacccacacagcagcctatctctaacacacagctcgagaacaattccacacacaatctgaaggattatgtgtaaataactgagtaatgcatatgaaatggaacttttgggtgccaaatgggacttttagattaaaaaaaaatcagaattatgcttaactttccctacaaagaaagtagaatgtaaaatactttaacaactacaaagtagtttaaaatgccaataaaactatcatatacaatta

SEQ ID NO: 120005 - DNA, 2581 bp, Homo sapiens
  Payload ID: 3533
  Gene Symbol: CLDN22
  Gene Name: claudin 22
  Uniprot ID: Q8N7P3
  ENST ID: ENST00000323319
  CDS Start-End: 557-1219
ctgataagattgatttatttggttaagaaatacttttcttaaacctatttttaaaaaataacactcagtattaccataacatgcacatttgaaatgtgagaactataagagatgaaaatctgacaggtgcagttagtgaaacacaaagcaggaggagttgaaccaaaaccatcagttaaacattttgcatttagacttaattctttgttagaaaggttgggaataacatgaaagccattttaaccttgacaatgaaaggagattatcacttaattatatttcagtgacaaactgctttctgtcaaatccagcccacaggacacaaacacaatcttggccacaccttggcattactggttggcggcattatttccctatccttttgtgaaacccattcaacatggaatcaaacaatagcaactctggcaagaatcctcctatatacacaatgaagaaatatttctgagtttcataagttataacacaagtgtcacacttcttttcacagcaaccgaagggcaggagttagtttggctaaagctctcaggacattataatggctttagtatttagaactgtagctcaactagctggagtttcattatctttgctgggatgggttttatcctgtcttacaaactacctgccacactggaagaacctcaacctggacttaaatgaaatggaaaactggaccatgggactctggcaaacctgtgtcatccaagaggaagtggggatgcaatgcaaggactttgactccttcctggctttgcctgctgaactcagggtctccaggatcttaatgtttctgtcaaatgggctgggatttctgggcctgctggtctctgggtttggcctggactgtttgagaattggagagagtcagagagatctcaagaggcgactgctgatcctgggaggaattctgtcctgggcctcgggagtcacagccctggttcccgtctcttgggttgcccacaagacggttcaggagttctgggatgagaacgtcccagactttgtccccaggtgggagtttggggaggccctgtttctgggctggtttgctggactttctcttctgctaggagggtgtctgctccactgtgcagcctgctccagccacgctcccctagcttcgggccactacgcagtggcacaaacacaagatcatcatcaagaactggagacgagaaacaccaacctgaaacactaagccagaaaggacaagcgtctgctgttcaggagacgcttgctcaacactggatttggtaggatgtcccgctctagtcatctcactgtgcttttgatttttgaaaatgcatcttttcctgtggctattaaactatagtttctttccaagactggtaaaccatttttatcttctagtctgagaccaaaatcaatcaagactgaatagtaatgacacccattactgtggatgagttttctcaattttaaaatagcgattgcacagaagtggtaaataaaacattaatctctatgtatctttgaaggtattattcatatggagcggaatcatttggcaaatcatttacttatttcaggtgtttaagataacctagtataataagcctgaggtcttgttgcatatttatttaaaatgcatgacgtcttattatataaaataattactagctctttagaagcttcagaggtgaaaggtgtagacacatcatctccttctgaatcagagacctcagtgtctctatggaacctttttcaaaaggcagccacattcagtcacgccttctatactgtcagaggcaggagggcgatcttgggttttggatgattcaagtagactctgccacacaaacgtgcttctgcatcctgtgttctgtatttcacgggcagcgtttctggcttcccaggcactgagcagcctgtggggggcacggcagggcaggactggggtgtgtgggtagataacctcctgggacggctgcctctctgtggagcacactgccagcccaggcgcagcgaccacagagcacatattctggagcccttcattttatttgctcaatgaaaatacttcgtccttttttatcagcaatacatatagttccaacaagaactattcatcacaaactgccagcctggggatttcttcatgaaatattttgtatttgcttggtacatggttcaaggaaactcttgtgtttgtgccaatcagggaaataaactgaacaataaacgacactgaaatagagtattaggcaatatgtagctttgtttttgcttttttttttaaaaaaaaccactgaatttttttccacccacaaacacatggaaagtgcagaaaccagttaatctatgtgatgtatttgcatacgtttacaaacaagacaaattaaaacagaaacatgttcagaatttaacctgattaaatattaagttcagtcctgagcttttgatatttaagacaatatagataaagcaatagcaaaaaattttaatttatttgatttgcatgctacagagatttagctaaactttgttcatttggctagcaatattctttttgtacctgtaacacttaagattctgatat

SEQ ID NO: 120006 - DNA, 2169 bp, Homo sapiens
  Payload ID: 3534
  Gene Symbol: CLDN23
  Gene Name: claudin 23
  Uniprot ID: Q96B33
  ENST ID: ENST00000519106
  CDS Start-End: 462-1340
ggcgtggcccagccgcccggctgcaaggtggggtgtccccgccgctcggatccccatctcacctgccgcgggcgaggtggccccgccgcttcctgcgctcacctcgggtccctccctcccgggccaggtttggccgcggcagccgcccctgggcgcccgcgcccggacccgcggtttcggtcagacccgcccgcgggctggtttcgattagggccagtaggagggcggagcggccgggacgccaggagggaactagcctaagtggggacggtccccgtgcaggagacaaagagcgtccctggagcgatcagggctcaggagcccgacccggagcccggggcgtccgcgctgacttcgggtccccggagcctggggcacggcagggagaagacgacggcggagaaggcgacagcggagaaggaaggcaggctgcaggggcgccgtcggcgcggcgggccgggatgcggacgccggtggtgatgacgctgggcatggtgttggcgccctgcgggctcctgctcaacctgaccggcaccctggcgcccggctggcggctggtgaagggcttcctgaaccagccagtggacgtggagttgtaccagggcctgtgggacatgtgtcgcgagcagagcagccgcgagcgcgagtgcggccagacggaccagtggggctacttcgaggcccagcccgtgctggtggcgcgggcactcatggtcacctcgctggccgccacggtcctggggcttctgctggcgtcgctgggcgtgcgctgctggcaggacgagcccaacttcgtgctggcagggctctcgggcgtcgtgctcttcgtcgctggcctcctcggcctcatcccggtgtcctggtacaaccacttcttgggggaccgcgacgtgctgcccgccccggccagcccggtcacggtgcaggtcagctacagcctggtcctgggctacctgggcagctgcctcctgctgctgggcggcttctcgctggcgctcagcttcgcgccctggtgcgacgagcgttgtcgccgccgccgcaagggaccctccgccgggcctcgccgcagcagcgtcagcaccatccaagtggagtggcccgagcccgacctggcgcccgccatcaagtactacagcgacggccagcaccgaccgccgcctgcccagcaccgcaagcccaagcccaagcccaaggtcggcttccccatgccgcggccgcggcccaaggcctacaccaactcggtggacgtcctcgacggggaggggtgggagtcccaggacgctccctcgtgcagcacccacccctgcgacagctcgctgccctgcgactccgacctctagacgcttgtagagcctggggggcgccgggtggcaaaggactcacccccgcacaggcccgcctggcttcgagttggaacccggacacttgcccctcactggtgtggatggaaatctgcctttcgtgggaccaaacaggactccttggacgattagttcaggttgggtttggttttcttcttaaagagtttagttttcctctccagagggatcagggtcctcttagggagtgacgggcttttcatatatttttgctgaagaatatatggaaagggtggcatttgcgtcacgtggaccagggacagtgctgaaatcagcagtgctcagaaacaatttaacatgttgaaacgacaatattctaaaatactgatgaatcttgcatcaatataattattgggttttttttctttttcctgctgtataactccttgccatgcaaactctcaagaggccaatatattcctggccatgtttgaatgagcctcttaaaataaacttagagccatgcaaatgccagcagcttaatggatttcatggaatgaaataccgtgattaactcatagctacatatcattgcataaatgggatttatcttttttctcacttatttttgcggtgaaagtcgagggcatgcaagagtttctcttccagaagccaagaggagaacaaaggtcctaatgctgtactattccaccctttggacgcctcatccaggacgcagaggactctaggtttaacattttgtacaaaatggaacctgttaatcatattaaagcacatatgtatatatcttttatttataaataaaattttaaaacaatagtttcagtat

SEQ ID NO: 120007 - DNA, 597 bp, Homo sapiens
  Payload ID: 3535
  Gene Symbol: CLDN24
  Gene Name: claudin 24
  ENST ID: ENST00000514470
  CDS Start-End: 7-597
acagcaatgcaatctgttggacttttactatctctcctgggatggattttatccattattacaacttatttgccacactggaagaacctcaacctggacttaaatgaaatggaaaactggaccatgggactctggcaaacctgtgtcatccaagaggaagtggggatgcaatgcaaggactttgactccttcctggctttgcctgctgaactcagggtctccaggatcttaatgtttctgtcaaatgggctgggatttctgggcctgctggtctctgggtttggcctggactgtttgagaattggagagagtcagagagatctcaagaggcgactgctcattctgggaggaattctgtcctgggcctcgggaatcacagccctggttcccgtctcttgggttgcccacaagacggttcaggagttctgggatgagaacgtcccagactttgtccccaggtgggagtttggggaggccctgtttctgggctggtttgctggactttctcttctgctaggagggtgtctgctcaactgcgcagcctgctccagccacgctcccctagctttgggccactatgcagtggcgcaaatgcaa

SEQ ID NO: 120008 - DNA, 663 bp, Homo sapiens
  Payload ID: 3535
  Gene Symbol: CLDN24
  Gene Name: claudin 24
  Uniprot ID: A6NM45
  ENST ID: ENST00000541814
  CDS Start-End: 1-663
atggctttaatctttagaacagcaatgcaatctgttggacttttactatctctcctgggatggattttatccattattacaacttatttgccacactggaagaacctcaacctggacttaaatgaaatggaaaactggaccatgggactctggcaaacctgtgtcatccaagaggaagtggggatgcaatgcaaggactttgactccttcctggctttgcctgctgaactcagggtctccaggatcttaatgtttctgtcaaatgggctgggatttctgggcctgctggtctctgggtttggcctggactgtttgagaattggagagagtcagagagatctcaagaggcgactgctcattctgggaggaattctgtcctgggcctcgggaatcacagccctggttcccgtctcttgggttgcccacaagacggttcaggagttctgggatgagaacgtcccagactttgtccccaggtgggagtttggggaggccctgtttctgggctggtttgctggactttctcttctgctaggagggtgtctgctcaactgcgcagcctgctccagccacgctcccctagctttgggccactatgcagtggcgcaaatgcaaactcagtgtccctacctggaagatgggacagcagatcctcaagtgtaa

SEQ ID NO: 120009 - DNA, 754 bp, Homo sapiens
  Payload ID: 3536
  Gene Symbol: CLDN25
  Gene Name: claudin 25
  Uniprot ID: C9JDP6
  ENST ID: ENST00000453129
  CDS Start-End: 50-739
ctgacccactcgtgctccttttctttctgcatctgtggtgggagtgactatggcctggagtttccgtgcaaaagtccagctcggggggctacttctctccctccttggctgggtctgctcctgtgttaccaccatcctgccccagtggaagactcttaatctggaactgaacgagatggagacctggatcatggggatttgggaggtctgcgtggatcgagaggaagtcgccactgtgtgcaaggcctttgaatccttcttgtctctgccccaggagctccaggtagcccgcatcctcatggtagcctcccatgggctgggcctattggggcttttgctctgcagctttgggtctgaatgcttccagtttcacaggatcagatgggtattcaagaggcggcttggtctcctgggaaggactttggaggcatccgcttcagccactaccctccttccagtctcctgggtggcccatgccacaatccaagacttctgggatgacagcatccctgacatcatacctcggtgggagtttggaggtgccctctacttgggctgggctgctggtattttcctggctcttggtgggctactcctcatcttctcggcctgcctgggaaaagaagatgtgccttttcctttgatggctggtcccacagtccccctatcctgtgctccagtggaggagtcagatggctccttccacctcatgctaagacctaggaacctggtcatctaggactggcttctgcca

SEQ ID NO: 120010 - DNA, 1274 bp, Homo sapiens
  Payload ID: 3537
  Gene Symbol: CLDN3
  Gene Name: claudin 3
  Uniprot ID: O15551
  ENST ID: ENST00000395145
  CDS Start-End: 222-884
agcccagtcgccgccgcccgcccacaaagccacaggcaggtgcaggcgcagccgcggcgagagcgtatggagccgagccgttagcgcgcgccgtcggtgagtcagtccgtccgtccgtccgtccgtcggggcgccgcagctcccgccaggcccagcggccccggcccctcgtctccccgcacccggagccacccggtggagcgggccttgccgcggcagccatgtccatgggcctggagatcacgggcaccgcgctggccgtgctgggctggctgggcaccatcgtgtgctgcgcgttgcccatgtggcgcgtgtcggccttcatcggcagcaacatcatcacgtcgcagaacatctgggagggcctgtggatgaactgcgtggtgcagagcaccggccagatgcagtgcaaggtgtacgactcgctgctggcactgccacaggaccttcaggcggcccgcgccctcatcgtggtggccatcctgctggccgccttcgggctgctagtggcgctggtgggcgcccagtgcaccaactgcgtgcaggacgacacggccaaggccaagatcaccatcgtggcaggcgtgctgttccttctcgccgccctgctcaccctcgtgccggtgtcctggtcggccaacaccattatccgggacttctacaaccccgtggtgcccgaggcgcagaagcgcgagatgggcgcgggcctgtacgtgggctgggcggccgcggcgctgcagctgctggggggcgcgctgctctgctgctcgtgtcccccacgcgagaagaagtacacggccaccaaggtcgtctactccgcgccgcgctccaccggcccgggagccagcctgggcacaggctacgaccgcaaggactacgtctaagggacagacgcagggagaccccaccaccaccaccaccaccaacaccaccaccaccaccgcgagctggagcgcgcaccaggccatccagcgtgcagccttgcctcggaggccagcccacccccagaagccaggaagcccccgcgctggactggggcagcttccccagcagccacggctttgcgggccgggcagtcgacttcggggcccagggaccaacctgcatggactgtgaaacctcacccttctggagcacggggcctgggtgaccgccaatacttgaccaccccgtcgagccccatcgggccgctgcccccatgctcgcgctgggcagggaccggcagccctggaaggggcacttgatatttttcaataaaagcctttcgttttgca

SEQ ID NO: 120011 - DNA, 995 bp, Homo sapiens
  Payload ID: 3538
  Gene Symbol: CLDN34
  Gene Name: claudin 34
  Uniprot ID: H7C241
  ENST ID: ENST00000445307
  CDS Start-End: 1-645
atggtctggttctgcaacagtgccgactgccaattttcagtcttcgcccttaccaccataggatggatcctctcctctacgtccacgggcctcgtggagtggcgaatatggtacatgaaagacacctcgctctacccccctggaatcgcctgcgtgggaatatttagagtctgcatttaccggcgtcgcaccaacagcaccacaaccaaattttgttaccgatacagctaccaggacacctttctcccttttgaaatttccatggctcaacgcttcctactgactgccagcattttcggattcttcgggagagcctttaacatgtttgcacttagaaacatgtccatgagaatgtttgaggaggacacctacaattcattcgttgtttcaggaattctcaacattgctgctggtgtctttaacttaattgctgtgctccagaactacgatgccgtcataaactcacaggggatcaccttcctgccatctctccaaatgcccttcaagccagatgtgcaggaagttggcactgccattcaagtggcagggataggtgtcttgccgatgctgttaactgggatgttttctctgttttacaaatgtcccccgtacggccaagtgcatcctggtatttcagaaatgtgaatttcctggttgcattggctttgcaaatctaagatttctgggagtttatggaaaatgttattagcatgctctaccaaatatttccaacgactcaagaccgtggcatgggtagtttgggacagaaggtggccaactgcctccttctgttatcttgtgtatctgaatgtggctcactgatttgttggttgaattgagaacttttatttaaaagtcttcccacctgccagttggtcttattgcatctgaattttaattattgttggctacagcaaataatcaaccctgtaaactaagagtagggaaataagagtttctgagtacattaacttctcacatttccctcttaaact

SEQ ID NO: 120012 - DNA, 1831 bp, Homo sapiens
  Payload ID: 3539
  Gene Symbol: CLDN4
  Gene Name: claudin 4
  Uniprot ID: O14493
  ENST ID: ENST00000340958
  CDS Start-End: 340-969
aaaagtgcctttgttggcctgggctcaggaatccagagaaactggtcaggaggaggccccagtgacaaaaacccctccctctgcccccgcccctctgccagagccatataactgctcaacctgtccccgagagagagtgccctggcagctgtcggctggaaggaactggtctgctcacacttgctggcttgcgcatcaggactggctttatctcctgactcacggtgcaaaggtgcactctgcgaacgttaagtccgtccccagcgcttggaatcctacggcccccacagccggatcccctcagccttccaggtcctcaactcccgtggacgctgaacaatggcctccatggggctacaggtaatgggcatcgcgctggccgtcctgggctggctggccgtcatgctgtgctgcgcgctgcccatgtggcgcgtgacggccttcatcggcagcaacattgtcacctcgcagaccatctgggagggcctatggatgaactgcgtggtgcagagcaccggccagatgcagtgcaaggtgtacgactcgctgctggcactgccgcaggacctgcaggcggcccgcgccctcgtcatcatcagcatcatcgtggctgctctgggcgtgctgctgtccgtggtggggggcaagtgtaccaactgcctggaggatgaaagcgccaaggccaagaccatgatcgtggcgggcgtggtgttcctgttggccggccttatggtgatagtgccggtgtcctggacggcccacaacatcatccaagacttctacaatccgctggtggcctccgggcagaagcgggagatgggtgcctcgctctacgtcggctgggccgcctccggcctgctgctccttggcggggggctgctttgctgcaactgtccaccccgcacagacaagccttactccgccaagtattctgctgcccgctctgctgctgccagcaactacgtgtaaggtgccacggctccactctgttcctctctgctttgttcttccctggactgagctcagcgcaggctgtgaccccaggagggccctgccacgggccactggctgctggggactggggactgggcagagactgagccaggcaggaaggcagcagccttcagcctctctggcccactcggacaacttcccaaggccgcctcctgctagcaagaacagagtccaccctcctctggatattggggagggacggaagtgacagggtgtggtggtggagtggggagctggcttctgctggccaggatagcttaaccctgactttgggatctgcctgcatcggcgttggccactgtccccatttacattttccccactctgtctgcctgcatctcctctgttccgggtaggccttgatatcacctctgggactgtgccttgctcaccgaaacccgcgcccaggagtatggctgaggccttgcccacccacctgcctgggaagtgcagagtggatggacgggtttagaggggaggggcgaaggtgctgtaaacaggtttgggcagtggtgggggagggggccagagaggcggctcaggttgcccagctctgtggcctcaggactctctgcctcacccgcttcagcccagggcccctggagactgatcccctctgagtcctctgccccttccaaggacactaatgagcctgggagggtggcagggaggaggggacagcttcacccttggaagtcctggggtttttcctcttccttctttgtggtttctgttttgtaatttaagaagagctattcatcactgtaattattattattttctacaataaatgggacctgtgcacaggaggaaattt

SEQ ID NO: 120013 - DNA, 4108 bp, Homo sapiens
  Payload ID: 3539
  Gene Symbol: CLDN4
  Gene Name: claudin 4
  Uniprot ID: O14493
  ENST ID: ENST00000431918
  CDS Start-End: 2627-3256
aaggctacctggctgggaccacagatggagtctcgctctatcacccaggctggagtgcaatggcgcgatcttggctcaccgcaacctccatctcccaggttaaagcgattctcctgcctcagtctcctgagtagctgtgattacaggcgtgcgccatcacacccagctaatttttgtattttttagtagagatggggtttcaccatgttggcctaactcctgacctcgtgatctgcccatcttggcctccgaaagtactgggattacaggtgtgagccactgcacccggcccaaacatttctttttcttttcttttgagacagagtcttgctctgttgcccgtggctggagtgaaatggtgcgattatagttcactgcagcctcaaactcctggccttaagcgatcctcccatcctggcctcccaaagtgctgggattataggcatgagccgcagcaaccactcctcacatttcttgagcatctgtgatgtatcaagccagatgctgggcactgaggttgcagaaggcattgttcctgtcttctaggagccccaggctagcagggaagacggatgtgtatagagttaaccacaataccaggcctcaacttcccgtctgtaacacaggtggaccatgctagattgtcccagcctgccctgtgcttcattagccggtcaacagatccatctcaaatacctcccatgggtactcactgattgctttaacccaaaccatggcactcttgaagactttccctcaggaagctcaaggactatgcatccttctgggtcagaactggacacacagccaccagtgctggacaatggcggcggctcagggacacactggagccctggcccctgcagagctcccagcatggttgggaagagagatgcaaaatgaccacacggcgggtgaggaggagctccctcggtgcggctgggatgagccctagacactctcaatcacccccacgatgaccccttcccagaggtcccctcagtcatctgccctgaaccaagctcttcctgatcctagaccctccaccctccctctatcttccagggcttggtgacattccaggcagaaatttctgacccttttactttggtccctccctccccagcccagtctctggtcaaactggattcctggctgttcccagaacgagctgcctttccccaccttgccacctctgcccttgttctctctgcctgaatgtcctccttcactagcctcgctgccttgcacatctctcctgagggctgtcatcccagaatgagctgcatttgtccagcctggcccaccgtctaccagaacgtcctccttcagcctgtcccactgccttgcaaaacttttctgggggacctgttcacgatgccttctgtagcatactccaagaatccggcgccccctggagttgtgccacacagcacccctttgcagtcaagctccctcagcaccaccacctccaccctggaagagttccccttccctttgaaatctcatgggactttgcacccactctggctttattggaaggctttgtatgtctccacagggtaaacacccatttactggggtgatgatgtctccaggatctagttcatgtttgtcgttggtgactggccccacccagttctgggcaagcaggctggatcccggcaggaacagagcccaccagcctaaacttccatggaggtggagaggggacaggcttctgtctctttttggctgaaggtgcatcatgtccaaggcccctcttctagccaagcagagaagctgggtgataaggatgggtgagagtgggtgatgtaccccggagtcctggcctcccggctcctcactcccctacacgtaactttatccggccaatgccgcaaagactgctggtgaggccagatgcatgagtgatcatactcacaacagtcgtgaaactgccagtgatgaaactggtaaggacaagaaatgacaataatcaaggtggggtttctcgtggacgtttccaagacttcattctcaaattctctccctcagggtccccaccctgtcctcccacctaagcctggaatgagggggcactggcctgtggggaccctggtcttcaggctcccaaacctggctgggtctggttgccccctggccttaacctgtgaacatccagctgtccctgggctgtgattcagtgtctgtctcccgggtgacctcagcatgggctttgaggaaggggagagagtagtttcttctgagactggatagtgactcagggacccggggctggggcctcaaaagtgcctttgttggcctgggctcaggaatccagagaaactggtcaggaggaggccccagtgacaaaaacccctccctctgcccccgcccctctgccagagccatataactgctcaacctgtccccgagagagagtgccctggcagctgtcggctggaaggaactggtctgctcacacttgctggcttgcgcatcaggactggctttatctcctgactcacggtgcaaaggtgcactctgcgaacgttaagtccgtccccagcgcttggaatcctacggcccccacagccggatcccctcagccttccaggtcctcaactcccgtggacgctgaacaatggcctccatggggctacaggtaatgggcatcgcgctggccgtcctgggctggctggccgtcatgctgtgctgcgcgctgcccatgtggcgcgtgacggccttcatcggcagcaacattgtcacctcgcagaccatctgggagggcctatggatgaactgcgtggtgcagagcaccggccagatgcagtgcaaggtgtacgactcgctgctggcactgccgcaggacctgcaggcggcccgcgccctcgtcatcatcagcatcatcgtggctgctctgggcgtgctgctgtccgtggtggggggcaagtgtaccaactgcctggaggatgaaagcgccaaggccaagaccatgatcgtggcgggcgtggtgttcctgttggccggccttatggtgatagtgccggtgtcctggacggcccacaacatcatccaagacttctacaatccgctggtggcctccgggcagaagcgggagatgggtgcctcgctctacgtcggctgggccgcctccggcctgctgctccttggcggggggctgctttgctgcaactgtccaccccgcacagacaagccttactccgccaagtattctgctgcccgctctgctgctgccagcaactacgtgtaaggtgccacggctccactctgttcctctctgctttgttcttccctggactgagctcagcgcaggctgtgaccccaggagggccctgccacgggccactggctgctggggactggggactgggcagagactgagccaggcaggaaggcagcagccttcagcctctctggcccactcggacaacttcccaaggccgcctcctgctagcaagaacagagtccaccctcctctggatattggggagggacggaagtgacagggtgtggtggtggagtggggagctggcttctgctggccaggatagcttaaccctgactttgggatctgcctgcatcggcgttggccactgtccccatttacattttccccactctgtctgcctgcatctcctctgttccgggtaggccttgatatcacctctgggactgtgccttgctcaccgaaacccgcgcccaggagtatggctgaggccttgcccacccacctgcctgggaagtgcagagtggatggacgggtttagaggggaggggcgaaggtgctgtaaacaggtttgggcagtggtgggggagggggccagagaggcggctcaggttgcccagctctgtggcctcaggactctctgcctcacccgcttcagcccagggcccctggagactgatcccctctgagtcctctgccccttccaaggacactaatgagcctgggagggtggcagggaggaggggacagcttcacccttggaagtcctggggtttttcctcttccttctttgtggtttctgttttgtaatttaagaagagctattcatcactgtaattattattattttctacaataaatgggacctgtgcacag

SEQ ID NO: 120014 - DNA, 4163 bp, Homo sapiens
  Payload ID: 3539
  Gene Symbol: CLDN4
  Gene Name: claudin 4
  Uniprot ID: O14493
  ENST ID: ENST00000435050
  CDS Start-End: 2681-3310
cacttgtgctgagctactggctgatccccaaggacatccttctggcctctccttcacacctgggtcccctagccctgcatggagtctcgctctatcacccaggctggagtgcaatggcgcgatcttggctcaccgcaacctccatctcccaggttaaagcgattctcctgcctcagtctcctgagtagctgtgattacaggcgtgcgccatcacacccagctaatttttgtattttttagtagagatggggtttcaccatgttggcctaactcctgacctcgtgatctgcccatcttggcctccgaaagtactgggattacaggtgtgagccactgcacccggcccaaacatttctttttcttttcttttgagacagagtcttgctctgttgcccgtggctggagtgaaatggtgcgattatagttcactgcagcctcaaactcctggccttaagcgatcctcccatcctggcctcccaaagtgctgggattataggcatgagccgcagcaaccactcctcacatttcttgagcatctgtgatgtatcaagccagatgctgggcactgaggttgcagaaggcattgttcctgtcttctaggagccccaggctagcagggaagacggatgtgtatagagttaaccacaataccaggcctcaacttcccgtctgtaacacaggtggaccatgctagattgtcccagcctgccctgtgcttcattagccggtcaacagatccatctcaaatacctcccatgggtactcactgattgctttaacccaaaccatggcactcttgaagactttccctcaggaagctcaaggactatgcatccttctgggtcagaactggacacacagccaccagtgctggacaatggcggcggctcagggacacactggagccctggcccctgcagagctcccagcatggttgggaagagagatgcaaaatgaccacacggcgggtgaggaggagctccctcggtgcggctgggatgagccctagacactctcaatcacccccacgatgaccccttcccagaggtcccctcagtcatctgccctgaaccaagctcttcctgatcctagaccctccaccctccctctatcttccagggcttggtgacattccaggcagaaatttctgacccttttactttggtccctccctccccagcccagtctctggtcaaactggattcctggctgttcccagaacgagctgcctttccccaccttgccacctctgcccttgttctctctgcctgaatgtcctccttcactagcctcgctgccttgcacatctctcctgagggctgtcatcccagaatgagctgcatttgtccagcctggcccaccgtctaccagaacgtcctccttcagcctgtcccactgccttgcaaaacttttctgggggacctgttcacgatgccttctgtagcatactccaagaatccggcgccccctggagttgtgccacacagcacccctttgcagtcaagctccctcagcaccaccacctccaccctggaagagttccccttccctttgaaatctcatgggactttgcacccactctggctttattggaaggctttgtatgtctccacagggtaaacacccatttactggggtgatgatgtctccaggatctagttcatgtttgtcgttggtgactggccccacccagttctgggcaagcaggctggatcccggcaggaacagagcccaccagcctaaacttccatggaggtggagaggggacaggcttctgtctctttttggctgaaggtgcatcatgtccaaggcccctcttctagccaagcagagaagctgggtgataaggatgggtgagagtgggtgatgtaccccggagtcctggcctcccggctcctcactcccctacacgtaactttatccggccaatgccgcaaagactgctggtgaggccagatgcatgagtgatcatactcacaacagtcgtgaaactgccagtgatgaaactggtaaggacaagaaatgacaataatcaaggtggggtttctcgtggacgtttccaagacttcattctcaaattctctccctcagggtccccaccctgtcctcccacctaagcctggaatgagggggcactggcctgtggggaccctggtcttcaggctcccaaacctggctgggtctggttgccccctggccttaacctgtgaacatccagctgtccctgggctgtgattcagtgtctgtctcccgggtgacctcagcatgggctttgaggaaggggagagagtagtttcttctgagactggatagtgactcagggacccggggctggggcctcaaaagtgcctttgttggcctgggctcaggaatccagagaaactggtcaggaggaggccccagtgacaaaaacccctccctctgcccccgcccctctgccagagccatataactgctcaacctgtccccgagagagagtgccctggcagctgtcggctggaaggaactggtctgctcacacttgctggcttgcgcatcaggactggctttatctcctgactcacggtgcaaaggtgcactctgcgaacgttaagtccgtccccagcgcttggaatcctacggcccccacagccggatcccctcagccttccaggtcctcaactcccgtggacgctgaacaatggcctccatggggctacaggtaatgggcatcgcgctggccgtcctgggctggctggccgtcatgctgtgctgcgcgctgcccatgtggcgcgtgacggccttcatcggcagcaacattgtcacctcgcagaccatctgggagggcctatggatgaactgcgtggtgcagagcaccggccagatgcagtgcaaggtgtacgactcgctgctggcactgccgcaggacctgcaggcggcccgcgccctcgtcatcatcagcatcatcgtggctgctctgggcgtgctgctgtccgtggtggggggcaagtgtaccaactgcctggaggatgaaagcgccaaggccaagaccatgatcgtggcgggcgtggtgttcctgttggccggccttatggtgatagtgccggtgtcctggacggcccacaacatcatccaagacttctacaatccgctggtggcctccgggcagaagcgggagatgggtgcctcgctctacgtcggctgggccgcctccggcctgctgctccttggcggggggctgctttgctgcaactgtccaccccgcacagacaagccttactccgccaagtattctgctgcccgctctgctgctgccagcaactacgtgtaaggtgccacggctccactctgttcctctctgctttgttcttccctggactgagctcagcgcaggctgtgaccccaggagggccctgccacgggccactggctgctggggactggggactgggcagagactgagccaggcaggaaggcagcagccttcagcctctctggcccactcggacaacttcccaaggccgcctcctgctagcaagaacagagtccaccctcctctggatattggggagggacggaagtgacagggtgtggtggtggagtggggagctggcttctgctggccaggatagcttaaccctgactttgggatctgcctgcatcggcgttggccactgtccccatttacattttccccactctgtctgcctgcatctcctctgttccgggtaggccttgatatcacctctgggactgtgccttgctcaccgaaacccgcgcccaggagtatggctgaggccttgcccacccacctgcctgggaagtgcagagtggatggacgggtttagaggggaggggcgaaggtgctgtaaacaggtttgggcagtggtgggggagggggccagagaggcggctcaggttgcccagctctgtggcctcaggactctctgcctcacccgcttcagcccagggcccctggagactgatcccctctgagtcctctgccccttccaaggacactaatgagcctgggagggtggcagggaggaggggacagcttcacccttggaagtcctggggtttttcctcttccttctttgtggtttctgttttgtaatttaagaagagctattcatcactgtaattattattattttctacaataaatgggacctgtgcacagg

SEQ ID NO: 120015 - DNA, 2357 bp, Homo sapiens
  Payload ID: 3540
  Gene Symbol: CLDN5
  Gene Name: claudin 5
  ENST ID: ENST00000403084
  CDS Start-End: 874-1785
atcgccactggtgggagggcagggcacagcccctccgtgtccctttgtctctcctgtctgaaggccagagcaggctgctaggcctggggccaccactgcccctgggtgctacacccagtgtgctgggtcactgggaacttcctgaagtggtgtcacctgaactgggcccccaaggatggggtgcgggcagtaccgcaggaagaggagcagcccctgtgaagattgagaggtctgggaagcccctgcggcttgggagagtgggggtcgccaggcagggggaaagcccctgtgccaccgctttttgccagagactcaggctccagagaggcagtgagtggcatggggggtgaggctggggccctgggcctgacctccacacgcctgcctggcctctctgtttgccatgggatgagagagacagtgctgggactcagagcggggctggagagtgagagtgcgagaaagggcctgggtggggcttggaccccggggcgggctttctggagagcccccctacgagggcctctacggcggtgacggggtggggggcttctgcaaaccttggtcagggaagtggagctggctcgagtggaagagaccacccggctcagtcggggatgtgggagtggactgggtggtgcagactgggggtcgagcgccttctgaagtgacggggccgggacgcgcagggaggcggcccaagaagcgcgccctaggccagcccagaatgcgctcggccgcgactaggacaacggcgggtggggctgggggcggctgccgggcggggagcggtcccgcgccctcagctacccctcaagagccgttgtttccctaacttcagctgccagaggctctgtgattggctgcggcacgatgacccgcgcacggattggctgcttcgggccggggggccgggcccgggggacagaatccgcccccgaaccttcaaagagggtaccccccggcaggagctggcagacccaggaggtgcgacagacccgcggggcaaacggactggggccaagagccgggagcgcgggcgcaaaggcaccagggcccgcccagggcgccgcgcagcacggccttgggggttctgcgggccttcgggtgcgcgtctcgcctctagccatggggtccgcagcgttggagatcctgggcctggtgctgtgcctggtgggctgggggggtctgatcctggcgtgcgggctgcccatgtggcaggtgaccgccttcctggaccacaacatcgtgacggcgcagaccacctggaaggggctgtggatgtcgtgcgtggtgcagagcaccgggcacatgcagtgcaaagtgtacgactcggtgctggctctgagcaccgaggtgcaggcggcgcgggcgctcaccgtgagcgccgtgctgctggcgttcgttgcgctcttcgtgaccctggcgggcgcgcagtgcaccacctgcgtggccccgggcccggccaaggcgcgtgtggccctcacgggaggcgtgctctacctgttttgcgggctgctggcgctcgtgccactctgctggttcgccaacattgtcgtccgcgagttttacgacccgtctgtgcccgtgtcgcagaagtacgagctgggcgcagcgctgtacatcggctgggcggccaccgcgctgctcatggtaggcggctgcctcttgtgctgcggcgcctgggtctgcaccggccgtcccgacctcagcttccccgtgaagtactcagcgccgcggcggcccacggccaccggcgactacgacaagaagaactacgtctgagggcgctgggcacggccgggcccctcctgccagccacgcctgcgaggcgttggataagcctggggagccccgcatggaccgcggcttccgccgggtagcgcggcgcgcaggctcctcggaacgtccggctctgcgccccgacgcggctcctggatccgctcctgcctgcgcccgcagctgaccttctcctgccactagcccggccctgcccttaacagacggaatgaagtttccttttctgtgcgcggcgctgtttccataggcagagcgggtgtcagactgaggatttcgcttcccctccaagacgctgggggtcttggctgctgccttacttcccagaggctcctgctgacttcggaggggcggatgcagagcccagggcccccaccggaagatgtgtacagctggtctttactccatcggcagggcccgagcccagggaccagtgacttggcctggacctcccggtctcactccagcatctccccaggcaaggcttgtgggcaccggagcttgagagagggcgggagtgggaaggctaagaatctgcttagtaaatggtttgaactctc

SEQ ID NO: 120016 - DNA, 2548 bp, Homo sapiens
  Payload ID: 3540
  Gene Symbol: CLDN5
  Gene Name: claudin 5
  ENST ID: ENST00000406028
  CDS Start-End: 1062-1973
aaagcagaacaatggctgggggtgagcaggtggccttggccagtgctctgccccaagggccctttaccagagatcaggggtttgtgtccctgcctaaccaggacacctccgatctccacctgcaggccctggaccactgtggcactgtggacacaaggccgcttctgccccttggacgccgagccccttcccacctctgggatcttgcactggctattgcttctgctctgcctggaacttcttccccggatccctgtgaaatgtcacctcttcagagaggccttcaccactgtctttcctgcccagttcttggttgataggttcctgtcagctccttctgggcaggagcttcttgtgctgtgtgctctgcctagagacagtgcttgccacgaagtaggtgagcagaccctccatgagtggcaggaaaggtgggtgcaccctcatgcccctccggagtctggcctgggctactcagaggccagcctccatctgaggtgggtttgtctggggtggcgtcagcccctgcggccctctctgggcctctctgcattggcattgttccactgcagcctggggcctcgaccaacatagtggggtcagggtagaaaccagattgtgaaaggtgaagcctgagactcctctgccacgtccctgagatgctgtgaggctgccgccaaagaaacatgagcttgctggggccaccctagggtgacagctaggagagaagaaaaacaggcagccaggtgagaagggagagccttgggctggctgcagctccaagctggctagagggcaacaggcagcctcctgtgcaggacagacgcatgaagacagccaccctgtggaggttattcctggatactaggtgggaaagtcggcaagcaaaaggacaggtccagctcaagcttctaaaagcaatgctgggggacggtgcagcaaggtgttcctggaaatgacctcggcaacacatcttagaagatgagcaggacccaacctgacagatacacgctgcgggcagaagaggccaagctgccagaggctctgtgattggctgcggcacgatgacccgcgcacggattggctgcttcgggccggggggccgggcccgggggacagaatccgcccccgaaccttcaaagagggtaccccccggcaggagctggcagacccaggaggtgcgacagacccgcggggcaaacggactggggccaagagccgggagcgcgggcgcaaaggcaccagggcccgcccagggcgccgcgcagcacggccttgggggttctgcgggccttcgggtgcgcgtctcgcctctagccatggggtccgcagcgttggagatcctgggcctggtgctgtgcctggtgggctgggggggtctgatcctggcgtgcgggctgcccatgtggcaggtgaccgccttcctggaccacaacatcgtgacggcgcagaccacctggaaggggctgtggatgtcgtgcgtggtgcagagcaccgggcacatgcagtgcaaagtgtacgactcggtgctggctctgagcaccgaggtgcaggcggcgcgggcgctcaccgtgagcgccgtgctgctggcgttcgttgcgctcttcgtgaccctggcgggcgcgcagtgcaccacctgcgtggccccgggcccggccaaggcgcgtgtggccctcacgggaggcgtgctctacctgttttgcgggctgctggcgctcgtgccactctgctggttcgccaacattgtcgtccgcgagttttacgacccgtctgtgcccgtgtcgcagaagtacgagctgggcgcagcgctgtacatcggctgggcggccaccgcgctgctcatggtaggcggctgcctcttgtgctgcggcgcctgggtctgcaccggccgtcccgacctcagcttccccgtgaagtactcagcgccgcggcggcccacggccaccggcgactacgacaagaagaactacgtctgagggcgctgggcacggccgggcccctcctgccagccacgcctgcgaggcgttggataagcctggggagccccgcatggaccgcggcttccgccgggtagcgcggcgcgcaggctcctcggaacgtccggctctgcgccccgacgcggctcctggatccgctcctgcctgcgcccgcagctgaccttctcctgccactagcccggccctgcccttaacagacggaatgaagtttccttttctgtgcgcggcgctgtttccataggcagagcgggtgtcagactgaggatttcgcttcccctccaagacgctgggggtcttggctgctgccttacttcccagaggctcctgctgacttcggaggggcggatgcagagcccagggcccccaccggaagatgtgtacagctggtctttactccatcggcagggcccgagcccagggaccagtgacttggcctggacctcccggtctcactccagcatctccccaggcaaggcttgtgggcaccggagcttgagagagggcgggagtgggaaggctaagaatctgcttagtaaatggtttgaactctctcc

SEQ ID NO: 120017 - DNA, 1760 bp, Homo sapiens
  Payload ID: 3540
  Gene Symbol: CLDN5
  Gene Name: claudin 5
  ENST ID: ENST00000413119
  CDS Start-End: 302-1213
ttccggagggtggcctgggggctggggtgccagggacaccatcgccactggtgggagggcagggcacagcccctccgtgtccctttgtctctcctgtctgaaggccagagcaggctgctaggcctggggccaccactgcccctgggtgctacacccagtgtgctgggtcactgggaacttcctgaagtggtgtcacctgaactgggcccccaaggatggggtgcgggcagtaccgcaggaagaggagcagcccctgtgaagattgagagctgccagaggctctgtgattggctgcggcacgatgacccgcgcacggattggctgcttcgggccggggggccgggcccgggggacagaatccgcccccgaaccttcaaagagggtaccccccggcaggagctggcagacccaggaggtgcgacagacccgcggggcaaacggactggggccaagagccgggagcgcgggcgcaaaggcaccagggcccgcccagggcgccgcgcagcacggccttgggggttctgcgggccttcgggtgcgcgtctcgcctctagccatggggtccgcagcgttggagatcctgggcctggtgctgtgcctggtgggctgggggggtctgatcctggcgtgcgggctgcccatgtggcaggtgaccgccttcctggaccacaacatcgtgacggcgcagaccacctggaaggggctgtggatgtcgtgcgtggtgcagagcaccgggcacatgcagtgcaaagtgtacgactcggtgctggctctgagcaccgaggtgcaggcggcgcgggcgctcaccgtgagcgccgtgctgctggcgttcgttgcgctcttcgtgaccctggcgggcgcgcagtgcaccacctgcgtggccccgggcccggccaaggcgcgtgtggccctcacgggaggcgtgctctacctgttttgcgggctgctggcgctcgtgccactctgctggttcgccaacattgtcgtccgcgagttttacgacccgtctgtgcccgtgtcgcagaagtacgagctgggcgcagcgctgtacatcggctgggcggccaccgcgctgctcatggtaggcggctgcctcttgtgctgcggcgcctgggtctgcaccggccgtcccgacctcagcttccccgtgaagtactcagcgccgcggcggcccacggccaccggcgactacgacaagaagaactacgtctgagggcgctgggcacggccgggcccctcctgccagccacgcctgcgaggcgttggataagcctggggagccccgcatggaccgcggcttccgccgggtagcgcggcgcgcaggctcctcggaacgtccggctctgcgccccgacgcggctcctggatccgctcctgcctgcgcccgcagctgaccttctcctgccactagcccggccctgcccttaacagacggaatgaagtttccttttctgtgcgcggcgctgtttccataggcagagcgggtgtcagactgaggatttcgcttcccctccaagacgctgggggtcttggctgctgccttacttcccagaggctcctgctgacttcggaggggcggatgcagagcccagggcccccaccggaagatgtgtacagctggtctttactccatcggcagggcccgagcccagggaccagtgacttggcctggacctcccggtctcactccagcatctccccaggcaaggcttgtgggcaccggagcttgagagagggcgggagtgggaaggctaagaatc

SEQ ID NO: 120018 - DNA, 1374 bp, Homo sapiens
  Payload ID: 3540
  Gene Symbol: CLDN5
  Gene Name: claudin 5
  Uniprot ID: O00501
  ENST ID: ENST00000618236
  CDS Start-End: 146-802
ggaggtgcgacagacccgcggggcaaacggactggggccaagagccgggagcgcgggcgcaaaggcaccagggcccgcccagggcgccgcgcagcacggccttgggggttctgcgggccttcgggtgcgcgtctcgcctctagccatggggtccgcagcgttggagatcctgggcctggtgctgtgcctggtgggctgggggggtctgatcctggcgtgcgggctgcccatgtggcaggtgaccgccttcctggaccacaacatcgtgacggcgcagaccacctggaaggggctgtggatgtcgtgcgtggtgcagagcaccgggcacatgcagtgcaaagtgtacgactcggtgctggctctgagcaccgaggtgcaggcggcgcgggcgctcaccgtgagcgccgtgctgctggcgttcgttgcgctcttcgtgaccctggcgggcgcgcagtgcaccacctgcgtggccccgggcccggccaaggcgcgtgtggccctcacgggaggcgtgctctacctgttttgcgggctgctggcgctcgtgccactctgctggttcgccaacattgtcgtccgcgagttttacgacccgtctgtgcccgtgtcgcagaagtacgagctgggcgcagcgctgtacatcggctgggcggccaccgcgctgctcatggtaggcggctgcctcttgtgctgcggcgcctgggtctgcaccggccgtcccgacctcagcttccccgtgaagtactcagcgccgcggcggcccacggccaccggcgactacgacaagaagaactacgtctgagggcgctgggcacggccgggcccctcctgccagccacgcctgcgaggcgttggataagcctggggagccccgcatggaccgcggcttccgccgggtagcgcggcgcgcaggctcctcggaacgtccggctctgcgccccgacgcggctcctggatccgctcctgcctgcgcccgcagctgaccttctcctgccactagcccggccctgcccttaacagacggaatgaagtttccttttctgtgcgcggcgctgtttccataggcagagcgggtgtcagactgaggatttcgcttcccctccaagacgctgggggtcttggctgctgccttacttcccagaggctcctgctgacttcggaggggcggatgcagagcccagggcccccaccggaagatgtgtacagctggtctttactccatcggcagggcccgagcccagggaccagtgacttggcctggacctcccggtctcactccagcatctccccaggcaaggcttgtgggcaccggagcttgagagagggcgggagtgggaaggctaagaatctgcttagtaaatggtttgaactctc

SEQ ID NO: 120019 - DNA, 1369 bp, Homo sapiens
  Payload ID: 3541
  Gene Symbol: CLDN6
  Gene Name: claudin 6
  Uniprot ID: P56747
  ENST ID: ENST00000328796
  CDS Start-End: 61-723
cgacactcggcctaggaatttcccttatctccttcgcagtgcagctccttcaacctcgccatggcctctgccggaatgcagatcctgggagtcgtcctgacactgctgggctgggtgaatggcctggtctcctgtgccctgcccatgtggaaggtgaccgctttcatcggcaacagcatcgtggtggcccaggtggtgtgggagggcctgtggatgtcctgcgtggtgcagagcaccggccagatgcagtgcaaggtgtacgactcactgctggcgctgccacaggacctgcaggctgcacgtgccctctgtgtcatcgccctccttgtggccctgttcggcttgctggtctaccttgctggggccaagtgtaccacctgtgtggaggagaaggattccaaggcccgcctggtgctcacctctgggattgtctttgtcatctcaggggtcctgacgctaatccccgtgtgctggacggcgcatgccatcatccgggacttctataaccccctggtggctgaggcccaaaagcgggagctgggggcctccctctacttgggctgggcggcctcaggccttttgttgctgggtggggggttgctgtgctgcacttgcccctcgggggggtcccagggccccagccattacatggcccgctactcaacatctgcccctgccatctctcgggggccctctgagtaccctaccaagaattacgtctgacgtggaggggaatgggggctccgctggcgctagagccatccagaagtggcagtgcccaacagctttgggatgggttcgtaccttttgtttctgcctcctgctatttttcttttgactgaggatatttaaaattcatttgaaaactgagccaaggtgttgactcagactctcacttaggctctgctgtttctcacccttggatgatggagccaaagaggggatgctttgagattctggatcttgacatgcccatcttagaagccagtcaagctatggaactaatgcggaggctgcttgctgtgctggctttgcaacaagacagactgtccccaagagttcctgctgctgctgggggctgggcttccctagatgtcactggacagctgccccccatcctactcaggtctctggagctcctctcttcacccctggaaaaacaaatgatctgttaacaaaggactgcccacctccggaacttctgacctctgtttcctccgtcctgataagacgtccaccccccagggccaggtcccagctatgtagacccccgcccccacctccaacactgcacccttctgccctgcccccctcgtctcaccccctttacactcacatttttatcaaataaagcatgttttgttagtgc

SEQ ID NO: 120020 - DNA, 1739 bp, Homo sapiens
  Payload ID: 3541
  Gene Symbol: CLDN6
  Gene Name: claudin 6
  Uniprot ID: P56747
  ENST ID: ENST00000396925
  CDS Start-End: 430-1092
cgaacggccggacgcggtggctcacgcctttaatcccatcagtttgggagtctgaggcaggcggattacgagagtaggaaacgaaggctcgggaaggttaggtgagttccccatgtcaccgcgctgcttaagtggtgaagcggagtctcaagctctgttctaccctaagcctggcgccctcaccctgggtgagtctggacgtctgccagcccgaggcgggcccagcgaccccagcctccagcgcccccctctgacaagcctgggattcgcacgcccgctgccgtcagggacagggtctctgcccctcctccggggcggtggtccagtgacgtcaccgcttctttaagacccccgcctccgcccctgtcccgacactcggcctaggaatttcccttatctccttcgcagtgcagctccttcaacctcgccatggcctctgccggaatgcagatcctgggagtcgtcctgacactgctgggctgggtgaatggcctggtctcctgtgccctgcccatgtggaaggtgaccgctttcatcggcaacagcatcgtggtggcccaggtggtgtgggagggcctgtggatgtcctgcgtggtgcagagcaccggccagatgcagtgcaaggtgtacgactcactgctggcgctgccacaggacctgcaggctgcacgtgccctctgtgtcatcgccctccttgtggccctgttcggcttgctggtctaccttgctggggccaagtgtaccacctgtgtggaggagaaggattccaaggcccgcctggtgctcacctctgggattgtctttgtcatctcaggggtcctgacgctaatccccgtgtgctggacggcgcatgccatcatccgggacttctataaccccctggtggctgaggcccaaaagcgggagctgggggcctccctctacttgggctgggcggcctcaggccttttgttgctgggtggggggttgctgtgctgcacttgcccctcgggggggtcccagggccccagccattacatggcccgctactcaacatctgcccctgccatctctcgggggccctctgagtaccctaccaagaattacgtctgacgtggaggggaatgggggctccgctggcgctagagccatccagaagtggcagtgcccaacagctttgggatgggttcgtaccttttgtttctgcctcctgctatttttcttttgactgaggatatttaaaattcatttgaaaactgagccaaggtgttgactcagactctcacttaggctctgctgtttctcacccttggatgatggagccaaagaggggatgctttgagattctggatcttgacatgcccatcttagaagccagtcaagctatggaactaatgcggaggctgcttgctgtgctggctttgcaacaagacagactgtccccaagagttcctgctgctgctgggggctgggcttccctagatgtcactggacagctgccccccatcctactcaggtctctggagctcctctcttcacccctggaaaaacaaatgatctgttaacaaaggactgcccacctccggaacttctgacctctgtttcctccgtcctgataagacgtccaccccccagggccaggtcccagctatgtagacccccgcccccacctccaacactgcacccttctgccctgcccccctcgtctcaccccctttacactcacatttttatcaaataaagcatgttttgttagtgca

SEQ ID NO: 120021 - DNA, 461 bp, Homo sapiens
  Payload ID: 3541
  Gene Symbol: CLDN6
  Gene Name: claudin 6
  ENST ID: ENST00000572154
  CDS Start-End: 44-163
atttcccttatctccttcgcagtgcagctccttcaacctcgccatggcctctgccggaatgcagatcctgggagtcgtcctgacactgctgggctgggtgaatggcctggtctcctgtgccctgcccatgtggaaggctctgctgtttctcacccttggatgatggagccaaagaggggatgctttgagattctggatcttgacatgcccatcttagaagccagtcaagctatggaactaatgcggaggctgcttgctgtgctggctttgcaacaagacagactgtccccaagagttcctgctgctgctgggggctgggcttccctagatgtcactggacagctgccccccatcctactcaggtctctggagctcctctcttcacccctggaaaaacaaatgatctgttaacaaaggactgcccacctccggaacttctgacctctgtttcctccgtcctg

SEQ ID NO: 120022 - DNA, 1542 bp, Homo sapiens
  Payload ID: 3542
  Gene Symbol: CLDN7
  Gene Name: claudin 7
  Uniprot ID: O95471
  ENST ID: ENST00000360325
  CDS Start-End: 436-1071
gcccgcacctgctggctcacctccgagccacctctgctgcgcaccgcagcctcggacctacagcccaggatactttgggacttgccggcgctcagaaacgcgcccagacggcccctccaccttttgtttgcctagggtcgccgagagcgcccggagggaaccgcctggccttcggggaccaccaattttgtctggaaccaccctcccggcgtatcctactccctgtgccgcgaggccatcgcttcactggaggggtcgatttgtgtgtagtttggtgacaagatttgcattcacctggcccaaaccctttttgtctctttgggtgaccggaaaactccacctcaagttttcttttgtggggctgccccccaagtgtcgtttgttttactgtagggtctccccgcccggcgcccccagtgttttctgagggcggaaatggccaattcgggcctgcagttgctgggcttctccatggccctgctgggctgggtgggtctggtggcctgcaccgccatcccgcagtggcagatgagctcctatgcgggtgacaacatcatcacggcccaggccatgtacaaggggctgtggatggactgcgtcacgcagagcacggggatgatgagctgcaaaatgtacgactcggtgctcgccctgtccgcggccttgcaggccactcgagccctaatggtggtctccctggtgctgggcttcctggccatgtttgtggccacgatgggcatgaagtgcacgcgctgtgggggagacgacaaagtgaagaaggcccgtatagccatgggtggaggcataattttcatcgtggcaggtcttgccgccttggtagcttgctcctggtatggccatcagattgtcacagacttttataaccctttgatccctaccaacattaagtatgagtttggccctgccatctttattggctgggcagggtctgccctagtcatcctgggaggtgcactgctctcctgttcctgtcctgggaatgagagcaaggctgggtaccgtgtaccccgctcttaccctaagtccaactcttccaaggagtatgtgtgacctgggatctccttgccccagcctgacaggctatgggagtgtctagatgcctgaaagggcctggggctgagctcagcctgtgggcagggtgccggacaaaggcctcctggtcactctgtccctgcactccatgtatagtcctcttgggttgggggtgggggggtgccgttggtgggagagacaaaaagagggagagtgtgctttttgtacagtaataaaaaataagtattgggaagcaggcttttttcccttcagggcctctgctttcctcccgtccagatccttgcagggagcttggaaccttagtgcacctacttcagttcagaacacttagcaccccactgactccactgacaattgactaaaagatgcaggtgctcgtatctcgacattcattcccacccccctcttatttaaatagctaccaaagtacttcttttttaataaaaaaataaagatttttattaggta

SEQ ID NO: 120023 - DNA, 1228 bp, Homo sapiens
  Payload ID: 3542
  Gene Symbol: CLDN7
  Gene Name: claudin 7
  Uniprot ID: O95471
  ENST ID: ENST00000397317
  CDS Start-End: 356-991
aggtcccagtggtttcttcctccagttaggagccttgatgccggaggggacagtgggtcgccgagagcgcccggagggaaccgcctggccttcggggaccaccaattttgtctggaaccaccctcccggcgtatcctactccctgtgccgcgaggccatcgcttcactggaggggtcgatttgtgtgtagtttggtgacaagatttgcattcacctggcccaaaccctttttgtctctttgggtgaccggaaaactccacctcaagttttcttttgtggggctgccccccaagtgtcgtttgttttactgtagggtctccccgcccggcgcccccagtgttttctgagggcggaaatggccaattcgggcctgcagttgctgggcttctccatggccctgctgggctgggtgggtctggtggcctgcaccgccatcccgcagtggcagatgagctcctatgcgggtgacaacatcatcacggcccaggccatgtacaaggggctgtggatggactgcgtcacgcagagcacggggatgatgagctgcaaaatgtacgactcggtgctcgccctgtccgcggccttgcaggccactcgagccctaatggtggtctccctggtgctgggcttcctggccatgtttgtggccacgatgggcatgaagtgcacgcgctgtgggggagacgacaaagtgaagaaggcccgtatagccatgggtggaggcataattttcatcgtggcaggtcttgccgccttggtagcttgctcctggtatggccatcagattgtcacagacttttataaccctttgatccctaccaacattaagtatgagtttggccctgccatctttattggctgggcagggtctgccctagtcatcctgggaggtgcactgctctcctgttcctgtcctgggaatgagagcaaggctgggtaccgtgtaccccgctcttaccctaagtccaactcttccaaggagtatgtgtgacctgggatctccttgccccagcctgacaggctatgggagtgtctagatgcctgaaagggcctggggctgagctcagcctgtgggcagggtgccggacaaaggcctcctggtcactctgtccctgcactccatgtatagtcctcttgggttgggggtgggggggtgccgttggtgggagagacaaaaagagggagagtgtgctttttgtacagtaataaaaaataagtattgggaagc

SEQ ID NO: 120024 - DNA, 1923 bp, Homo sapiens
  Payload ID: 3542
  Gene Symbol: CLDN7
  Gene Name: claudin 7
  ENST ID: ENST00000538261
  CDS Start-End: 903-1340
ggaaaaaaaaggagagcagcgggtgggggcgaaagcagggccgaggagagagcactttggacagaacccggcggggaaagggcggcgccgaggcttgtcaggggcgccccgcagcgtcccaggcgcacctgttgggaagaaaggaaggggcttcccggtgttcgagggaaatccagtccggaggggctgactcggagcttgggactcctggggagccaccgcctcctccccagcggcggtcaaaaccgggcaagcgaaggggcgtgaccctggtgctcaggtttcttcctcctcacctgggcaaggaggggtgggggccacgacttccggttcaggtgagtgtcccttcggtgacgtcaggtcatcctcggccgcccctccggtcccgcctccccctcccgcgctcccggggcgcgcgggccgcgcccccgacgccctacatatactcaggtgcgccccacctgtccgcccgcacctgctggctcacctccgagccacctctgctgcgcaccgcagcctcggacctacagcccaggatactttgggacttgccggcgctcagaaacgcgcccagacggcccctccaccttttgtttgcctagggtcgccgagagcgcccggagggaaccgcctggccttcggggaccaccaattttgtctggaaccaccctcccggcgtatcctactccctgtgccgcgaggccatcgcttcactggaggggtcgatttgtgtgtagtttggtgacaagatttgcattcacctggcccaaaccctttttgtctctttgggtgaccggaaaactccacctcaagttttcttttgtggggctgccccccaagtgtcgtttgttttactgtagggtctccccgcccggcgcccccagtgttttctgagggcggaaatggccaattcgggcctgcagttgctgggcttctccatggccctgctgggctgggtgggtctggtggcctgcaccgccatcccgcagtggcagatgagctcctatgcgggtgacaacatcatcacggcccaggccatgtacaaggggctgtggatggactgcgtcacgcagagcacggggatgatgagctgcaaaatgtacgactcggtgctcgccctgtccgcggccttgcaggccactcgagccctaatggtggtctccctggtgctgggcttcctggccatgtttgtggccacgatgggcatgaagtgcacgcgctgtgggggagacgacaaagtgaagaaggcccgtatagccatgggtggaggcataattttcatcgtggcaggtatgagtttggccctgccatctttattggctgggcagggtctgccctagtcatcctgggaggtgcactgctctcctgttcctgtcctgggaatgagagcaaggctgggtaccgtgtaccccgctcttaccctaagtccaactcttccaaggagtatgtgtgacctgggatctccttgccccagcctgacaggctatgggagtgtctagatgcctgaaagggcctggggctgagctcagcctgtgggcagggtgccggacaaaggcctcctggtcactctgtccctgcactccatgtatagtcctcttgggttgggggtgggggggtgccgttggtgggagagacaaaaagagggagagtgtgctttttgtacagtaataaaaaataagtattgggaagcaggcttttttcccttcagggcctctgctttcctcccgtccagatccttgcagggagcttggaaccttagtgcacctacttcagttcagaacacttagcaccccactgactccactgacaattgactaaaagatgcaggtgctcgtatctcgacattcattcccacccccctcttatttaaatagctaccaaagtacttcttttttaataaaaaaataaagatttttattaggt

SEQ ID NO: 120025 - DNA, 485 bp, Homo sapiens
  Payload ID: 3542
  Gene Symbol: CLDN7
  Gene Name: claudin 7
  ENST ID: ENST00000574070
  CDS Start-End: 187-485
ccgcttggcccaggtcttggacacctgggcgcccctggccctcggcagaacacggcgccggacagaagaggtccagcggttagtgggcgcggccggcggcacgaaggctggagccgcctgcatttccagcaatgacggcgccctttcccctcgcccgcagcggccttgcaggccactcgagccctaatggtggtctccctggtgctgggcttcctggccatgtttgtggccacgatgggcatgaagtgcacgcgctgtgggggagacgacaaagtgaagaaggcccgtatagccatgggtggaggcataattttcatcgtggcaggtcttgccgccttggtagcttgctcctggtatggccatcagattgtcacagacttttataaccctttgatccctaccaacattaagtatgagtttggccctgccatctttattggctgggcagggtctgccctagtcatcctgggaggtgcactgctctc

SEQ ID NO: 120026 - DNA, 605 bp, Homo sapiens
  Payload ID: 3542
  Gene Symbol: CLDN7
  Gene Name: claudin 7
  ENST ID: ENST00000575313
  CDS Start-End: 25-605
ttcttcctccagttaggagccttgatgccggaggggacagtgggtctccccgcccggcgcccccagtgttttctgagggcggaaatggccaattcgggcctgcagttgctgggcttctccatggccctgctgggctgggtgggtctggtggcctgcaccgccatcccgcagtggcagatgagctcctatgcgggtgacaacatcatcacggcccaggccatgtacaaggggctgtggatggactgcgtcacgcagagcacggggatgatgagctgcaaaatgtacgactcggtgctcgccctgtccgcggccttgcaggccactcgagccctaatggtggtctccctggtgctgggcttcctggccatgtttgtggccacgatgggcatgaagtgcacgcgctgtgggggagacgacaaagtgaagaaggcccgtatagccatgggtggaggcataattttcatcgtggcaggtcttgccgccttggtagcttgctcctggtatggccatcagattgtcacagacttttataaccctttgatccctaccaacattaagtatgagtttggccctgccatctttattggctgggcagggtctgccct

SEQ ID NO: 120027 - DNA, 735 bp, Homo sapiens
  Payload ID: 3542
  Gene Symbol: CLDN7
  Gene Name: claudin 7
  ENST ID: ENST00000571881
  CDS Start-End: 301-723
ggtcgccgagagcgcccggagggaaccgcctggccttcggggaccaccaattttgtctggaaccaccctcccggcgtatcctactccctgtgccgcgaggccatcgcttcactggaggggtcgatttgtgtgtagtttggtgacaagatttgcattcacctggcccaaaccctttttgtctctttgggtgaccggaaaactccacctcaagttttcttttgtggggctgccccccaagtgtcgtttgttttactgtagggtctccccgcccggcgcccccagtgttttctgagggcggaaatggccaattcgggcctgcagttgctgggcttctccatggccctgctgggctgggtgggtctggtggcctgcaccgccatcccgcagtggcagatgagctcctatgcgggtgacaacatcatcacggcccaggccatgtacaaggggctgtggatggactgcgtcacgcagagcacggggatgatgagctgcaaaatcggccttgcaggccactcgagccctaatggtggtctccctggtgctgggcttcctggccatgtttgtggccacgatgggcatgaagtgcacgcgctgtgggggagacgacaaagtgaagaaggcccgtatagccatgggtggaggcataattttcatcgtggcaggtcttgccgccttggtagcttgctcctggtatggccatcagattgtcacagacttttataaccctttgatccc

SEQ ID NO: 120028 - DNA, 743 bp, Homo sapiens
  Payload ID: 3542
  Gene Symbol: CLDN7
  Gene Name: claudin 7
  ENST ID: ENST00000571932
  CDS Start-End: 356-743
agaaagattaattgctgatgctgggttccaaggagactggagacaaggcgcaaagggtcgccgagagcgcccggagggaaccgcctggccttcggggaccaccaattttgtctggaaccaccctcccggcgtatcctactccctgtgccgcgaggccatcgcttcactggaggggtcgatttgtgtgtagtttggtgacaagatttgcattcacctggcccaaaccctttttgtctctttgggtgaccggaaaactccacctcaagttttcttttgtggggctgccccccaagtgtcgtttgttttactgtagggtctccccgcccggcgcccccagtgttttctgagggcggaaatggccaattcgggcctgcagttgctgggcttctccatggccctgctgggctgggtgggtctggtggcctgcaccgccatcccgcagtggcagatgagctcctatgcgggtgacaacatcatcacggcccaggccatgtacaaggggctgtggatggactgcgtcacgcagagcacggggatgatgagctgcaaaatgtacgactcggtgctcgccctgtccgcggccttgcaggccactcgagccctaatggtggtctccctggtgctgggcttcctggccatgtttgtggccacgatgggcatgaagtgcacgcgctgtgggggagacgacaaagtgaagaaggcccgtatagccatgggtggaggcataattttcatcgtggcag

SEQ ID NO: 120029 - DNA, 2068 bp, Homo sapiens
  Payload ID: 3543
  Gene Symbol: CLDN8
  Gene Name: claudin 8
  Uniprot ID: P56748
  ENST ID: ENST00000399899
  CDS Start-End: 149-826
agcaaagcagctcttatttgaaaaaccactgggttccgagttcattactacaggaaaaactgttctcttctgtggcacagagaaccctgcttcaaagcagaagtagcagttccggagtccagctggctaaaactcatcccagaggataatggcaacccatgccttagaaatcgctgggctgtttcttggtggtgttggaatggtgggcacagtggctgtcactgtcatgcctcagtggagagtgtcggccttcattgaaaacaacatcgtggtttttgaaaacttctgggaaggactgtggatgaattgcgtgaggcaggctaacatcaggatgcagtgcaaaatctatgattccctgctggctctttctccggacctacaggcagccagaggactgatgtgtgctgcttccgtgatgtccttcttggctttcatgatggccatccttggcatgaaatgcaccaggtgcacgggggacaatgagaaggtgaaggctcacattctgctgacggctggaatcatcttcatcatcacgggcatggtggtgctcatccctgtgagctgggttgccaatgccatcatcagagatttctataactcaatagtgaatgttgcccaaaaacgtgagcttggagaagctctctacttaggatggaccacggcactggtgctgattgttggaggagctctgttctgctgcgttttttgttgcaacgaaaagagcagtagctacagatactcgataccttcccatcgcacaacccaaaaaagttatcacaccggaaagaagtcaccgagcgtctactccagaagtcagtatgtgtagttgtgtatgtttttttaactttactataaagccatgcaaatgacaaaaatctatattactttctcaaaatggaccccaaagaaactttgatttactgttcttaactgcctaatcttaattacaggaactgtgcatcagctatttatgattctataagctatttcagcagaatgagatattaaacccaatgctttgattgttctagaaagtatagtaatttgttttctaaggtggttcaagcatctactctttttatcatttacttcaaaatgacattgctaaagactgcattattttactactgtaatttctccacgacatagcattatgtacatagatgagtgtaacatttatatctcacatagagacatgcttatatggttttatttaaaatgaaatgccagtccattacactgaataaatagaactcaactattgcttttcagggaaatcatggatagggttgaagaaggttactattaattgtttaaaaacagcttagggattaatgtcctccatttataatgaagattaaaatgaaggctttaatcagcattgtaaaggaaattgaatggctttctgatatgctgttttttagcctaggagttagaaatcctaacttctttatcctcttctcccagaggctttttttttcttgtgtattaaattaacatttttaaaaagcagatattttgtcaaggggctttgcattcaaactgcttttccagggctatactcagaagaaagataaaagtgtgatctaagaaaaagtgatggttttaggaaagtgaaaatatttttgtttttgtatttgaagaagaatgatgcattttgacaagaaatcatatatgtatggatatattttaataagtatttgagtacagactttgaggtttcatcaatataaataaaagagcagaaaaatatgtcttggttttcatttgcttaccaaaaaaacaacaacaaaaaaagttgtcctttgagaacttcacctgctcctatgtgggtacctgagtcaaaattgtcatttttgttctgtgaaaaataaatttccttcttgtaccatttctgtttagttttactaaaatctgtaaatactgtatttttctgtttattccaaatttgatgaaactgacaatccaatttgaaagtttgtgtcgacgtctgtctagcttaaatgaatgtgttctatttgctttatacatttatattaataaattgtacatttttctaattatttga

SEQ ID NO: 120030 - DNA, 2050 bp, Homo sapiens
  Payload ID: 3544
  Gene Symbol: CLDN9
  Gene Name: claudin 9
  Uniprot ID: O95484
  ENST ID: ENST00000445369
  CDS Start-End: 908-1561
cagattccagagagtcccaggcgggcgggagtgtgcgatactcggggagctggggcatgtttgcatcacgaaactcggctgggggagagcagaggcagctggggaggggctgcggaaggaggaggctcaggaaggcaagccgacgccccctgtgtgtgtttctgtcctgagcctgttacttttttgacccccgatccgtctcttcttcctcagcttgtcctccatcttcccctcctttacccttggttcccacatgcacagatgctacggacgcttttcctcccctgtccccactcagccgcagcatcccccgctggcccccaggcccctcatccatccgctgcccacgaacccccagccccgcaccctccccgtggctcaggtctcccctatcccggcctccctgcacttcactctgctcctcccctgcctgggccttaaaaccccgcctgcagccgagagcccgcagagtccccaggtggcactgtcagagtcgctcagtgggaacctgcgccagccggcaggagacgtggctgtcctcagcctggcagtgcgtctggagggcctgtgcgagctcagcccaggtgtgacagcggggtggtaagagcagcagcaccctcagggcatccgatgggcggaggcccctcgaggtgacacccaccactcagccgagcgggactacgagtctgctttgtgctccgcgaggaccagaaacacctgcaagaggcacggagaggaggcgcctttcaagaggcgcctttcatggaactgaggactggcctggcttggggacaccaacaagccttccccctcctgctggacacagagacacccacccagcacaccagacacaccctctgagtcacctaggccgcctggggctgagaagacctaaccgaggggccagatggcttcgaccggcttagaactgctgggcatgaccctggctgtgctgggctggctggggaccctggtgtcctgcgccctgcccctgtggaaggtgaccgccttcatcggcaacagcatcgtggtggcccaggtggtgtgggagggcctgtggatgtcctgcgtggtgcagagcacgggccagatgcagtgcaaggtgtacgactcactgctggctctgccgcaggacctgcaggccgcacgtgccctctgtgtcattgccctcctgctggccctgcttggcctcctggtggccatcacaggtgcccagtgtaccacgtgtgtggaggacgaaggtgccaaggcccgtatcgtgctcaccgcgggggtcatcctcctcctcgccggcatcctggtgctcatccctgtgtgctggacggcgcacgccatcatccaggacttctacaaccccctggtggctgaggccctcaagcgggagctgggggcctccctctacctgggctgggcggcggctgcactgcttatgctgggcggggggctcctctgctgcacgtgccccccgccccaggtcgagcggccccgcggacctcggctgggctactccatcccctcccgctcgggtgcatctggactggacaagagggactacgtgtgaggcggaggtttcccctgggagcccactgctccccactgccccgccctttcgaccttggcctgatgaccagatgccctgctccatcacaacctccttccccaggaaaacccactttccaaaagcccaagctacacctggctgcagggctgggtcagctggcctggctgagctcttctcagtggggtcccctttgatgttctcccccaagttgggcagcctagaggtgttgggaaccctggcctgcccccacctccccagtaattgtttccttccgttgcccaggacactggctggccttccttctcttctgagccctcccctgccccaggaaccctggcctcaccaaaacagcagcagctcgttggctccaaaaccagggagcagaccatgccctcccaaccctggagttgtcagggagggcctgcccatcacctccctctccccaacatccccaccctcgagttggaaataaagagcatttgtaactgg

SEQ ID NO: 120031 - DNA, 2161 bp, Homo sapiens
  Payload ID: 3545
  Gene Symbol: CLDND1
  Gene Name: claudin domain containing 1
  Uniprot ID: Q9NY35
  ENST ID: ENST00000341181
  CDS Start-End: 214-975
agtctgtccctcctacaactcccacaaggcccctcggccccgggccgcggcccggcccggagtgggggcgggcggaggcgcgggagttatggagggggcgggctctgcagggaagtgcgtcagaggaggcgcggggagagtagggtgctgtggtctgagctagagggtgaagctggcggagcaggaggatgggcgagcagtctgaatgccagaatggataaccgttttgctacagcatttgtaattgcttgtgtgcttagcctcatttccaccatctacatggcagcctccattggcacagacttctggtatgaatatcgaagtccagttcaagaaaattccagtgatttgaataaaagcatctgggatgaattcattagtgatgaggcagatgaaaagacttataatgatgcactttttcgatacaatggcacagtgggattgtggagacggtgtatcaccatacccaaaaacatgcattggtatagcccaccagaaaggacagagtcatttgatgtggtcacaaaatgtgtgagtttcacactaactgagcagttcatggagaaatttgttgatcccggaaaccacaatagcgggattgatctccttaggacctatctttggcgttgccagttccttttaccttttgtgagtttaggtttgatgtgctttggggctttgatcggactttgtgcttgcatttgccgaagcttatatcccaccattgccacgggcattctccatctccttgcaggtctgtgtacactgggctcagtaagttgttatgttgctggaattgaactactccaccagaaactagagctccctgacaatgtatccggtgaatttggatggtccttctgcctggcttgtgtctctgctcccttacagttcatggcttctgctctcttcatctgggctgctcacaccaaccggaaagagtacaccttaatgaaggcatatcgtgtggcatgagcaagaaactgcctgctttacaattgccatttttatttttttaaaataatactgatattttccccacctctcaattgtttttaatttttatttgtggatataccattttattatgaaaatctattttatttatacacattcaccactaaatacacacttaataccactaaaatttatgtggtttactttaagcgatgccatctttcaaataaactaatctaggtctagacagaaagaaatggatagagacttgacacaaatttatgaaagaaaattgggagtaggaatgtgaccgaaaacaagttgtgctaatgtctgttagacttttcagtaaaactaaagtaactgtatctgttcaactaaaaactctatattagtttctttgggaaacctctcatcgtcaaaactttatgttcactttgctgttgtagatagccagtcaaccagcagtattagtgctgttttcaaagatttaagctctataaaattgggaaattatctaagatcattttccctaagcattgacacatagcttcatctgaggtgagatatggcagctgtttgtatctgcactgtgtctgtctacaaaaagtgaaaaatacagtgtttacttgaaattttaactttgtaactgcaagaattccagttcagccgggcgaggattagtattatttttaactctccgtaagattttcagtaccaccaaattgttttggattttttttctttcctcttcacataccagggttattaaaagtgtgctttctttttacattatattacagttacaaggtaaaattcctcaactgctatttatttattccagcccagtactataaagaacgtttcaccataatgaccctccagagctgggaaacctaccacaagatctaaagttctggctgtccattaacctccaactatggtctttatttcttgtggtaatatgatgtgcctttccttgcctaaatcccttcctggtgtgtatcaacattatttaatgtcttctaattcagtcatttttttataagtatgtctataaacattgaactttaaaaaacttatttatttattccactactgtagcaattgacagattaaaaaaatgtaacttcataatttcttaccataacctcaatgtcttttttaaaaaataaaattaaaaatgaaaagagactcaattgta

SEQ ID NO: 120032 - DNA, 2228 bp, Homo sapiens
  Payload ID: 3545
  Gene Symbol: CLDND1
  Gene Name: claudin domain containing 1
  Uniprot ID: Q9NY35
  ENST ID: ENST00000394180
  CDS Start-End: 288-1049
tatcgccgcctcagacagctttcagtctgtccctcctacaactcccacaaggcccctcggccccgggccgcggcccggcccggagtgggggcgggcggaggcgcgggagttatggagggggcgggctctgcagggaagtgcgtcagaggaggcgcggggagagtagggtgctgtggtctgagctagagggtgaagctggcggagcaggaggatgggcgtatgcaggtgatagactagagaacaagacctctgtctccgtagcatcctggagcagtctgaatgccagaatggataaccgttttgctacagcatttgtaattgcttgtgtgcttagcctcatttccaccatctacatggcagcctccattggcacagacttctggtatgaatatcgaagtccagttcaagaaaattccagtgatttgaataaaagcatctgggatgaattcattagtgatgaggcagatgaaaagacttataatgatgcactttttcgatacaatggcacagtgggattgtggagacggtgtatcaccatacccaaaaacatgcattggtatagcccaccagaaaggacagagtcatttgatgtggtcacaaaatgtgtgagtttcacactaactgagcagttcatggagaaatttgttgatcccggaaaccacaatagcgggattgatctccttaggacctatctttggcgttgccagttccttttaccttttgtgagtttaggtttgatgtgctttggggctttgatcggactttgtgcttgcatttgccgaagcttatatcccaccattgccacgggcattctccatctccttgcaggtctgtgtacactgggctcagtaagttgttatgttgctggaattgaactactccaccagaaactagagctccctgacaatgtatccggtgaatttggatggtccttctgcctggcttgtgtctctgctcccttacagttcatggcttctgctctcttcatctgggctgctcacaccaaccggaaagagtacaccttaatgaaggcatatcgtgtggcatgagcaagaaactgcctgctttacaattgccatttttatttttttaaaataatactgatattttccccacctctcaattgtttttaatttttatttgtggatataccattttattatgaaaatctattttatttatacacattcaccactaaatacacacttaataccactaaaatttatgtggtttactttaagcgatgccatctttcaaataaactaatctaggtctagacagaaagaaatggatagagacttgacacaaatttatgaaagaaaattgggagtaggaatgtgaccgaaaacaagttgtgctaatgtctgttagacttttcagtaaaactaaagtaactgtatctgttcaactaaaaactctatattagtttctttgggaaacctctcatcgtcaaaactttatgttcactttgctgttgtagatagccagtcaaccagcagtattagtgctgttttcaaagatttaagctctataaaattgggaaattatctaagatcattttccctaagcattgacacatagcttcatctgaggtgagatatggcagctgtttgtatctgcactgtgtctgtctacaaaaagtgaaaaatacagtgtttacttgaaattttaactttgtaactgcaagaattccagttcagccgggcgaggattagtattatttttaactctccgtaagattttcagtaccaccaaattgttttggattttttttctttcctcttcacataccagggttattaaaagtgtgctttctttttacattatattacagttacaaggtaaaattcctcaactgctatttatttattccagcccagtactataaagaacgtttcaccataatgaccctccagagctgggaaacctaccacaagatctaaagttctggctgtccattaacctccaactatggtctttatttcttgtggtaatatgatgtgcctttccttgcctaaatcccttcctggtgtgtatcaacattatttaatgtcttctaattcagtcatttttttataagtatgtctataaacattgaactttaaaaaacttatttatttattccactactgtagcaattgacagattaaaaaaatgtaacttcataatttcttaccataacctcaatgtcttttttaaaaaataaaattaaaaatgaaaagagactc

SEQ ID NO: 120033 - DNA, 2170 bp, Homo sapiens
  Payload ID: 3545
  Gene Symbol: CLDND1
  Gene Name: claudin domain containing 1
  ENST ID: ENST00000394181
  CDS Start-End: 164-994
aaggcccctcggccccgggccgcggcccggcccggagtgggggcgggcggaggcgcgggagttatggagggggcgggctctgcagggaagtgcgtcagaggaggcgcggggagagtagggtgctgtggtctgagctagagggtgaagctggcggagcaggaggatgggcggtgatagactagagaacaagacctctgtctccgtagcatcctggagcagtctgaatgccagaatggataaccgttttgctacagcatttgtaattgcttgtgtgcttagcctcatttccaccatctacatggcagcctccattggcacagacttctggtatgaatatcgaagtccagttcaagaaaattccagtgatttgaataaaagcatctgggatgaattcattagtgatgaggcagatgaaaagacttataatgatgcactttttcgatacaatggcacagtgggattgtggagacggtgtatcaccatacccaaaaacatgcattggtatagcccaccagaaaggacagagtcatttgatgtggtcacaaaatgtgtgagtttcacactaactgagcagttcatggagaaatttgttgatcccggaaaccacaatagcgggattgatctccttaggacctatctttggcgttgccagttccttttaccttttgtgagtttaggtttgatgtgctttggggctttgatcggactttgtgcttgcatttgccgaagcttatatcccaccattgccacgggcattctccatctccttgcaggtctgtgtacactgggctcagtaagttgttatgttgctggaattgaactactccaccagaaactagagctccctgacaatgtatccggtgaatttggatggtccttctgcctggcttgtgtctctgctcccttacagttcatggcttctgctctcttcatctgggctgctcacaccaaccggaaagagtacaccttaatgaaggcatatcgtgtggcatgagcaagaaactgcctgctttacaattgccatttttatttttttaaaataatactgatattttccccacctctcaattgtttttaatttttatttgtggatataccattttattatgaaaatctattttatttatacacattcaccactaaatacacacttaataccactaaaatttatgtggtttactttaagcgatgccatctttcaaataaactaatctaggtctagacagaaagaaatggatagagacttgacacaaatttatgaaagaaaattgggagtaggaatgtgaccgaaaacaagttgtgctaatgtctgttagacttttcagtaaaactaaagtaactgtatctgttcaactaaaaactctatattagtttctttgggaaacctctcatcgtcaaaactttatgttcactttgctgttgtagatagccagtcaaccagcagtattagtgctgttttcaaagatttaagctctataaaattgggaaattatctaagatcattttccctaagcattgacacatagcttcatctgaggtgagatatggcagctgtttgtatctgcactgtgtctgtctacaaaaagtgaaaaatacagtgtttacttgaaattttaactttgtaactgcaagaattccagttcagccgggcgaggattagtattatttttaactctccgtaagattttcagtaccaccaaattgttttggattttttttctttcctcttcacataccagggttattaaaagtgtgctttctttttacattatattacagttacaaggtaaaattcctcaactgctatttatttattccagcccagtactataaagaacgtttcaccataatgaccctccagagctgggaaacctaccacaagatctaaagttctggctgtccattaacctccaactatggtctttatttcttgtggtaatatgatgtgcctttccttgcctaaatcccttcctggtgtgtatcaacattatttaatgtcttctaattcagtcatttttttataagtatgtctataaacattgaactttaaaaaacttatttatttattccactactgtagcaattgacagattaaaaaaatgtaacttcataatttcttaccataacctcaatgtcttttttaaaaaataaaattaaaaatgaaaagaga

SEQ ID NO: 120034 - DNA, 2159 bp, Homo sapiens
  Payload ID: 3545
  Gene Symbol: CLDND1
  Gene Name: claudin domain containing 1
  Uniprot ID: Q9NY35
  ENST ID: ENST00000394185
  CDS Start-End: 222-983
ggagtgggggcgggcggaggcgcgggagttatggagggggcgggctctgcagggaagtgcgtcagaggaggcgcggggagagtagggtgctgtggtctgagctagagggtgaagctggcggagcaggaggatgggcgtgttgtctgttttagtatgcaggtgatagactagagaacaagacctctgtctccgtagcatcctggagcagtctgaatgccagaatggataaccgttttgctacagcatttgtaattgcttgtgtgcttagcctcatttccaccatctacatggcagcctccattggcacagacttctggtatgaatatcgaagtccagttcaagaaaattccagtgatttgaataaaagcatctgggatgaattcattagtgatgaggcagatgaaaagacttataatgatgcactttttcgatacaatggcacagtgggattgtggagacggtgtatcaccatacccaaaaacatgcattggtatagcccaccagaaaggacagagtcatttgatgtggtcacaaaatgtgtgagtttcacactaactgagcagttcatggagaaatttgttgatcccggaaaccacaatagcgggattgatctccttaggacctatctttggcgttgccagttccttttaccttttgtgagtttaggtttgatgtgctttggggctttgatcggactttgtgcttgcatttgccgaagcttatatcccaccattgccacgggcattctccatctccttgcaggtctgtgtacactgggctcagtaagttgttatgttgctggaattgaactactccaccagaaactagagctccctgacaatgtatccggtgaatttggatggtccttctgcctggcttgtgtctctgctcccttacagttcatggcttctgctctcttcatctgggctgctcacaccaaccggaaagagtacaccttaatgaaggcatatcgtgtggcatgagcaagaaactgcctgctttacaattgccatttttatttttttaaaataatactgatattttccccacctctcaattgtttttaatttttatttgtggatataccattttattatgaaaatctattttatttatacacattcaccactaaatacacacttaataccactaaaatttatgtggtttactttaagcgatgccatctttcaaataaactaatctaggtctagacagaaagaaatggatagagacttgacacaaatttatgaaagaaaattgggagtaggaatgtgaccgaaaacaagttgtgctaatgtctgttagacttttcagtaaaactaaagtaactgtatctgttcaactaaaaactctatattagtttctttgggaaacctctcatcgtcaaaactttatgttcactttgctgttgtagatagccagtcaaccagcagtattagtgctgttttcaaagatttaagctctataaaattgggaaattatctaagatcattttccctaagcattgacacatagcttcatctgaggtgagatatggcagctgtttgtatctgcactgtgtctgtctacaaaaagtgaaaaatacagtgtttacttgaaattttaactttgtaactgcaagaattccagttcagccgggcgaggattagtattatttttaactctccgtaagattttcagtaccaccaaattgttttggattttttttctttcctcttcacataccagggttattaaaagtgtgctttctttttacattatattacagttacaaggtaaaattcctcaactgctatttatttattccagcccagtactataaagaacgtttcaccataatgaccctccagagctgggaaacctaccacaagatctaaagttctggctgtccattaacctccaactatggtctttatttcttgtggtaatatgatgtgcctttccttgcctaaatcccttcctggtgtgtatcaacattatttaatgtcttctaattcagtcatttttttataagtatgtctataaacattgaactttaaaaaacttatttatttattccactactgtagcaattgacagattaaaaaaatgtaacttcataatttcttaccataacctcaatgtcttttttaaaaaataaaattaaaaatgaaaagaga

SEQ ID NO: 120035 - DNA, 865 bp, Homo sapiens
  Payload ID: 3545
  Gene Symbol: CLDND1
  Gene Name: claudin domain containing 1
  ENST ID: ENST00000502299
  CDS Start-End: 148-865
aagtgcgtcagaggaggcgcggggagagtagggtgctgtggtctgagctagagggtgaagctggcggagcaggaggatgggcgtatgcaggtgatagactagagaacaagacctctgtctccgtagcatcctggtctgaatgccagaatggataaccgttttgctacagcatttgtaattgcttgtgtgcttagcctcatttccaccatctacatggcagcctccattggcacagacttctggtatgaatatcgaagtccagttcaagaaaattccagtgatttgaataaaagcatctgggatgaattcattagtgatgaggcagatgaaaagacttataatgatgcactttttcgatacaatggcacagtgggattgtggagacggtgtatcaccatacccaaaaacatgcattggtatagcccaccagaaaggacagagtcatttgatgtggtcacaaaatgtgtgagtttcacactaactgagcagttcatggagaaatttgttgatcccggaaaccacaatagcgggattgatctccttaggacctatctttggcgttgccagttccttttaccttttgtgagtttaggtttgatgtgctttggggctttgatcggactttgtgcttgcatttgccgaagcttatatcccaccattgccacgggcattctccatctccttgcaggtctgtgtacactgggctcagtaagttgttatgttgctggaattgaactactccaccagaaactagagctccctgacaatgtatccggtgaatttggatggtccttctgcctggcttgtgtctctgctcccttacagttcatggcttctgctctcttcatctgggctgctcacacca

SEQ ID NO: 120036 - DNA, 2818 bp, Homo sapiens
  Payload ID: 3545
  Gene Symbol: CLDND1
  Gene Name: claudin domain containing 1
  Uniprot ID: Q9NY35
  ENST ID: ENST00000503004
  CDS Start-End: 881-1642
gggatttttaaaaaatcaaaatacaaatccaactttttgagttttcgttgtcattgctcttatctttcctgagtcacttcccattttccaaactcagcaaccccagtttgcgagtctgttttcatgaacctttgtaaggtgtttggtgcggtcacggtgtatacttgccgtgtagtatttgactcagcgcgatctgccttgagtcattttaccgcggccatttactactgccgttgagccctgtccacgccttgggagtgttgatatgttgagagttttctgtctggctgaggagggatcatttagtttttgcggacgtatgttgcactgaggatttagggagagagcaagatttctgttgaggaggttcagaagtataaggaatcgggagagtagataggagtgaagcatttggcagcgtaaagaagcttggcttagctttaatggattagggagagattgctatctagcattattacatgttattgttctctttgctattttatacacctagaacaacctttccctcggggttaacaaacatcttcaactctgttttctgtatggctcctgactcttacctttgttttaggaggcttccctcttcagaggaaactgggagaagccaatttccactgcttctttttcctgtgcctttttaacactcaaacccagaacacttaatcctctgcagctcgtgcaaaaattcagtctgtaatttaaaatgtgtgcacggtacactgctgaccatgggcatgtctattgtttgtatctgtaatgtgtatgtccatttcagtgttgtctgttttagtatgcaggtgatagactagagaacaagacctctgtctccgtagcatcctggagcagtctgaatgccagaatggataaccgttttgctacagcatttgtaattgcttgtgtgcttagcctcatttccaccatctacatggcagcctccattggcacagacttctggtatgaatatcgaagtccagttcaagaaaattccagtgatttgaataaaagcatctgggatgaattcattagtgatgaggcagatgaaaagacttataatgatgcactttttcgatacaatggcacagtgggattgtggagacggtgtatcaccatacccaaaaacatgcattggtatagcccaccagaaaggacagagtcatttgatgtggtcacaaaatgtgtgagtttcacactaactgagcagttcatggagaaatttgttgatcccggaaaccacaatagcgggattgatctccttaggacctatctttggcgttgccagttccttttaccttttgtgagtttaggtttgatgtgctttggggctttgatcggactttgtgcttgcatttgccgaagcttatatcccaccattgccacgggcattctccatctccttgcaggtctgtgtacactgggctcagtaagttgttatgttgctggaattgaactactccaccagaaactagagctccctgacaatgtatccggtgaatttggatggtccttctgcctggcttgtgtctctgctcccttacagttcatggcttctgctctcttcatctgggctgctcacaccaaccggaaagagtacaccttaatgaaggcatatcgtgtggcatgagcaagaaactgcctgctttacaattgccatttttatttttttaaaataatactgatattttccccacctctcaattgtttttaatttttatttgtggatataccattttattatgaaaatctattttatttatacacattcaccactaaatacacacttaataccactaaaatttatgtggtttactttaagcgatgccatctttcaaataaactaatctaggtctagacagaaagaaatggatagagacttgacacaaatttatgaaagaaaattgggagtaggaatgtgaccgaaaacaagttgtgctaatgtctgttagacttttcagtaaaactaaagtaactgtatctgttcaactaaaaactctatattagtttctttgggaaacctctcatcgtcaaaactttatgttcactttgctgttgtagatagccagtcaaccagcagtattagtgctgttttcaaagatttaagctctataaaattgggaaattatctaagatcattttccctaagcattgacacatagcttcatctgaggtgagatatggcagctgtttgtatctgcactgtgtctgtctacaaaaagtgaaaaatacagtgtttacttgaaattttaactttgtaactgcaagaattccagttcagccgggcgaggattagtattatttttaactctccgtaagattttcagtaccaccaaattgttttggattttttttctttcctcttcacataccagggttattaaaagtgtgctttctttttacattatattacagttacaaggtaaaattcctcaactgctatttatttattccagcccagtactataaagaacgtttcaccataatgaccctccagagctgggaaacctaccacaagatctaaagttctggctgtccattaacctccaactatggtctttatttcttgtggtaatatgatgtgcctttccttgcctaaatcccttcctggtgtgtatcaacattatttaatgtcttctaattcagtcatttttttataagtatgtctataaacattgaactttaaaaaacttatttatttattccactactgtagcaattgacagattaaaaaaatgtaacttcataatttcttaccataacctcaatgtcttttttaaaaaataaaattaaaaatgaaaagaga

SEQ ID NO: 120037 - DNA, 916 bp, Homo sapiens
  Payload ID: 3545
  Gene Symbol: CLDND1
  Gene Name: claudin domain containing 1
  ENST ID: ENST00000508902
  CDS Start-End: 207-916
tctgtccctcctacaactcccacaaggcccctcggccccgggccgcggcccggcccggagtgggggcgggcggaggcgcgggagttatggagggggcgggctctgcagggaagtgcgtcagaggaggcgcggggagagtagggtgctgtggtctgagctagagggtgaagctggcggagcaggaggatgggcgtctgaatgccagaatggataaccgttttgctacagcatttgtaattgcttgtgtgcttagcctcatttccaccatctacatggcagcctccattggcacagacttctggtatgaatatcgaagtccagttcaagaaaattccagtgatttgaataaaagcatctgggatgaattcattagtgatgaggcagatgaaaagacttataatgatgcactttttcgatacaatggcacagtgggattgtggagacggtgtatcaccatacccaaaaacatgcattggtatagcccaccagaaaggacagagtcatttgatgtggtcacaaaatgtgtgagtttcacactaactgagcagttcatggagaaatttgttgatcccggaaaccacaatagcgggattgatctccttaggacctatctttggcgttgccagttccttttaccttttgtgagtttaggtttgatgtgctttggggctttgatcggactttgtgcttgcatttgccgaagcttatatcccaccattgccacgggcattctccatctccttgcaggtctgtgtacactgggctcagtaagttgttatgttgctggaattgaactactccaccagaaactagagctccctgacaatgtatccggtgaatttggatggtccttctgcctggcttgtgtctctgctcccttacagttcatggcttctgctctcttcatctgggctgc

SEQ ID NO: 120038 - DNA, 750 bp, Homo sapiens
  Payload ID: 3545
  Gene Symbol: CLDND1
  Gene Name: claudin domain containing 1
  ENST ID: ENST00000506885
  CDS Start-End: 1-468
aaaagcatctgggatgaattcattagtgatgaggcagatgaaaagacttataatgatgcactttttcgatacaatggcacagtgggattgtggagacggtgtatcaccatacccaaaaacatgcattggtatagcccaccagaaaggacagagtcatttgatgtggtcacaaaatgtgtgagtttcacactaactgagcagttcatggagaaatttgttgatcccggaaaccacaatagcgggattgatctccttaggacctatctttggcgttgccagttccttttaccttttgtgagtttaggtttgatgtgctttggggctttgatcggactttgtgcttgcatttgccgaagcttatatcccaccattgccacgggcattctccatctccttgcagcccagtactataaagaacgtttcaccataatgaccctccagagctgggaaacctaccacaagatctaaagttctggctgtccattaacctccaactatggtctttatttcttgtggtaatatgatgtgcctttccttgcctaaatcccttcctggtgtgtatcaacattatttaatgtcttctaattcagtcatttttttataagtatgtctataaacattgaactttaaaaaacttatttatttattccactactgtagcaattgacagattaaaaaaatgtaacttcataatttcttaccataacctcaatgtcttttttaaaaaataaaattaaaaatgaaaagaga

SEQ ID NO: 120039 - DNA, 1380 bp, Homo sapiens
  Payload ID: 3545
  Gene Symbol: CLDND1
  Gene Name: claudin domain containing 1
  ENST ID: ENST00000507874
  CDS Start-End: 159-791
agaggaggcgcggggagagtagggtgctgtggtctgagctagagggtgaagctggcggagcaggaggatgggcgtgttgtctgttttagtatgcaggtgatagactagagaacaagacctctgtctccgtagcatcctggagcagtctgaatgccagaatggataaccgttttgctacagcatttgtaattgcttgtgtgcttagcctcatttccaccatctacatggcagcctccattggcacagacttctggtatgaatatcgaagtccagttcaagaaaattccagtgatttgaataaaagcatctgggatgaattcattagtgatgaggcagatgaaaagacttataatgatgcactttttcgatacaatggcacagtgggattgtggagacggtgtatcaccatacccaaaaacatgcattggtatagcccaccagaaaggacagagtcatttgatgtggtcacaaaatgtgtgagtttcacactaactgagcagttcatggagaaatttgttgatcccggaaaccacaatagcgggattgatctccttaggacctatctttggcgttgccagttccttttaccttttgtgagtttaggtttgatgtgctttggggctttgatcggactttgtgcttgcatttgccgaagcttatatcccaccattgccacgggcattctccatctccttgcagtgacaaaggagagcatgcttccagctggagctgagtccaagcacacagccactcctgcacacgcatgcgtgcaaacagggaagcccaagtaggagaagaggaaagaggttgtagggatttgggaagaaccttgattattccctggaggaaaagacaaatctacttccctgaaatcaccctcgaatctacttccaccctcagaacttaaaatgaactgcatcctttttttcatcttcttttcttctccagtgaatatgatctccaaacccttattttttctttgaactgtaaaatttccactcatggacgatgcaaccaacagatgcaatctctgagaagatgaaaattgggacctcttattataaaattgacctagctggactcaggaaaccagggaagaagtcaatgcaggcatttaaaatgtaaagttttttctggttaaatctatttatttttcttgtaggttgagtatttcttcccagtttttctgctctggtgtataacaaacaggtcaaaatttcccatctttcctcctgatagtagttgaatcctaccttgcatacttaatgcatagtgaaatggcatctagcagaaatacacacccccaaaacacaccaccatttcattaggtgcccaaaaaattctgtatttagcttatttatttattgttatttttgcttt

SEQ ID NO: 120040 - DNA, 663 bp, Homo sapiens
  Payload ID: 3545
  Gene Symbol: CLDND1
  Gene Name: claudin domain containing 1
  ENST ID: ENST00000515620
  CDS Start-End: 123-663
ggaggtggctgctgcaggcgtccggcttggacgaaccgccgttcccagtgctgggaccctttaaggtgatagactagagaacaagacctctgtctccgtagcatcctggtctgaatgccagaatggataaccgttttgctacagcatttgtaattgcttgtgtgcttagcctcatttccaccatctacatggcagcctccattggcacagacttctggtatgaatatcgaagtccagttcaagaaaattccagtgatttgaataaaagcatctgggatgaattcattagtgatgaggcagatgaaaagacttataatgatgcactttttcgatacaatggcacagtgggattgtggagacggtgtatcaccatacccaaaaacatgcattggtatagcccaccagaaaggacagagtcatttgatgtggtcacaaaatgtgtgagtttcacactaactgagcagttcatggagaaatttgttgatcccggaaaccacaatagcgggattgatctccttaggacctatctttggcgttgccagttccttttaccttttgtgagtttaggtttgatgtgctttggggctttgatcggactttgtgcttgcatttgccgaagcttatatcccaccattgccacgggcattctccatctccttgcag

SEQ ID NO: 120041 - DNA, 1013 bp, Homo sapiens
  Payload ID: 3545
  Gene Symbol: CLDND1
  Gene Name: claudin domain containing 1
  ENST ID: ENST00000514537
  CDS Start-End: 375-1013
gagtgagcgggacctgcgtcgccgggcaggggtcgcgtcgcggttccatgttcccggcggtttgaagaggggcccccttcccgggcgtggtcgggctgggcgggttccgagcggcggatttgtcccagggccgagccctctagggcggggcctggtcgggtaccgggggaccctggcccggggccgagcacggctgccccgccccagccctggccttctccggccccgccgtgaggcccaggaggtggctgctgcaggcgtccggcttggacgaaccgccgttcccagtgctgggaccctttaagtatgcaggtgatagactagagaacaagacctctgtctccgtagcatcctggagcagtctgaatgccagaatggataaccgttttgctacagcatttgtaattgcttgtgtgcttagcctcatttccaccatctacatggcagcctccattggcacagacttctggtatgaatatcgaagtccagttcaagaaaattccagtgatttgaataaaagcatctgggatgaattcattagtgatgaggcagatgaaaagacttataatgatgcactttttcgatacaatggcacagtgggattgtggagacggtgtatcaccatacccaaaaacatgcattggtatagcccaccagaaaggacagagtcatttgatgtggtcacaaaatgtgtgagtttcacactaactgagcagttcatggagaaatttgttgatcccggaaaccacaatagcgggattgatctccttaggacctatctttggcgttgccagttccttttaccttttgtgagtttaggtttgatgtgctttggggctttgatcggactttgtgcttgcatttgccgaagcttatatcccaccattgccacgggcattctccatctccttgcaggtctgtgtacactgggctcagtaagttgttatgttgctggaattgaactactccaccagaaactagagctccctgacaatgtatccggtgaatttgga

SEQ ID NO: 120042 - DNA, 2124 bp, Homo sapiens
  Payload ID: 3545
  Gene Symbol: CLDND1
  Gene Name: claudin domain containing 1
  Uniprot ID: Q9NY35
  ENST ID: ENST00000510545
  CDS Start-End: 191-952
agttatggagggggcgggctctgcagggaagtgcgtcagaggaggcgcggggagagtagggtgctgtggtctgagctagagggtgaagctggcggagcaggaggatgggcgtgttgtctgttttagtatgcaggtgatagactagagaacaagacctctgtctccgtagcatcctggtctgaatgccagaatggataaccgttttgctacagcatttgtaattgcttgtgtgcttagcctcatttccaccatctacatggcagcctccattggcacagacttctggtatgaatatcgaagtccagttcaagaaaattccagtgatttgaataaaagcatctgggatgaattcattagtgatgaggcagatgaaaagacttataatgatgcactttttcgatacaatggcacagtgggattgtggagacggtgtatcaccatacccaaaaacatgcattggtatagcccaccagaaaggacagagtcatttgatgtggtcacaaaatgtgtgagtttcacactaactgagcagttcatggagaaatttgttgatcccggaaaccacaatagcgggattgatctccttaggacctatctttggcgttgccagttccttttaccttttgtgagtttaggtttgatgtgctttggggctttgatcggactttgtgcttgcatttgccgaagcttatatcccaccattgccacgggcattctccatctccttgcaggtctgtgtacactgggctcagtaagttgttatgttgctggaattgaactactccaccagaaactagagctccctgacaatgtatccggtgaatttggatggtccttctgcctggcttgtgtctctgctcccttacagttcatggcttctgctctcttcatctgggctgctcacaccaaccggaaagagtacaccttaatgaaggcatatcgtgtggcatgagcaagaaactgcctgctttacaattgccatttttatttttttaaaataatactgatattttccccacctctcaattgtttttaatttttatttgtggatataccattttattatgaaaatctattttatttatacacattcaccactaaatacacacttaataccactaaaatttatgtggtttactttaagcgatgccatctttcaaataaactaatctaggtctagacagaaagaaatggatagagacttgacacaaatttatgaaagaaaattgggagtaggaatgtgaccgaaaacaagttgtgctaatgtctgttagacttttcagtaaaactaaagtaactgtatctgttcaactaaaaactctatattagtttctttgggaaacctctcatcgtcaaaactttatgttcactttgctgttgtagatagccagtcaaccagcagtattagtgctgttttcaaagatttaagctctataaaattgggaaattatctaagatcattttccctaagcattgacacatagcttcatctgaggtgagatatggcagctgtttgtatctgcactgtgtctgtctacaaaaagtgaaaaatacagtgtttacttgaaattttaactttgtaactgcaagaattccagttcagccgggcgaggattagtattatttttaactctccgtaagattttcagtaccaccaaattgttttggattttttttctttcctcttcacataccagggttattaaaagtgtgctttctttttacattatattacagttacaaggtaaaattcctcaactgctatttatttattccagcccagtactataaagaacgtttcaccataatgaccctccagagctgggaaacctaccacaagatctaaagttctggctgtccattaacctccaactatggtctttatttcttgtggtaatatgatgtgcctttccttgcctaaatcccttcctggtgtgtatcaacattatttaatgtcttctaattcagtcatttttttataagtatgtctataaacattgaactttaaaaaacttatttatttattccactactgtagcaattgacagattaaaaaaatgtaacttcataatttcttaccataacctcaatgtcttttttaaaaaataaaattaaaaatgaaaa

SEQ ID NO: 120043 - DNA, 560 bp, Homo sapiens
  Payload ID: 3545
  Gene Symbol: CLDND1
  Gene Name: claudin domain containing 1
  ENST ID: ENST00000502288
  CDS Start-End: 33-296
gagctagagggtgaagctggcggagcaggaggatgggcgagtcatttgatgtggtcacaaaatgtgtgagtttcacactaactgagcagttcatggagaaatttgttgatcccggaaaccacaatagcgggattgatctccttaggacctatctttggcgttgccagttccttttaccttttgtgagtttaggtttgatgtgctttggggctttgatcggactttgtgcttgcatttgccgaagcttatatcccaccattgccacgggcattctccatctccttgcagaaaactaacctaaatacaagccctacatgaatcatggaatgcagatttccagctatgaaggcgcctgtggtcatctgaatgcagagtttcttggacatcatgatgtggtactgcagtgggttgcagatggccacatagcggtcataggccactgctgccagaagaaagcagtctgcagtttccacagtgcaaagaaaataaaactgtactgcacattcatagagggaaatccttttgccctcagaaaagaagttctctaacattttgggggt

SEQ ID NO: 120044 - DNA, 871 bp, Homo sapiens
  Payload ID: 3545
  Gene Symbol: CLDND1
  Gene Name: claudin domain containing 1
  ENST ID: ENST00000511667
  CDS Start-End: 202-871
gcgggagttatggagggggcgggctctgcagggaagtgcgtcagaggaggcgcggggagagtagggtgctgtggtctgagctagagggtgaagctggcggagcaggaggatgggcgtgttgtctgttttagtatgcaggtgatagactagagaacaagacctctgtctccgtagcatcctggcctcatttccaccatctacatggcagcctccattggcacagacttctggtatgaatatcgaagtccagttcaagaaaattccagtgatttgaataaaagcatctgggatgaattcattagtgatgaggcagatgaaaagacttataatgatgcactttttcgatacaatggcacagtgggattgtggagacggtgtatcaccatacccaaaaacatgcattggtatagcccaccagaaaggacagagtcatttgatgtggtcacaaaatgtgtgagtttcacactaactgagcagttcatggagaaatttgttgatcccggaaaccacaatagcgggattgatctccttaggacctatctttggcgttgccagttccttttaccttttgtgagtttaggtttgatgtgctttggggctttgatcggactttgtgcttgcatttgccgaagcttatatcccaccattgccacgggcattctccatctccttgcaggtctgtgtacactgggctcagtaagttgttatgttgctggaattgaactactccaccagaaactagagctccctgacaatgtatccggtgaatttggatggtccttctgcctggcttgtgtctctgctcccttacagttcatggcttctgctctcttcatctgggctgctcacaccaaccggaaagagtacacct

SEQ ID NO: 120045 - DNA, 573 bp, Homo sapiens
  Payload ID: 3545
  Gene Symbol: CLDND1
  Gene Name: claudin domain containing 1
  ENST ID: ENST00000510541
  CDS Start-End: 272-573
agggtgctgtggtctgagctagagggtgaagctggcggagcaggaggatgggcgtatgcaggtgatagactagagaacaagacctctgtctccgtagcatcctggagcagtctgaatgccagaatggataaccgttttgctacagcatttgtaattgcttgtgtgcttagcctcatttccaccatctacatggcagcctccattggcacagacttctgagtcatttgatgtggtcacaaaatgtgtgagtttcacactaactgagcagttcatggagaaatttgttgatcccggaaaccacaatagcgggattgatctccttaggacctatctttggcgttgccagttccttttaccttttgtgagtttaggtttgatgtgctttggggctttgatcggactttgtgcttgcatttgccgaagcttatatcccaccattgccacgggcattctccatctccttgcaggtctgtgtacactgggctcagtaagttgttatgttgctggaattgaactactccaccagaaactagagctccctgacaatgtatccggtgaatttggatggtcctt

SEQ ID NO: 120046 - DNA, 569 bp, Homo sapiens
  Payload ID: 3545
  Gene Symbol: CLDND1
  Gene Name: claudin domain containing 1
  ENST ID: ENST00000503799
  CDS Start-End: 97-417
gaagctggcggagcaggaggatgggcgtatgcaggtgatagactagagaacaagacctctgtctccgtagcatcctggagcagtctgaatgccagaatggataaccgttttgctacagcatttgtaattgcttgtgtgcttagcctcatttccaccatctacatggcagcctccattggcacagacttctggtatgaatatcgaagtccagttcaagaaaattccagtgatttgaataaaagcatctgggatgaattcattagtgatgaggcagatgaaaagacttataatgatgcactttttcgatacaatggcacagtgggattgtggagacggtgtatcaccatacccaaaaacatgcattggtatagcccaccagaaaggacaggcaattgttcttgttccagagtcatttgatgtggtcacaaaatgtgtgagtttcacactaactgagcagttcatggagaaatttgttgatcccggaaaccacaatagcgggattgatctccttaggacctatctttggcgttgccagttccttttaccttttgtgagtttaggtttgatgt

SEQ ID NO: 120047 - DNA, 642 bp, Homo sapiens
  Payload ID: 3545
  Gene Symbol: CLDND1
  Gene Name: claudin domain containing 1
  Uniprot ID: Q9NY35
  ENST ID: ENST00000511081
  CDS Start-End: 51-527
agtagggtgctgtggtctgagctagagggtgaagctggcggagcaggaggatgggcgagtcatttgatgtggtcacaaaatgtgtgagtttcacactaactgagcagttcatggagaaatttgttgatcccggaaaccacaatagcgggattgatctccttaggacctatctttggcgttgccagttccttttaccttttgtgagtttaggtttgatgtgctttggggctttgatcggactttgtgcttgcatttgccgaagcttatatcccaccattgccacgggcattctccatctccttgcaggtctgtgtacactgggctcagtaagttgttatgttgctggaattgaactactccaccagaaactagagctccctgacaatgtatccggtgaatttggatggtccttctgcctggcttgtgtctctgctcccttacagttcatggcttctgctctcttcatctgggctgctcacaccaaccggaaagagtacaccttaatgaaggcatatcgtgtggcatgagcaagaaactgcctgctttacaattgccatttttatttttttaaaataatactgatattttccccacctctcaattgtttttaatttttatttgtggatataccattttattatg

SEQ ID NO: 120048 - DNA, 903 bp, Homo sapiens
  Payload ID: 3545
  Gene Symbol: CLDND1
  Gene Name: claudin domain containing 1
  ENST ID: ENST00000507944
  CDS Start-End: 373-903
gcggtgagtgagcgggacctgcgtcgccgggcaggggtcgcgtcgcggttccatgttcccggcggtttgaagaggggcccccttcccgggcgtggtcgggctgggcgggttccgagcggcggatttgtcccagggccgagccctctagggcggggcctggtcgggtaccgggggaccctggcccggggccgagcacggctgccccgccccagccctggccttctccggccccgccgtgaggcccaggaggtggctgctgcaggcgtccggcttggacgaaccgccgttcccagtgctgggaccctttaaggtgatagactagagaacaagacctctgtctccgtagcatcctggagcagtctgaatgccagaatggataaccgttttgctacagcatttgtaattgcttgtgtgcttagcctcatttccaccatctacatggcagcctccattggcacagacttctggtatgaatatcgaagtccagttcaagaaaattccagtgatttgaataaaagcatctgggatgaattcattagtgatgaggcagatgaaaagacttataatgatgcactttttcgatacaatggcacagtgggattgtggagacggtgtatcaccatacccaaaaacatgcattggtatagcccaccagaaaggacagagtcatttgatgtggtcacaaaatgtgtgagtttcacactaactgagcagttcatggagaaatttgttgatcccggaaaccacaatagcgggattgatctccttaggacctatctttggcgttgccagttccttttaccttttgtgagtttaggtttgatgtgctttggggctttgatcggactttgtgcttgcatttgccgaagcttatatcccaccattgccacgggcattctccat

SEQ ID NO: 120049 - DNA, 556 bp, Homo sapiens
  Payload ID: 3545
  Gene Symbol: CLDND1
  Gene Name: claudin domain containing 1
  ENST ID: ENST00000508071
  CDS Start-End: 122-556
gagtgagcgggacctgcgtcgccgggcaggggtcgcgtcgcggttccatgttcccggcggtgatagactagagaacaagacctctgtctccgtagcatcctggagcagtctgaatgccagaatggataaccgttttgctacagcatttgtaattgcttgtgtgcttagcctcatttccaccatctacatggcagcctccattggcacagacttctggtatgaatatcgaagtccagttcaagaaaattccagtgatttgaataaaagcatctgggatgaattcattagtgatgaggcagatgaaaagacttataatgatgcactttttcgatacaatggcacagtgggattgtggagacggtgtatcaccatacccaaaaacatgcattggtatagcccaccagaaaggacagagtcatttgatgtggtcacaaaatgtgtgagtttcacactaactgagcagttcatggagaaatttgttgatcccggaaaccacaatagcgggattgatctccttaggacctatctttggcgttgccagttccttttacctttt

SEQ ID NO: 120050 - DNA, 862 bp, Homo sapiens
  Payload ID: 3545
  Gene Symbol: CLDND1
  Gene Name: claudin domain containing 1
  ENST ID: ENST00000513452
  CDS Start-End: 129-862
gaggtggctgctgcaggcgtccggcttggacgaaccgccgttcccagtgctgggaccctttaagtatgcaggtgatagactagagaacaagacctctgtctccgtagcatcctggtctgaatgccagaatggataaccgttttgctacagcatttgtaattgcttgtgtgcttagcctcatttccaccatctacatggcagcctccattggcacagacttctggtatgaatatcgaagtccagttcaagaaaattccagtgatttgaataaaagcatctgggatgaattcattagtgatgaggcagatgaaaagacttataatgatgcactttttcgatacaatggcacagtgggattgtggagacggtgtatcaccatacccaaaaacatgcattggtatagcccaccagaaaggacagagtcatttgatgtggtcacaaaatgtgtgagtttcacactaactgagcagttcatggagaaatttgttgatcccggaaaccacaatagcgggattgatctccttaggacctatctttggcgttgccagttccttttaccttttgtgagtttaggtttgatgtgctttggggctttgatcggactttgtgcttgcatttgccgaagcttatatcccaccattgccacgggcattctccatctccttgcaggtctgtgtacactgggctcagtaagttgttatgttgctggaattgaactactccaccagaaactagagctccctgacaatgtatccggtgaatttggatggtccttctgcctggcttgtgtctctgctcccttacagttcatggcttctgctctcttcatctgggctgctcacaccaaccggaaagagtacac

SEQ ID NO: 120051 - DNA, 538 bp, Homo sapiens
  Payload ID: 3545
  Gene Symbol: CLDND1
  Gene Name: claudin domain containing 1
  ENST ID: ENST00000513873
  CDS Start-End: 1-219
tttgtgagtttaggtttgatgtgctttggggctttgatcggactttgtgcttgcatttgccgaagcttatatcccaccattgccacgggcattctccatctccttgcaggtctgtgtacactgggctcagtaagttgttatgttgctggaattgaactactccaccagaaactagagctccctgacaatcccagtactataaagaacgtttcaccataatgaccctccagagctgggaaacctaccacaagatctaaagttctggctgtccattaacctccaactatggtctttatttcttgtggtaatatgatgtgcctttccttgcctaaatcccttcctggtgtgtatcaacattatttaatgtcttctaattcagtcatttttttataagtatgtctataaacattgaactttaaaaaacttatttatttattccactactgtagcaattgacagattaaaaaaatgtaacttcataatttcttaccataacctcaatgtcttttttaaaaaataaaattaaaaatgaaaagag

SEQ ID NO: 120052 - DNA, 999 bp, Homo sapiens
  Payload ID: 3545
  Gene Symbol: CLDND1
  Gene Name: claudin domain containing 1
  Uniprot ID: Q9NY35
  ENST ID: ENST00000513287
  CDS Start-End: 232-993
gggctgggcgggttccgagcggcggatttgtcccagggccgagccctctagggcggggcctggtcgggtaccgggggaccctggcccggggccgagcacggctgccccgccccagccctggccttctccggccccgccgtgaggcccaggaggtggctgctgcaggcgtccggcttggacgaaccgccgttcccagtgctgggaccctttaagagcagtctgaatgccagaatggataaccgttttgctacagcatttgtaattgcttgtgtgcttagcctcatttccaccatctacatggcagcctccattggcacagacttctggtatgaatatcgaagtccagttcaagaaaattccagtgatttgaataaaagcatctgggatgaattcattagtgatgaggcagatgaaaagacttataatgatgcactttttcgatacaatggcacagtgggattgtggagacggtgtatcaccatacccaaaaacatgcattggtatagcccaccagaaaggacagagtcatttgatgtggtcacaaaatgtgtgagtttcacactaactgagcagttcatggagaaatttgttgatcccggaaaccacaatagcgggattgatctccttaggacctatctttggcgttgccagttccttttaccttttgtgagtttaggtttgatgtgctttggggctttgatcggactttgtgcttgcatttgccgaagcttatatcccaccattgccacgggcattctccatctccttgcaggtctgtgtacactgggctcagtaagttgttatgttgctggaattgaactactccaccagaaactagagctccctgacaatgtatccggtgaatttggatggtccttctgcctggcttgtgtctctgctcccttacagttcatggcttctgctctcttcatctgggctgctcacaccaaccggaaagagtacaccttaatgaaggcatatcgtgtggcatgagcaaga

SEQ ID NO: 120053 - DNA, 414 bp, Homo sapiens
  Payload ID: 3545
  Gene Symbol: CLDND1
  Gene Name: claudin domain containing 1
  ENST ID: ENST00000506575
  CDS Start-End: 146-414
gtggctgctgcaggcgtccggcttggacgaaccgccgttcccagtgctgggaccctttaagtgttgtctgttttagtatgcaggtgatagactagagaacaagacctctgtctccgtagcatcctggagcagtctgaatgccagaatggataaccgttttgctacagcatttgtaattgcttgtgtgcttagcctcatttccaccatctacatggcagcctccattggcacagacttctggtatgaatatcgaagtccagttcaagaaaattccagtgatttgaataaaagcatctgggatgaattcattagtgatgaggcagatgaaaagacttataatgatgcactttttcgatacaatggcacagtgggattgtggagacggtgtatcaccatacccaaaaacatgcattg

SEQ ID NO: 120054 - DNA, 582 bp, Homo sapiens
  Payload ID: 3545
  Gene Symbol: CLDND1
  Gene Name: claudin domain containing 1
  ENST ID: ENST00000512147
  CDS Start-End: 218-582
gtgctgtggtctgagctagagggtgaagctggcggagcaggaggatgggcgagcagtctgaatgccagaatggataaccgttttgctacagcatttgtaattgcttgtgtgcttagcctcatttccaccatctacatggcagcctccattggcacagacttctgagtcatttgatgtggtcacaaaatgtgtgagtttcacactaactgagcagttcatggagaaatttgttgatcccggaaaccacaatagcgggattgatctccttaggacctatctttggcgttgccagttccttttaccttttgtgagtttaggtttgatgtgctttggggctttgatcggactttgtgcttgcatttgccgaagcttatatcccaccattgccacgggcattctccatctccttgcaggtctgtgtacactgggctcagtaagttgttatgttgctggaattgaactactccaccagaaactagagctccctgacaatgtatccggtgaatttggatggtccttctgcctggcttgtgtctctgctcccttacagttcatggcttctgctctcttcatctgggctgc

SEQ ID NO: 120055 - DNA, 539 bp, Homo sapiens
  Payload ID: 3545
  Gene Symbol: CLDND1
  Gene Name: claudin domain containing 1
  ENST ID: ENST00000503621
  CDS Start-End: 125-539
agggtgctgtggtctgagctagagggtgaagctggcggagcaggaggatgggcgtatgcaggtgatagactagagaacaagacctctgtctccgtagcatcctggcctcatttccaccatctacatggcagcctccattggcacagacttctggtatgaatatcgaagtccagttcaagaaaattccagtgatttgaataaaagcatctgggatgaattcattagtgatgaggcagatgaaaagacttataatgatgcactttttcgatacaatggcacagtgggattgtggagacggtgtatcaccatacccaaaaacatgcattggtatagcccaccagaaaggacagagtcatttgatgtggtcacaaaatgtgtgagtttcacactaactgagcagttcatggagaaatttgttgatcccggaaaccacaatagcgggattgatctccttaggacctatctttggcgttgccagttccttttaccttttgtgagtttaggtttgatgtgctttggggctttgatcggactttgtg

SEQ ID NO: 120056 - DNA, 681 bp, Homo sapiens
  Payload ID: 3545
  Gene Symbol: CLDND1
  Gene Name: claudin domain containing 1
  ENST ID: ENST00000508659
  CDS Start-End: 165-681
atggagggggcgggctctgcagggaagtgcgtcagaggaggcgcggggagagtagggtgctgtggtctgagctagagggtgaagctggcggagcaggaggatgggcggtgatagactagagaacaagacctctgtctccgtagcatcctggtctgaatgccagaatggataaccgttttgctacagcatttgtaattgcttgtgtgcttagcctcatttccaccatctacatggcagcctccattggcacagacttctggtatgaatatcgaagtccagttcaagaaaattccagtgatttgaataaaagcatctgggatgaattcattagtgatgaggcagatgaaaagacttataatgatgcactttttcgatacaatggcacagtgggattgtggagacggtgtatcaccatacccaaaaacatgcattggtatagcccaccagaaaggacagagtcatttgatgtggtcacaaaatgtgtgagtttcacactaactgagcagttcatggagaaatttgttgatcccggaaaccacaatagcgggattgatctccttaggacctatctttggcgttgccagttccttttaccttttgtgagtttaggtttgatgtgctttggggctttgatcggactttgtgcttgcatttgccgaagcttatatcccaccattgcca

SEQ ID NO: 120057 - DNA, 974 bp, Homo sapiens
  Payload ID: 3546
  Gene Symbol: CLDND2
  Gene Name: claudin domain containing 2
  Uniprot ID: Q8NHS1
  ENST ID: ENST00000291715
  CDS Start-End: 427-930
gtctctctgggctctgtgtctaaggagccctagggcactgggtgtgagtcacttaggtgggcctgtgtggaggggtgtctggggaggacattgaacaggctgggctgaaagggcgttcggctgtcgggggaggtctctgggaagacaggttcctcacagcaaagcctgtggtgaaggtctcagaggcctctcaggggaagtctcaaggtctccagtaaggggaacgaggtctggagggaggaggttgtggatcctcaggcagggttgttgagggaggggggtctccaggtccccagaagcagggacctcaggcaggagtaccaggggaggagtgtggaggaagcgggctcctcagctgggggcctcggggtaggaaaggcctgggcccatcctgcccttgtggcccccggctgcagcctcagtggcatgggggtgaagcggagcctccagagtgggggcattctgctcagcctcgtggccaacgtcctcatggtgctctccacggccaccaactactggacccgccaacaagagggccacagtggcctgtggcaggaatgcaaccacggcatctgctccagcatcccctgccagaccacgctggcggtgactgtggcgtgcatggtgctggcggtgggtgtcggcgtggtgggcatggtgatgggactgcggattcggtgcgacgagggcgagtcgctgcggggccagaccacgagcgccttcctcttcctcggcggactgctgctgctgaccgccttgataggctacaccgtgaagaatgcgtggaagaacaacgtcttcttctcttggtcctatttttctgggtggctggccttacccttctcaattctcgcgggcttctgctttctgctggcagacatgatcatgcagagcaccgacgccatcagtggattccccgtgtgtctgtgactgcagcctgcctggggcagaataaaggaacggctttttttagc

SEQ ID NO: 120058 - DNA, 417 bp, Homo sapiens
  Payload ID: 3546
  Gene Symbol: CLDND2
  Gene Name: claudin domain containing 2
  ENST ID: ENST00000593841
  CDS Start-End: 1-328
cgtggtgggcatggtgatgggactgcggattcggtgcgacgagggcgagtcgctgcggggccagaccacgagcgccttcctcttcctcggcggactgctgctgctgaccgccttgataggctccccagctgccctcccaggaaaccccggggacctctcggggactccccaacacactaacgactcccgcagacccggcagagacccccttggagccccaaaccccagtccccggggccctcccggccatccgccccagggcccaccttcctctccctgctccgcacccccgtccccccaggcttctgctttctgctggcagacatgatcatgcagagcaccgacgccatcagtggattccccgtgtgtctgtgactgcagcctgcctggggcagaataaaggaacggcttttttta

SEQ ID NO: 120059 - DNA, 575 bp, Homo sapiens
  Payload ID: 3546
  Gene Symbol: CLDND2
  Gene Name: claudin domain containing 2
  Uniprot ID: Q8NHS1
  ENST ID: ENST00000601435
  CDS Start-End: 30-533
gagccctagggcactgggtcctcagtggcatgggggtgaagcggagcctccagagtgggggcattctgctcagcctcgtggccaacgtcctcatggtgctctccacggccaccaactactggacccgccaacaagagggccacagtggcctgtggcaggaatgcaaccacggcatctgctccagcatcccctgccagaccacgctggcggtgactgtggcgtgcatggtgctggcggtgggtgtcggcgtggtgggcatggtgatgggactgcggattcggtgcgacgagggcgagtcgctgcggggccagaccacgagcgccttcctcttcctcggcggactgctgctgctgaccgccttgataggctacaccgtgaagaatgcgtggaagaacaacgtcttcttctcttggtcctatttttctgggtggctggccttacccttctcaattctcgcgggcttctgctttctgctggcagacatgatcatgcagagcaccgacgccatcagtggattccccgtgtgtctgtgactgcagcctgcctggggcagaataaaggaacggcttttttta

SEQ ID NO: 120060 - DNA, 3486 bp, Homo sapiens
  Payload ID: 3547
  Gene Symbol: CLVS1
  Gene Name: clavesin 1
  Uniprot ID: Q8IUQ0
  ENST ID: ENST00000325897
  CDS Start-End: 319-1383
ctcctaccaaaatcacagccccttgtggagcccgagctctcattcacagctttctagagaaatctgagcccgaacctgccagaataggggatctcacccacccagttcagcagcgaggacacctgcagaaatacattcccaaagcaaggctgggcggccgtgtgaagtaagcaatggcctcagttttgcttctgttttggatgaacaccaccacatagggcctgaatgtgaaagaagaccctctatttgtctgttccggggcagcctggtagtaaaacactgttgaatgggccacagtttcagcagaccatcaggtgaatgggaccagtctctcttcttccaaaatatcagaagttaaacacttggaacggagatttggccaagatgacccatttacaggctggactcagtccagagactatagagaaagctcgcctggaactgaatgaaaaccccgatgttttacatcaggatattcagcaagtcagggacatgatcatcaccaggcctgacattggatttttacgtacagatgatgccttcatcctgagatttctccgagccaggaagtttcaccaagcggatgcctttagactcctggctcagtatttccagtaccgccagctaaacctggacatgttcaaaaacttcaaggcagatgatcccggcattaagagggctctgatcgatgggttccccggggtgctggaaaaccgagaccattacggcaggaagattcttttgctgtttgcagccaattgggatcagagtaggaactccttcacagacatccttcgtgccatcctgctgtcattggaagtcctaatcgaagatccggagcttcagataaatggcttcattttaattatagactggagtaatttttccttcaaacaagcctccaaactgacaccttcaatccttaaactggccattgaagggttgcaggacagctttcctgcccgctttggaggagtccactttgtcaaccagccctggtacattcatgccctctacacactcatcaagccatttcttaaagacaagaccaggaaacggattttcctgcatggaaacaatttaaacagccttcaccagctaatacaccctgaatttttgccctctgaatttggaggaactcttcctccttatgacatgggaacttgggcccggacgttactcggtcccgactacagcgatgaaaatgactatactcacacatcctataatgcaatgcacgtgaagcatacgtcctcgaatctggagagagaatgctcacccaagctgatgaaaagatctcagtctgtggtagaagctgggaccctgaaacatgaggagaagggagagaatgagaacacccagccactcctggctctggactgaaccctgagtcaccccaatgctcctgcacactggccttcagtggtatcagccacccaggaagcacatgcacaactgacccatgcagacacgtgtgttctgcttgacacaaggtcctccactcctgaacccctgcagtgactgtcaccagccatcggtctgagcagccaaagttggacaaagacttgagagatgctttttttttcccccagtgaggggactggaggatgatgcaaggcatttatgtaaaaaagattctccctcctttcatatttattgtagtaaattgaaaaaataaagactaaatttgatggacacactgcattaggacaagaatttttctgaggtatcacacagggaccctctccagtttttgaaaattaagtgcatttccaagtaaatgtatcagagttaaactgtacagacaccactgtcaagtttcatgtagtacaaagccctgagacaatagtatctccagtaatttccattcttactgaattatttcctttgacctcatcaccagcatcgaattgttcagcctaagagcatgttctcataggtctgggtatttgcaaagtttgcttattttgatgatatcctgcaaaaaattattttgatgtcacatctcttgtcaggtcactagctgactgtcatgagctgacgttaaaggaagacacatggacgtgaaatacgattatttcatctgagcaatgtgagttaccacaggcagctcaaaagcccattagtgcagcatgtgtctgcagaggagatgtctcatgaaaatcacatgtcagtgattaatgaatccattccagttgcctcaactgggtcactacagcaaagaaaagtgctatcaaaccatttacccttgcccccacaaccctcctgcaaccattaaagatgtggagaaagaccatggttgttgctgagagggtaaatattcaatcatggagcatgacccatatggatggctaaatatgcaagtactgaagtaagagaagactagaaatgcaggatgaaatgtcaaaggtcattttatttacctagtctccttagaaatggagtccccaactactcattcaaaagaaatcagacataaaataaacagacatcatatatgatatccttacttgtgccatgttttccaagaccagtgcatatttttagacatctcttattcgcccagccatctgcatgacatgggtatttattagtattaccagttggtgctcaaagtcaaacaaaaatattttagttaataatgggcagtaaaatatgattttacattattttaaatatttgggagagttaatttgttagctaaataattcaagggaaagagattattcaactggtcataatcacccctgataatattattactaatcttaattatttattacatcatctctttctcaatggatctaatgttttaattttttcccctattggtagagaacaataacagaagtaatttttatattatacacttggagaaataaagttgaaacagaattaaaaatatttctcaaacaactgtatcacaatataaattaaactaattcatttttgtgtagacatacgaaatcacaaaaataataacactgaaataattctaccaatgcagtgatggaaacacttttcttatgtaccaagacatagataggtaagagaaataaagaattgaagtgaattagaaaatccattttattgcttgggtttaaaatagttgtgggatacaagtatttacaatgctattggagtcaattattgacaacactttgcaacagtaataccatttctagcttttcaattggcaatacttagaaccttactgtagtgacctgattttaaataccatattatatttactaagttaagagctagtttttactctcttccataatttcattacatgaatgtaagatgatggctcaaaaatgacgacttatagtttgaatttatgtgtatgcaatatacatatgagaaccaaattcaacaagtgacatgaatgttactacatgaacattgaattgtattgcccttgtcagttatttcctctgttcaataaatactgaaggtcacaaacacctttttacttttcaa

SEQ ID NO: 120061 - DNA, 709 bp, Homo sapiens
  Payload ID: 3547
  Gene Symbol: CLVS1
  Gene Name: clavesin 1
  ENST ID: ENST00000524095
  CDS Start-End: 704-709
attcccctcctatccttccccccaagtctccaaagtccactgtatcattcttttttttttttgagacagactctcattctgtcacccaggctggagtgcagtggcacgatctcggctcactgcaagctccgcctcctgggttcatgccattctgctgccttagcctcctgagtagctggcattacaggtgcccgacgccacgtcaggctaattttttgtatttttagtagagatggggtttcaccgtgttagccaagatggtcttgatctcctgacctcgtgatccgcccgcctaggcctcccaaagtgctgggattccaggaactccttcacagacatccttcgtgccatcctgctgtcattggaagtcctaatcgaagatccggagcttcagataaatggcttcattttaattatagactggagtaatttttccttcaaacaagcctccaaactgacaccttcaatccttaaactggccattgaagggttgcaggacagctttcctgcccgctttggaggagtccactttgtcaaccagccctggtacattcatgccctctacacactcatcaagccatttcttaaagacaagaccaggaaacggattttcctgcatggaaacaatttaaacagccttcaccagctaatacaccctgaatttttgccctctgaatttggaggaactcttcctccttatgacatggga

SEQ ID NO: 120062 - DNA, 3622 bp, Homo sapiens
  Payload ID: 3547
  Gene Symbol: CLVS1
  Gene Name: clavesin 1
  Uniprot ID: Q8IUQ0
  ENST ID: ENST00000519846
  CDS Start-End: 473-1537
gaatcgggcgcacacgcctcctaccaaaatcacagccccttgtggagcccgagctctcattcacagctttctagagaaatctgagcccgaacctgccagaataggggatctcacccacccagttcagcagcgaggacacctgcagaaatacattcccaaagcaaggctgggcggccgtgtgaaggcagttttcttagctgtgattcccactgctgccattgtctgtgcaatcacatccagaagaagggtcacggttacatggatctgctgggaaaacaattagtggaaaagggggcaaatagagttaatggccgtttttggtaagcaatggcctcagttttgcttctgttttggatgaacaccaccacatagggcctgaatgtgaaagaagaccctctatttgtctgttccggggcagcctggtagtaaaacactgttgaatgggccacagtttcagcagaccatcaggtgaatgggaccagtctctcttcttccaaaatatcagaagttaaacacttggaacggagatttggccaagatgacccatttacaggctggactcagtccagagactatagagaaagctcgcctggaactgaatgaaaaccccgatgttttacatcaggatattcagcaagtcagggacatgatcatcaccaggcctgacattggatttttacgtacagatgatgccttcatcctgagatttctccgagccaggaagtttcaccaagcggatgcctttagactcctggctcagtatttccagtaccgccagctaaacctggacatgttcaaaaacttcaaggcagatgatcccggcattaagagggctctgatcgatgggttccccggggtgctggaaaaccgagaccattacggcaggaagattcttttgctgtttgcagccaattgggatcagagtaggaactccttcacagacatccttcgtgccatcctgctgtcattggaagtcctaatcgaagatccggagcttcagataaatggcttcattttaattatagactggagtaatttttccttcaaacaagcctccaaactgacaccttcaatccttaaactggccattgaagggttgcaggacagctttcctgcccgctttggaggagtccactttgtcaaccagccctggtacattcatgccctctacacactcatcaagccatttcttaaagacaagaccaggaaacggattttcctgcatggaaacaatttaaacagccttcaccagctaatacaccctgaatttttgccctctgaatttggaggaactcttcctccttatgacatgggaacttgggcccggacgttactcggtcccgactacagcgatgaaaatgactatactcacacatcctataatgcaatgcacgtgaagcatacgtcctcgaatctggagagagaatgctcacccaagctgatgaaaagatctcagtctgtggtagaagctgggaccctgaaacatgaggagaagggagagaatgagaacacccagccactcctggctctggactgaaccctgagtcaccccaatgctcctgcacactggccttcagtggtatcagccacccaggaagcacatgcacaactgacccatgcagacacgtgtgttctgcttgacacaaggtcctccactcctgaacccctgcagtgactgtcaccagccatcggtctgagcagccaaagttggacaaagacttgagagatgctttttttttcccccagtgaggggactggaggatgatgcaaggcatttatgtaaaaaagattctccctcctttcatatttattgtagtaaattgaaaaaataaagactaaatttgatggacacactgcattaggacaagaatttttctgaggtatcacacagggaccctctccagtttttgaaaattaagtgcatttccaagtaaatgtatcagagttaaactgtacagacaccactgtcaagtttcatgtagtacaaagccctgagacaatagtatctccagtaatttccattcttactgaattatttcctttgacctcatcaccagcatcgaattgttcagcctaagagcatgttctcataggtctgggtatttgcaaagtttgcttattttgatgatatcctgcaaaaaattattttgatgtcacatctcttgtcaggtcactagctgactgtcatgagctgacgttaaaggaagacacatggacgtgaaatacgattatttcatctgagcaatgtgagttaccacaggcagctcaaaagcccattagtgcagcatgtgtctgcagaggagatgtctcatgaaaatcacatgtcagtgattaatgaatccattccagttgcctcaactgggtcactacagcaaagaaaagtgctatcaaaccatttacccttgcccccacaaccctcctgcaaccattaaagatgtggagaaagaccatggttgttgctgagagggtaaatattcaatcatggagcatgacccatatggatggctaaatatgcaagtactgaagtaagagaagactagaaatgcaggatgaaatgtcaaaggtcattttatttacctagtctccttagaaatggagtccccaactactcattcaaaagaaatcagacataaaataaacagacatcatatatgatatccttacttgtgccatgttttccaagaccagtgcatatttttagacatctcttattcgcccagccatctgcatgacatgggtatttattagtattaccagttggtgctcaaagtcaaacaaaaatattttagttaataatgggcagtaaaatatgattttacattattttaaatatttgggagagttaatttgttagctaaataattcaagggaaagagattattcaactggtcataatcacccctgataatattattactaatcttaattatttattacatcatctctttctcaatggatctaatgttttaattttttcccctattggtagagaacaataacagaagtaatttttatattatacacttggagaaataaagttgaaacagaattaaaaatatttctcaaacaactgtatcacaatataaattaaactaattcatttttgtgtagacatacgaaatcacaaaaataataacactgaaataattctaccaatgcagtgatggaaacacttttcttatgtaccaagacatagataggtaagagaaataaagaattgaagtgaattagaaaatccattttattgcttgggtttaaaatagttgtgggatacaagtatttacaatgctattggagtcaattattgacaacactttgcaacagtaataccatttctagcttttcaattggcaatacttagaaccttactgtagtgacctgattttaaataccatattatatttactaagttaagagctagtttttactctcttccataatttcattacatgaatgtaagatgatggctcaaaaatgacgacttatagtttgaatttatgtgtatgcaatatacatatgagaaccaaattcaacaagtgacatgaatgttactacatgaacattgaattgtattgcccttgtcagttatttcctctgttcaataaatactgaaggtcacaaa

SEQ ID NO: 120063 - DNA, 552 bp, Homo sapiens
  Payload ID: 3547
  Gene Symbol: CLVS1
  Gene Name: clavesin 1
  ENST ID: ENST00000522621
  CDS Start-End: 316-552
gctagttctgctccaagaacccaagaggtaaggccttcagtcaagaggacagcccacgtctcattgttccagtggcctaatcaagggaatggaagatgaggagaatgaaggctctgggaatttattttcatcgtggaccggactttttatcagccaggaaaaagtaagcaatggcctcagttttgcttctgttttggatgaacaccaccacatagggcctgaatgtgaaagaagaccctctatttgtctgttccggggcagcctggtagtaaaacactgttgaatgggccacagtttcagcagaccatcaggtgaatgggaccagtctctcttcttccaaaatatcagaagttaaacacttggaacggagatttggccaagatgacccatttacaggctggactcagtccagagactatagagaaagctcgcctggaactgaatgaaaaccccgatgttttacatcaggatattcagcaagtcagggacatgatcatcaccaggcctgacattggatttttacgtacagatgatgccttcatcctgagattt

SEQ ID NO: 120064 - DNA, 582 bp, Homo sapiens
  Payload ID: 3547
  Gene Symbol: CLVS1
  Gene Name: clavesin 1
  ENST ID: ENST00000523868
  CDS Start-End: 552-582
ctcctaccaaaatcacagccccttgtggagcccgagctctcattcacagctttctagagaaatctgagcccgaacctgccagaataggggatctcacccacccagttcagcagcgaggacacctgcagaaatacattcccaaagcaaggctgggcggccgtgtgaaggtatttgttaccttttttctcccctctgtatttgccgagcctccccgcctttcccccgctctttcgatgccatggctgcggcgtttcagcacttcggcagttttcttagctgtgattcccactgctgccattgtctgtgcaatcacatccagaagaagggtcacggttacatggatctgctgggaaaacaattagtggaaaagggggcaaatagagttaatggccgtttttggtaagcaatggcctcagttttgcttctgttttggatgaacaccaccacatagggcctgaatgtgaaagaagaccctctatttgtctgttccggggcagcctggtagtaaaacactgttgaatgggccacagtttcagcagaccatcaggtgaatgggaccagtctctcttcttccaaaatatc

SEQ ID NO: 120065 - DNA, 661 bp, Homo sapiens
  Payload ID: 3547
  Gene Symbol: CLVS1
  Gene Name: clavesin 1
  ENST ID: ENST00000520712
  CDS Start-End: 484-661
aactccttcacagacatccttcgtgccatcctgctgtcattggaagtcctaatcgaagatccggagcttcagataaatggcttcattttaattatagactggagtaatttttccttcaaacaagcctccaaactgacaccttcaatccttaaactggccattgaagggttgcagaagatggataaaatcaatgctgaggacctattcagaaggacagtgatgccagagctagttattcattgaactcattctgtgagaaatgtcagccaatctttggacagctttcctgcccgctttggaggagtccactttgtcaaccagccctggtacattcatgccctctacacactcatcaagccatttcttaaagacaagaccaggaaacggattttcctgcatggaaacaatttaaacagccttcaccagctaatacaccctgaatttttgccctctgaatttggaggaactcttcctccttatgacatgggaacttgggcccggacgttactcggtcccgactacagcgatgaaaatgactatactcacacatcctataatgcaatgcacgtgaagcatacgtcctcgaatctggagagagaatgctcacccaagctgatgaaaagatctcagtctgtggtagaagctgggaccctgaaacatg

SEQ ID NO: 120066 - DNA, 2880 bp, Homo sapiens
  Payload ID: 3547
  Gene Symbol: CLVS1
  Gene Name: clavesin 1
  ENST ID: ENST00000518592
  CDS Start-End: 550-777
ctcctaccaaaatcacagccccttgtggagcccgagctctcattcacagctttctagagaaatctgagcccgaacctgccagaataggggatctcacccacccagttcagcagcgaggacacctgcagaaatacattcccaaagcaaggctgggcggccgtgtgaaggaactccttcacagacatccttcgtgccatcctgctgtcattggaagtcctaatcgaagatccggagcttcagataaatggcttcattttaattatagactggagtaatttttccttcaaacaagcctccaaactgacaccttcaatccttaaactggccattgaagggttgcaggacagctttcctgcccgctttggaggagtccactttgtcaaccagccctggtacattcatgccctctacacactcatcaagccatttcttaaagacaagaccaggaaacggattttcctgcatggaaacaatttaaacagccttcaccagctaatacaccctgaatttttgccctctgaatttggaggaactcttcctccttatgacatgggaacttgggcccggacgttactcggtcccgactacagcgatgaaaatgactatactcacacatcctataatgcaatgcacgtgaagcatacgtcctcgaatctggagagagaatgctcacccaagctgatgaaaagatctcagtctgtggtagaagctgggaccctgaaacatgaggagaagggagagaatgagaacacccagccactcctggctctggactgaaccctgagtcaccccaatgctcctgcacactggccttcagtggtatcagccacccaggaagcacatgcacaactgacccatgcagacacgtgtgttctgcttgacacaaggtcctccactcctgaacccctgcagtgactgtcaccagccatcggtctgagcagccaaagttggacaaagacttgagagatgctttttttttcccccagtgaggggactggaggatgatgcaaggcatttatgtaaaaaagattctccctcctttcatatttattgtagtaaattgaaaaaataaagactaaatttgatggacacactgcattaggacaagaatttttctgaggtatcacacagggaccctctccagtttttgaaaattaagtgcatttccaagtaaatgtatcagagttaaactgtacagacaccactgtcaagtttcatgtagtacaaagccctgagacaatagtatctccagtaatttccattcttactgaattatttcctttgacctcatcaccagcatcgaattgttcagcctaagagcatgttctcataggtctgggtatttgcaaagtttgcttattttgatgatatcctgcaaaaaattattttgatgtcacatctcttgtcaggtcactagctgactgtcatgagctgacgttaaaggaagacacatggacgtgaaatacgattatttcatctgagcaatgtgagttaccacaggcagctcaaaagcccattagtgcagcatgtgtctgcagaggagatgtctcatgaaaatcacatgtcagtgattaatgaatccattccagttgcctcaactgggtcactacagcaaagaaaagtgctatcaaaccatttacccttgcccccacaaccctcctgcaaccattaaagatgtggagaaagaccatggttgttgctgagagggtaaatattcaatcatggagcatgacccatatggatggctaaatatgcaagtactgaagtaagagaagactagaaatgcaggatgaaatgtcaaaggtcattttatttacctagtctccttagaaatggagtccccaactactcattcaaaagaaatcagacataaaataaacagacatcatatatgatatccttacttgtgccatgttttccaagaccagtgcatatttttagacatctcttattcgcccagccatctgcatgacatgggtatttattagtattaccagttggtgctcaaagtcaaacaaaaatattttagttaataatgggcagtaaaatatgattttacattattttaaatatttgggagagttaatttgttagctaaataattcaagggaaagagattattcaactggtcataatcacccctgataatattattactaatcttaattatttattacatcatctctttctcaatggatctaatgttttaattttttcccctattggtagagaacaataacagaagtaatttttatattatacacttggagaaataaagttgaaacagaattaaaaatatttctcaaacaactgtatcacaatataaattaaactaattcatttttgtgtagacatacgaaatcacaaaaataataacactgaaataattctaccaatgcagtgatggaaacacttttcttatgtaccaagacatagataggtaagagaaataaagaattgaagtgaattagaaaatccattttattgcttgggtttaaaatagttgtgggatacaagtatttacaatgctattggagtcaattattgacaacactttgcaacagtaataccatttctagcttttcaattggcaatacttagaaccttactgtagtgacctgattttaaataccatattatatttactaagttaagagctagtttttactctcttccataatttcattacatgaatgtaagatgatggctcaaaaatgacgacttatagtttgaatttatgtgtatgcaatatacatatgagaaccaaattcaacaagtgacatgaatgttactacatgaacattgaattgtattgcccttgtcagttatttcctctgttcaataaatactgaaggtcacaaacacctttttacttttcaa

SEQ ID NO: 120067 - DNA, 11485 bp, Homo sapiens
  Payload ID: 3548
  Gene Symbol: CLVS2
  Gene Name: clavesin 2
  Uniprot ID: Q5SYC1
  ENST ID: ENST00000275162
  CDS Start-End: 1336-2319
acaaagggcgaagagaggggcgtggggaggctggaaagcatggttgccccgcctggcccggcgacgcccgctcagcagcctgctgaggagtggggacgaagagcagcctaaacttagggctcgggatatttcgatgccacccaaattgccgtcctaccccaacgaggcagggaaaggagcggagcgcgcgcgcgagctgagtgagtgcttacgtcgcagcgagatctgtgctgggataattagagaggagttgggctgagccgagtcctctttcagcagcagcagccggagccgccgccgcagcccggtggggcaaccctgactcggaccgctcgggagagccccaggagaggccagcgccgcgcagcagccgccccgctgcgcccacctccccggctgctcccggagggctcacaaaggcggtggccgcccgagtggccttctccatccaggcgttcgcgtcctcctccccaccttctctcccgaaggcgaaaatggcagggccaggcgagaacctgggacagcggtggccctagccctgcgatcctcacccctcctgctaggagaggctgcgggctgcccgcggacgatgtggccgcggctgctcccgagcgcatcttcggcccgggtccccgccgccacccctcttctctgctccttccatcccgcccagaggagttgatgccgctgtcgccgccgccgccgctgctgaagccgcggctgatggatgccagggagtgccgcattgcttagcgaccccgcctctgggtttgctgatgatctctctccgccctggagctcagcgctgaagagctaccttattattaatcagaatttccatcgccacccctggcaggcgtatccttcagcagggaccgcaggaacattcacagtgcaggggctgagatgtgcgtgggggttgtttttgttacatcttggaagagaagagaagaggacagtaccaagatcagaaacacccgtgctaggtggaattaggggtgatttgttaggaaagagaaaggacaagaagaggagtgcggagcccttcaggggttcacatctctttaaaggaaaggaaagagggagccaaagtagggtgttgtattttagggggcagaggaagaagtttacaccccccggcccccccagctttgctgggggaaagcaggagcaacagggcacttgattggacaccaagattattaatttcctgtaggggagaggaagcaggcagcaggaggtctgggggctggagtctggtggtggcaaggaccaggtttgctttgggacagtcaacaaggtcttctgagggaaagctcagagataggcagaacaatgactcatttgcaagccggtctctcccctgagaccctggagaaagctcgcctggagctcaatgaaaacccagacacgctgcaccaggacatccaggaggtgagggatatggtcatcaccaggccggacattggctttctgcgcacggatgatgccttcatcttacgcttcttgcgggctaggaagtttcatcactttgaggccttccgcctcctggcgcagtactttgagtaccggcagcagaacctggacatgttcaaaagctttaaggccaccgaccctggcatcaagcaggcactgaaggatggcttccctgggggcctggccaatctggaccactatggcaggaagattctagtcctttttgctgccaattgggatcagagcaggtacacactggtggatattttgcgtgccatcttactttctttagaagccatgattgaagatcctgagcttcaagtgaatgggtttgttttgatcatagactggagtaacttcactttcaagcaagcctctaaactcacaccaagtatgctgcgattagctattgaaggcctgcaggatagtttcccagcgcgatttggaggaattcattttgtcaatcaaccatggtatatccatgccctgtacaccgtgatccggcctttcctgaaggagaaaactcggaaaaggatatttttgcatggtaacaacctgaacagtctacaccaactaattcatcctgagatcctgccctctgagtttggaggaatgctgcctccttatgacatggggacatgggcaagaacactgctagaccatgaatatgacgatgacagcgagtacaatgtagactcctacagcatgcctgtgaaggaagtagagaaggaactctccccaaagtccatgaagagatctcaatcagtagtggatcctacagtactaaaacgcatggataaaaatgaggaagaaaacatgcaaccattgctttctctggactaataacttctctacatccccttcatggattagaaatggaaagtattggttttcagcaacagggacaacactgtagaggaattaccagctggaaaccgacttattcatgttaatgtagcataatatataacaaggcatcaggctttccttggcctgaaccatgggggccctgggctggatttttaaaatgtcaataatttattctgtaagtgccaagttgtttgtaaatataatgtaatcttcatgtcaagtttgtaaatttcagtagtaactcagtttggaaaaaggttggctcaaaagtccatgccagtgttatgaactataacaaaaagcagaaaagacacagtcaaagctaattaaatgtagccctctttcctatgaagccatatttcagctctcatagtgattgtttcattgtttttctctgaaactctgtcagtattcaaacatactcttaacgggcacacacaactaagtgattccaggaaattttatgattaatgtatttcctgtctagtgattttcatttcagagaaatgtgtcttagtaactatcattggccttgcattttggaggcaaggaatggcagatgagctggtaaactgaacacttgaactcttctatgttgtttaattcttggaatcttgtgaaaagatgtgtttcctcaattaagacgtagaaatgtaaaaaagagtggattctttttaaattgctgtcttcacaatgtgccctttattcaagaccctattatatttcttcctaatgtactctaagtacatttcccctccaaaactctttgactaagagaatgagaactcatgtgaacagtgttctgacagctaattttgaacataaaattttccacttacagatgaggggctaatttctaattgttgtgcactggttaaaaagtatatatatatatatattcacacatatatatttttactgagctctaataaatccttaatgtgacaggcttataaaataaatcatagatattcaatgatcttatggataattacatgagataactctggaaaactacttccactgaagttaatgaaaaggagaaatagtgaaactgactttcagtgtacctatttaaaggaattccaagttaatttataatgcaatcttacatatgtgccatcttatttgaactatatttttccttcaaagaagcaataggtctcaacatagtgtaggtagcatcaggtgacagaaagccaattttattttcaaatttaagttaattatcttcgtgatcctatttatccacaatttctttcagaaaagactgaaaaaacacattatattcaggagatataatgaaattattggaaggcatctatgacaacatgtaatcatttatacgtggatttagaaatttgcatatttaacattttatttcataaaatttatacaattacagcaaatcttaattttttaattttaaatttcaatgtgaaaaaatgatttttatcacccataataaattttgagattgagagtttaccattaaagtattcttttggaagaaaaatatctcagaaactcttggaaaccaacaaaaataaaggcatgtgtcagccttcatattttttggccaaaagctcccaaaatttgttataattctgcagccaaaaattgtaaaagcaagctgaatacaccaatgtacagtgtatcaatggactgcctcatgtgtgtaaaaatacattaattaacacaaatgaaagataccttaataatgccaacctccagtcaagtgcagaagaataatgactgtcaggcactctgctctccttgtgacttttacagagattggaatgcactggggacaacatgtctcagcagttcttacctttataagaattctaaccattgatattcttacattcttgcctacctgacatacattttgtagccatgggctttttagactatataaatcttaggcagtataatccattggaataaaatagaaacattgtaagtgcagagggcagtcaacttttcattctcatgagtttctcttgatgtgtaccatttattgccagttttcagaattctgccagtttcagatgtcaaccagcattggcagcttctttcccctatcgtaaagttagtgtcatatataaaaataactagaaaggcatattttatatgtatgcctatctaattataagtatcattcacactgtctcccagacccacatttggaaagtttgcattgcattactgctcatctttagatgagcaattgagagttggctagattgtgtaaaatattttaaaatgaatgaacaaattacaatgatgatgccttttgaaattaccatatctagttcattctgtgaataaactcattttctagtaatgtttgtgaaccttagtcaagggatattcattcaactttataaatttacccctcagcaccagctatctagcactgtttaggaatttttcccttcatgatattctgtgtcacatcctatgtctatgaataacctatacactatagttgtatgcctataagcactcctatactcttgtattttaattgcaatagtatacctccactctctctctctctctcatacacacacacacacacactcttacacacacactaacacactagactgtttgccctaatgaattttcctctgtacttcgagagctattttagttgtcttgtcacttgaaatttgcgggcttcaaagaattatcgcatttgacttggaatggtccagtagtccatttacttctttcaccctgcctgttccatcttctatttctgatattttttctttcttccagttatttcaggggcaggtgattccaaagctggtttaaaaataaataacttctcttatgttgtcagtgatgtttgcctgcatttttgactactatttaagagggaagagattatcatgaaaatatactctaagaaatatgaagaagtgcctctttgaaaatggaataaagcaacgttactggcatatggattttatttgtactctcttccaaaaagtaaatacgtaaatctatattatataggtgaaatatagatatcatttgaagaaggatatttaaggcctttatttgaacatactcatacagtattaagtctctgttgtgtaagttaaatacagtaactttagtacatgttaatgataaacgtggcactaggctaaaacgatatacgagtattaaacagagttttgcaagcaagtttttgaagtgggcatgcatgaattctttcatttcagtaatggtttgcataagtgtagacagagatatttcctaagttttttcatatagaatacttatttactttatagtaccaaaaattcatacattcataagcaggaaagccaaaaattcatacattaatacttagcttttttaatactgttaactaggtcatattgttaaacatgtgaagcgtctgtaatattcctgagggaaaagaggtccctctattgcatcaagaaattggagagttgttttagacattggggaatatgtttatgactcttcacataaagaaaccttcagagccatggagtatgtcttcagggacagggatcatttgcttctacaatgtaaaggtttatggacatatctctggtcctttaaagaagttacattaagaaagcttgctgagaggctgtacactcttctgttgttttatttaaaggtctgccttgtgtggttggtgaataatatctcagcttctttttttgtgtatatttattaatgattacatgaaaagttgccatcagccatgaggacacttcaaaaattttcaacacactaaataaaatgagcagagctctagcatgatatttgaactttcagatatggtatatgtacattttttacaacaataagctcataggcatatattccattgtagatctgctatataaatacatagcctgaaacatagtaatgcatttgaaatttgtgaggtcactgatcatacaagaagaggcagattataaaccaacatattggaacaaaagaagattggttaaatatgcaaggtgtgtaattatcttcagtaatgaaaaggatttgttttcttgtttttgtctttggttttagttgaaaaaatagcttcccatatgctactggaactatttgacattatttgctacatgaaaaaaggcaaataagtaaacatacaaaagaagcttggctttgtaacattattatattatgatctcaatggcttagagaatataatcttttttaagaattaaagattttattttataaatatttggaggttaacataggacatgaaaatagtgctgtggattctgttatgtactaactatgggaatgaattctccagtaccataggaaaatatataagataacaactttgtggattgaaacactcaaattagcctttttttcaaggaagcaggtgtacaaatgatgctattgaaataaaaaaatgtagaaatcacttaattataggagttaaatataatcaatgcactcatggtaaataatggaaattgttaaaatttagaagagttttgtcattatttgacttagatttaagtctcagtgcaaatatgtctgtccttgatatagtgcatttattctgtaagacttattttacctggtgaacgagatggacttaggtgaaaataaattttaaccacagttttaagggtcacccaatcctcaactactttaaaaaattgcaatgaattttaattcatttacttttaacagagatacaaagcactgtcttgtttctaatccaatttttcaatttttcagattttatatttgcttaaacaataaataaaactcagaaaaccaaatagtttttgttttcaaagctatccaggaaaaataaaagatgtctaacaggaaatcatacaagtccttgaagaatactgagtatattatttgctattttactcaaatgttattaatttttactactacaaactacttatttagtactacacggcatttactatttggccttttgaaggagttataaattccaaaacactataatataatttttggacaagtatacatttctgtttaaaagaaatgtatgcttttattttgtatattttatattttaaatgtatacatttattttgcacattgttaatgttaaatttggtagtcctggatctgctgcatctataaaatggagatttctttaaaaaatcgtctaaaaattagcaatatttttattttgagagaaattgtgcttagctatttaagttaagattcctcaagtttgtgatatttgtatgtgtggggatcaaagaggaaaatatatagtaatttgtttcatcaaaatgacgtattcaatattctataacttctagtcaaactttcaaatgaaagtttgaaagaagtaaactaatgttttaattacatatagcaaaggaatgatcagtaaataaaataactagggttttcacatttgcaatagaatgactggattaggcaagagattaaatttagaaatttgaattacagaaaagcattggtttaaataaatcctcaaaaaagtaatcccaggtcaaaatatgatgtgaaattaaaaaaaaaattcagcctgatttgagaaagaatgcttactcaataaatatgtatttgtgtcttctgtgagtttccctcatttatcctatctgtggatgaaaagtcatctaataaggtataagagactcaattacatttacctagaaccatctacaagtagacttcatgaatttctttggctcaaactcagaggattttctttacacaggattcttgaggttatcaagaatcgttattgctgctccctcctaaaggcaggccaggagaagccacatttccagcagtagtatcctcagtgggaatgaaccagaaaacaaagaaaaagccagagatattgtctccactctcgttacaaaaaagtgcgttccttcttcaggaggatcgagtagaaaatattttctactcgaagaggccatggggaagtgatggtcaaatctctgttgtgaagcaagtttccacacagaaacatcatcaaaaacacgtacctctgagcatcacttctttctctaaaaataaaaataaatatgctgttttcctcccttttttctaattggcatcataaaagtataagaagccacaaatgcattgttgccacttaagaaaaaaatcctatgttatacatatatgaacataattcacttagttgcatatgattgaaatatttgcatgctggtttataaattattacctaaaagttttatgaaatataattattaagttttagtgctagaaaaattgttgttttttgtgttttgtattcatagggaagactagtaatatcccttactcctcattcatatagctaacaattttaattggatggctaatggatatggcggatttaacatttacaaaaccaaactactttcactctgaccctgcttcccctttagccttctcatctcactatgtgtcgaccccaatcttccagtttctaggaataaaaattttggagtcatcctctctttccttcctctttttctttcaaaactacatcacatcagctagctcatgctgttgggtcttcaaaatatatccacactctaaccacttctccaatcttcttcactgtattggaccaagtcttcaacattttccatctggaatattttaataatctaaaaactagtcttcttgcttccagagtcaattttcaacacattagcaagagtgagtctcttaaaatgtaactcagaccattttgttctccaaaccctctgaaagagtaaaagccgatgtctttatatcagtgtatgagaagtcttgatatgaaggcagtaagcaccagtacagcaacatagcatggtttctgattgggctggcatttttgctggtactatgaaaaaatagttgttaaatactttaatttcttgcttctgaagttctctaccccgttcttgccttttcttagataatctcttaagaatctctcctttatttactgctgccaaactgtcatctttgctgttccaggaacttgctaagcatgcctctacctcaggactttcgcatttctgttccctttgcctctaatttcagatatccacgtggtttattccctcatcttcttcaggtatttgcttaaatgtcatcttctttgtgaggactctctttcctaattttagatgaaacagccctgtggttcttcatattctcctttcctgctgtatttcctctccatagcatttatcacctgatacaccatacagattatttatttactttgcatttccccccaatagcaatgtgaactccacaagggcaggaatttttgtctgtttactactgcattactggtgccttgtacagtccctggaacttaacaaatccaaaatgatttcatgaggatcctaatttgtttcagcaagttatgtaacggccaatagtatgaattgaaagagtttcttgttgtcttaatttaaaaaattttgttatttatcttcaaaggggaaattttaccctctcatgataatagaatcatgaatcaaaaatgatatcctcttctccccaattgtgatctctatccctgagcctaagttttacatcagtatttcagttttgtctttagaagttactcaacgatcactggaccctatatctatccacatggcttactcttggagagactacaagatagctcaggggaaaagtcattttgagattaaaactacatggaattgttctttatggattatcatggttaatttcaatttttaaaaatatgcaggaagttaaaagactataattccagtattggaagccagtttaagagaatatgactatgtagttacttttaatggaaaggggaagaagaggaagaaaaaggaaagacattgtgttcgtatcttctctgcaacaattataaaatgaatgaggaagtattttggtgtttctaaggtctttccatgatcttgaaatctatatattatagtcatttagtctgtgaaccattttaacaattgggtttcatgttacatatctttaaatttttatgttgaaaatttatagctgtgacacaagatgatagaaattgctcatgctcacatatattccaactggcttttcagcttgctcccttctcttttaatttcagctatcatttttagagccttacagtcacaattgttcttaactatcccaaatttttatttcctatttggactgacttctccataattttagtaactaaatgacctagatattggttcttgttgtgataggtttctgatttgtatcctttgcagtttaacttttaatccttaccaaacatatgttattccttttcttcagctacattgttgtgcctttcccaacactgtaataatttaagcctcctgttttataatcttctatcagaacatatattaagaagacactgaatttaaagaatcagcaggtgatgttgaagaagaaatataacctgaaatataagaatagatgtttgaaactgtttcagaagttaaccagtcttttagtggctttgtaatgggtaggggttttattcctctttgtgtgctatgtaggacattgttaaccaatatagattatgtttcttgtcagttacacaaggataggtaatcagggttaacagttcggaaaacattctctagagaagagactaatgattcttgctcacaaacaaggcagaatttccttatgtttcttaatatttgatccttgatagtctgtacagtggaaaccatttccctctgtgatatccttttttgccaacctatatgaatgtgtttagcgtcacttcagatatagagttcaagctcaagtatacacagcacatgaaagatcctatagttcatgttctcttaggttgaattttcttttcataattttttatgattgaattctaagggtatgttccttggtaaattgtgttaattatgtccactttataatggatttaacaattttacaaagcagatcattgtttattatattctgaaaaccattatattaatattttatttctttttttgcagagaaactattgtcttttttgatttctgaggatgaatgaagtactgttaaataaaatgtcactaaatgaaacttcaga

SEQ ID NO: 120068 - DNA, 1359 bp, Homo sapiens
  Payload ID: 3548
  Gene Symbol: CLVS2
  Gene Name: clavesin 2
  Uniprot ID: Q5SYC1
  ENST ID: ENST00000368438
  CDS Start-End: 108-653
ggctgatggatgccagggagtgccgcattgcttagcgaccccgcctctgggtttgctggtacacactggtggatattttgcgtgccatcttactttctttagaagccatgattgaagatcctgagcttcaagtgaatgggtttgttttgatcatagactggagtaacttcactttcaagcaagcctctaaactcacaccaagtatgctgcgattagctattgaaggcctgcaggatagtttcccagcgcgatttggaggaattcattttgtcaatcaaccatggtatatccatgccctgtacaccgtgatccggcctttcctgaaggagaaaactcggaaaaggatatttttgcatggtaacaacctgaacagtctacaccaactaattcatcctgagatcctgccctctgagtttggaggaatgctgcctccttatgacatggggacatgggcaagaacactgctagaccatgaatatgacgatgacagcgagtacaatgtagactcctacagcatgcctgtgaaggaagtagagaaggaactctccccaaagtccatgaagagatctcaatcagtagtggatcctacagtactaaaacgcatggataaaaatgaggaagaaaacatgcaaccattgctttctctggactaataacttctctacatccccttcatggattagaaatggaaagtattggttttcagcaacagggacaacactgtagaggaattaccagctggaaaccgacttattcatgttaatgtagcataatatataacaaggcatcaggctttccttggcctgaaccatgggggccctgggctggatttttaaaatgtcaataatttattctgtaagtgccaagttgtttgtaaatataatgtaatcttcatgtcaagtttgtaaatttcagtagtaactcagtttggaaaaaggttggctcaaaagtccatgccagtgttatgaactataacaaaaagcagaaaagacacagtcaaagctaattaaatgtagccctctttcctatgaagccatatttcagctctcatagtgattgtttcattgtttttctctgaaactctgtcagtattcaaacatactcttaacgggcacacacaactaagtgattccaggaaattttatgattaatgtatttcctgtctagtgattttcatttcagagaaatgtgtcttagtaactatcattggccttgcattttggaggcaaggaatggcagatgagctggtaaactgaacacttgaactcttctatgttgtttaattcttggaatcttgtgaaaagatgtgtttcctcaattaagacgtagaaatgtaaaaaagagtggattctttttaaa

SEQ ID NO: 120069 - DNA, 1634 bp, Homo sapiens
  Payload ID: 3549
  Gene Symbol: CLP1
  Gene Name: cleavage and polyadenylation factor I subunit 1
  Uniprot ID: Q92989
  ENST ID: ENST00000302731
  CDS Start-End: 121-1206
tttccggcgtgggtccgggcaagaaccgcttgtagtttggtttaaattctgcacgggaggaccttctgagtttacctgttgggctcctggctgcgcaggcacagcagctacacagaagagatgggagaagaggctaatgatgacaagaagccaaccactaaatttgaactagagcgagaaacagaacttcgctttgaggtggaggcatctcagtcagttcagttggagttgttgactggcatggcagagatctttggcacagagctgacccgaaacaagaaattcacctttgatgctggtgccaaggtggctgttttcacttggcatggctgttctgtgcaactgagcggccgcactgaggtggcttatgtctccaaggacactcctatgttgctttacctcaacactcacacagccttggaacagatgcggaggcaagcggaaaaggaagaagagcgaggtccccgagtgatggtagtgggccccactgatgtgggcaagtctacagtgtgtcgccttctgctcaactacgcaattacatctcgtttagcagatgtgttcaaccaaaggtgtgaggtgaaccgaagggcatctgtgagtggctgtgtcattaacacctgtggctgggtcaagggctctggttaccaggctctggtgcatgcagcctcagcttttgaggtggatgtcgttgttgttctggatcaagaacgactgtacaatgaactgaaacgggacctcccccactttgtacgcactgtgctgctccctaaatctgggggtgtggtggagcgctccaaggacttccggcgggaatgtagggatgagcgtatccgtgagtatttttatggattccgaggctgtttctatccccatgccttcaatgtcaaattttcagatgtgaaaatctacaaagttggggcacccaccatcccagactcctgtttacctttgggcatgtctcaagaggataatcagctcaagctagtacctgtcactcctgggcgagatatggtgcaccacctactgagtgttagcactgccgagggtacagaggagaacctgtccgagacaagtgtagctggcttcattgtggtgaccagtgtggacctggagcatcaggtgtttactgttctgtctccagcccctcgcccactgcctaagaacttccttctcatcatggatatccggttcatggatctgaagtagagatcagcaggaagccttgctgcctgggacatagagatcatctggccacccctagaggcagatgggctgagataaaagactgttggggccacctgaccagtaaactgtggactagtagaaagttcatattctacctctaaaaacaggtagtggtaacctgactcttctaatcttgaaccaaaaggaaaaccatgagactgtaattggtttcttagaccacctaagatgccactttgaattctctaagaccctggagaattgcatttctttcactgtgctactatgtggtttttaaaaaatcaatgctttatattccatatgtggttcttacccatttatctaggatgaaagtgtgaattagagggactccttccaataaagttcaaacttaaaaaaaatcattttaataaatatttttgccatatcat

SEQ ID NO: 120070 - DNA, 553 bp, Homo sapiens
  Payload ID: 3549
  Gene Symbol: CLP1
  Gene Name: cleavage and polyadenylation factor I subunit 1
  ENST ID: ENST00000533905
  CDS Start-End: 157-553
aactgcgtttgtttccggcgtgggtccgggcaagaaccgcttgtagtttggtttaaattctgcacgggaggaccttctgagtttacctgttgggctcctggctgcgcagatctgatatttaatttgtgttctaggcacagcagctacacagaagagatgggagaagaggctaatgatgacaagaagccaaccactaaatttgaactagagcgagaaacagaacttcgctttgaggtggaggcatctcagtcagttcagttggagttgttgactggcatggcagagatctttggcacagagctgacccgaaacaagaaattcacctttgatgctggtgccaaggtggctgttttcacttggcatggctgttctgtgcaactgagcggccgcactgaggtggcttatgtctccaaggacactcctatgttgctttacctcaacactcacacagccttggaacagatgcggaggcaagcggaaaaggaagaagagcgaggtccccgagtgatggtagtgggccccactgatgtgggcaagtctacagtgtgtcgcc

SEQ ID NO: 120071 - DNA, 1778 bp, Homo sapiens
  Payload ID: 3549
  Gene Symbol: CLP1
  Gene Name: cleavage and polyadenylation factor I subunit 1
  ENST ID: ENST00000529430
  CDS Start-End: 55-1365
aaggtagtaaaaagaggattatagacgtggtggaacctgttggctgcggggcaaatgactgacctgcacagcagctacacagaagagatgggagaagaggctaatgatgacaagaagccaaccactaaatttgaactagagcgagaaacagaacttcgctttgaggtggaggcatctcagtcagttcagttggagttgttgactggcatggcagagatctttggcacagagctgacccgaaacaagaaattcacctttgatgctggtgccaaggtggctgttttcacttggcatggctgttctgtgcaactgagcggccgcactgaggtggcttatgtctccaaggacactcctatgttgctttacctcaacactcacacagccttggaacagatgcggaggcaagcggaaaaggaagaagagcgaggtccccgagtgatggtagtgggccccactgatgtgggcaagtctacagtgtgtcgccttctgctcaactacgcagtgcgtttgggccgccgtcccacttatgtggagctggatgtgggccagggttctgtgtccatccctggtaccatgggggccctctacatcgagcggcctgcagatgtcgaagagggtttctctatccaggcccctctggtgtatcattttggttccaccactcctggcactaacatcaagctttataataagattacatctcgtttagcagatgtgttcaaccaaaggtgtgaggtgaaccgaagggcatctgtgagtggctgtgtcattaacacctgtggctgggtcaagggctctggttaccaggctctggtgcatgcagcctcagcttttgaggtggatgtcgttgttgttctggatcaagaacgactgtacaatgaactgaaacgggacctcccccactttgtacgcactgtgctgctccctaaatctgggggtgtggtggagcgctccaaggacttccggcgggaatgtagggatgagcgtatccgtgagtatttttatggattccgaggctgtttctatccccatgccttcaatgtcaaattttcagatgtgaaaatctacaaagttggggcacccaccatcccagactcctgtttacctttgggcatgtctcaagaggataatcagctcaagctagtacctgtcactcctgggcgagatatggtgcaccacctactgagtgttagcactgccgagggtacagaggagaacctgtccgagacaagtgtagctggcttcattgtggtgaccagtgtggacctggagcatcaggtgtttactgttctgtctccagcccctcgcccactgcctaagaacttccttctcatcatggatatccggttcatggatctgaagtagagatcagcaggaagccttgctgcctgggacatagagatcatctggccacccctagaggcagatgggctgagataaaagactgttggggccacctgaccagtaaactgtggactagtagaaagttcatattctacctctaaaaacaggtagtggtaacctgactcttctaatcttgaaccaaaaggaaaaccatgagactgtaattggtttcttagaccacctaagatgccactttgaattctctaagaccctggagaattgcatttctttcactgtgctactatgtggtttttaaaaaatcaatgctttatattccatatgtggttcttacccatttatctaggatgaaagtgtgaattagagggactccttccaataaagttcaaacttaaaaaaaatcattttaataaata

SEQ ID NO: 120072 - DNA, 2435 bp, Homo sapiens
  Payload ID: 3549
  Gene Symbol: CLP1
  Gene Name: cleavage and polyadenylation factor I subunit 1
  Uniprot ID: Q92989
  ENST ID: ENST00000533682
  CDS Start-End: 726-2003
atgactgacttgtagctggaagaaatcatcggatttttattcttttattaaagaaaaaaaatttgaaatgccttccatgtgccaagcactgtgtcaggtgggagatgacagcttggtgaaacctctgtcaggctgtcttcctccgctttctctatccctgggtttccccctgcctaaaaaggattttgtgcttcgtggcttgtccaggcaagcaggccgtcgcgggacctagaccgagacagtgagtctctctttctcccgggcctcccttctgtttcctgggctgcaggggagcaggaaatctggggcgagattcccgccgcggacgcgcactgccgaagcctggtccctcgacctgtccctgcccagcgcgggggcgcaaccgccacgcctcctcacccctccctccggctgcacgaataatgacaacagccgcccctcccacctttggcgtcacgttcaaaacaatcctttgactacaactcccagaaggccgagcggcttagcgagtgcacccgctctcggctgctccggcaaactacacatcccaaagggcagcgcgcgaccgcgtgtcctttcacagcgcaagtgcggaactgcgtttgtttccggcgtgggtccgggcaagaaccgcttgtagtttggtttaaattctgcacgggaggaccttctgagtttacctgttgggctcctggctgcgcaggcacagcagctacacagaagagatgggagaagaggctaatgatgacaagaagccaaccactaaatttgaactagagcgagaaacagaacttcgctttgaggtggaggcatctcagtcagttcagttggagttgttgactggcatggcagagatctttggcacagagctgacccgaaacaagaaattcacctttgatgctggtgccaaggtggctgttttcacttggcatggctgttctgtgcaactgagcggccgcactgaggtggcttatgtctccaaggacactcctatgttgctttacctcaacactcacacagccttggaacagatgcggaggcaagcggaaaaggaagaagagcgaggtccccgagtgatggtagtgggccccactgatgtgggcaagtctacagtgtgtcgccttctgctcaactacgcagtgcgtttgggccgccgtcccacttatgtggagctggatgtgggccagggttctgtgtccatccctggtaccatgggggccctctacatcgagcggcctgcagatgtcgaagagggtttctctatccaggcccctctggtgtatcattttggttccaccactcctggcactaacatcaagctttataataagattacatctcgtttagcagatgtgttcaaccaaaggtgtgaggtgaaccgaagggcatctgtgagtggctgtgtcattaacacctgtggctgggtcaagggctctggttaccaggctctggtgcatgcagcctcagcttttgaggtggatgtcgttgttgttctggatcaagaacgactgtacaatgaactgaaacgggacctcccccactttgtacgcactgtgctgctccctaaatctgggggtgtggtggagcgctccaaggacttccggcgggaatgtagggatgagcgtatccgtgagtatttttatggattccgaggctgtttctatccccatgccttcaatgtcaaattttcagatgtgaaaatctacaaagttggggcacccaccatcccagactcctgtttacctttgggcatgtctcaagaggataatcagctcaagctagtacctgtcactcctgggcgagatatggtgcaccacctactgagtgttagcactgccgagggtacagaggagaacctgtccgagacaagtgtagctggcttcattgtggtgaccagtgtggacctggagcatcaggtgtttactgttctgtctccagcccctcgcccactgcctaagaacttccttctcatcatggatatccggttcatggatctgaagtagagatcagcaggaagccttgctgcctgggacatagagatcatctggccacccctagaggcagatgggctgagataaaagactgttggggccacctgaccagtaaactgtggactagtagaaagttcatattctacctctaaaaacaggtagtggtaacctgactcttctaatcttgaaccaaaaggaaaaccatgagactgtaattggtttcttagaccacctaagatgccactttgaattctctaagaccctggagaattgcatttctttcactgtgctactatgtggtttttaaaaaatcaatgctttatattccatatgtggttcttacccatttatctaggatgaaagtgtgaattagagggactccttccaataaagttcaaacttaaaaaaaatcattttaataaatatttttgccatatcatagaa

SEQ ID NO: 120073 - DNA, 566 bp, Homo sapiens
  Payload ID: 3549
  Gene Symbol: CLP1
  Gene Name: cleavage and polyadenylation factor I subunit 1
  ENST ID: ENST00000529773
  CDS Start-End: 291-566
attcccagtcaagccaaggaaaggctgcacagaaggccagagaatcacaaaggggagtaggggtcattttttcacccatctcggatcacagggagaagcaagttgggcaaatgactggagaaaaaacaaaggcaagccgagtgctggggagagatgttcccctgaagtgagacggggctggaccgtaggagaaaggggagagggagggctggcgggggcaactgacagctgacagcagaggcgccgaggcggaggctggaggaaccaggcacagcagctacacagaagagatgggagaagaggctaatgatgacaagaagccaaccactaaatttgaactagagcgagaaacagaacttcgctttgaggtggaggcatctcagtcagttcagttggagttgttgactggcatggcagagatctttggcacagagctgacccgaaacaagaaattcacctttgatgctggtgccaaggtggctgttttcacttggcatggctgttctgtgcaactgagcggccgcactgaggtggcttatgtctccaaggacactcctatgttgctt

SEQ ID NO: 120074 - DNA, 1392 bp, Homo sapiens
  Payload ID: 3549
  Gene Symbol: CLP1
  Gene Name: cleavage and polyadenylation factor I subunit 1
  Uniprot ID: Q92989
  ENST ID: ENST00000525602
  CDS Start-End: 115-1392
ttgtttccggcgtgggtccgggcaagaaccgcttgtagtttggtttaaattctgcacgggaggaccttctgagtttacctgttgggctcctggctgcgcagctacacagaagagatgggagaagaggctaatgatgacaagaagccaaccactaaatttgaactagagcgagaaacagaacttcgctttgaggtggaggcatctcagtcagttcagttggagttgttgactggcatggcagagatctttggcacagagctgacccgaaacaagaaattcacctttgatgctggtgccaaggtggctgttttcacttggcatggctgttctgtgcaactgagcggccgcactgaggtggcttatgtctccaaggacactcctatgttgctttacctcaacactcacacagccttggaacagatgcggaggcaagcggaaaaggaagaagagcgaggtccccgagtgatggtagtgggccccactgatgtgggcaagtctacagtgtgtcgccttctgctcaactacgcagtgcgtttgggccgccgtcccacttatgtggagctggatgtgggccagggttctgtgtccatccctggtaccatgggggccctctacatcgagcggcctgcagatgtcgaagagggtttctctatccaggcccctctggtgtatcattttggttccaccactcctggcactaacatcaagctttataataagattacatctcgtttagcagatgtgttcaaccaaaggtgtgaggtgaaccgaagggcatctgtgagtggctgtgtcattaacacctgtggctgggtcaagggctctggttaccaggctctggtgcatgcagcctcagcttttgaggtggatgtcgttgttgttctggatcaagaacgactgtacaatgaactgaaacgggacctcccccactttgtacgcactgtgctgctccctaaatctgggggtgtggtggagcgctccaaggacttccggcgggaatgtagggatgagcgtatccgtgagtatttttatggattccgaggctgtttctatccccatgccttcaatgtcaaattttcagatgtgaaaatctacaaagttggggcacccaccatcccagactcctgtttacctttgggcatgtctcaagaggataatcagctcaagctagtacctgtcactcctgggcgagatatggtgcaccacctactgagtgttagcactgccgagggtacagaggagaacctgtccgagacaagtgtagctggcttcattgtggtgaccagtgtggacctggagcatcaggtgtttactgttctgtctccagcccctcgcccactgcctaagaacttccttctcatcatggatatccggttcatggatctgaagtag

SEQ ID NO: 120075 - DNA, 580 bp, Homo sapiens
  Payload ID: 3550
  Gene Symbol: CPSF1
  Gene Name: cleavage and polyadenylation specific factor 1, 160kDa
  ENST ID: ENST00000531042
  CDS Start-End: 24-470
cttgcgcagcccgggttggcgccatgtacgccgtgtacaaacaggcgcatccgcccaccggtctggagttctccatgtactgcaacttcttcaacaacagcgagcgcaacctggtagtggccgggacctcgcagctctacgtgtaccgcctcaaccgcgacgccgaggctctgaccaagaatgacaggagcacagaggggaaggcccaccgggagaagctcgagcttgctgcctccttctccttctttggcaacgtcatgtccatggccagcgtgcagctggcaggagccaagcgggatgccctgctcctaagcttcaaggatgccaagctgtctgtggtggagtacgacccgggcacccatgacctgaagaccctgtcactgcactactttgaggagcctgagcttcgggatcgagctgcaggagtgggagcatgtgacctgcatgaagacagtgtctctgcgcagtgaggagaccgtgtcgggcctcaaaggctacgtggccgccgggacctgcctcatgcagggggaggaggtcacgtgccgagggcggatcttgatcatggatgtgattgaggtgg

SEQ ID NO: 120076 - DNA, 4462 bp, Homo sapiens
  Payload ID: 3550
  Gene Symbol: CPSF1
  Gene Name: cleavage and polyadenylation specific factor 1, 160kDa
  Uniprot ID: Q10570
  ENST ID: ENST00000620219
  CDS Start-End: 131-4462
gtgggcggccgggcgggcggccgaggcggcagcgcgaggccggggaggggcgcggtgcggggccgggctcctgcgtgggcgaccccgctcacccttcctctcccggccttgcgcagcccgggttggcgccatgtacgccgtgtacaaacaggcgcatccgcccaccggtctggagttctccatgtactgcaacttcttcaacaacagcgagcgcaacctggtagtggccgggacctcgcagctctacgtgtaccgcctcaaccgcgacgccgaggctctgaccaagaatgacaggagcacagaggggaaggcccaccgggagaagctcgagcttgctgcctccttctccttctttggcaacgtcatgtccatggccagcgtgcagctggcaggagccaagcgggatgccctgctcctaagcttcaaggatgccaagctgtctgtggtggagtacgacccgggcacccatgacctgaagaccctgtcactgcactactttgaggagcctgagcttcgggacgggtttgtgcagaatgtacacacgccgcgagtgcgggtggaccccgacgggcgctgtgcagccatgcttgtctacggcacgcggctggtggtcctgcccttccgcagggagagcctggctgaggagcacgaggggctcgtgggtgaggggcagaggtccagcttcctgcccagctacatcatcgacgtgcgggccctagacgagaagctgctcaacatcatcgacctgcagttcctgcatggctactacgagcctaccctcctcatcctgtttgagcccaaccagacctggcctgggcgcgtggccgtgcggcaggacacgtgctccattgtggccatctcactgaacatcacgcagaaggtgcaccccgtcatctggtccctcaccagcctgccctttgactgcacccaggctctggctgtgcccaagcccataggtggggtggtggtgtttgccgtcaactcgctgttgtacctgaaccagagcgtccccccgtatggcgtggctctcaacagcctcaccacaggaaccacggctttcccgcttcgcacccaggagggtgtgcggatcaccctggactgcgcccaggccaccttcatctcctacgacaagatggtcatctccctcaagggcggcgagatctacgtgctgaccctcatcaccgacggcatgcgcagtgtccgagcgttccactttgacaaggcggccgccagcgtcctcaccaccagcatggtcaccatggagcccgggtacctgttcctgggttctcgcctgggcaattccctcctcctcaagtacacggagaagctgcaggagcccccggccagtgctgtccgtgaggctgccgacaaggaagagcctccctcaaagaagaagcgagtggatgcgacggccggctggtcagctgcgggtaagtcggtgccgcaggatgaggtggacgagattgaagtgtacggcagcgaggcccagtcgggaacacagctggccacctactcctttgaggtgtgtgacagcatcctgaacattggaccctgtgccaatgccgccgtgggcgagcctgccttcctctctgaagagtttcagaacagccccgagccggacctggagattgtggtttgctccggccacgggaagaacggggctttgtcggtgctgcagaagagcatccggccccaggtggtgacaacctttgagcttcccggctgctatgacatgtggacagtcatcgccccggtgcgtaaggaggaggaggacaatcccaagggggagggcacagagcaggaacccagcaccacccctgaagcagacgacgacggccgcagacacggattcctgattctgagccgggaagactccaccatgatcctgcagacggggcaggagatcatggagctggacaccagtggcttcgccactcagggccccacggtctttgctgggaacatcggggacaaccgctacattgtccaagtgtcaccactgggcatccgcctgctggaaggagtgaatcagctgcacttcatccccgtggacctgggcgcccccatcgtgcagtgcgccgtggccgacccctatgtggtcatcatgagtgccgagggccacgtcaccatgttcctgctgaagagtgactcctacggtggccgccaccaccgcctggcgctgcacaagcccccgctgcaccatcagtccaaggtgattacgctgtgcctgtaccgagacctcagcggcatgttcaccactgagagccgcctgggtggggcccgtgacgagctcgggggccgcagtggcccggaggccgagggcctgggctcagagactagccccacagtggatgacgaggaggagatgctgtatggggattcgggctccctcttcagccccagcaaggaggaggcccgaagaagcagccagccccctgctgaccgggaccctgcacccttccgggcagagcctacccactggtgcctgctggtgcgggagaatggcaccatggagatctaccagcttcccgactggcggctggtgttcctggtgaagaacttccctgtggggcagcgggtccttgtggacagctcctttggacagcccactacacagggcgaggcccgcagggaggaggccacgcgccagggggagctgcccctcgtcaaggaggtgctgctggtggcgctgggcagccgccagagcaggccctacctgctggtgcatgtggaccaagagctgcttatctacgaggccttcccccacgactctcagctcggccagggcaatctcaaagtccgctttaagaaggtccctcacaacatcaacttccgtgagaagaagccaaagccatccaagaagaaagcagaaggtggcggcgcagaggagggggctggggcccggggccgcgtggcgcgtttccgctacttcgaggatatttatggctactcaggggtcttcatctgcggcccctcccctcactggctcttggtgaccggccgaggggctctgcggctacaccccatggccatcgacggcccggtcgactctttcgctccattccacaatgtcaactgtccccgcggcttcctgtacttcaacagacagggcgagctgaggatcagtgtcctgcctgcctacctgtcctatgatgccccatggcctgtcaggaagatcccgctgcgctgcacggcccactatgtggcttaccacgtggagtctaaggtgtatgctgtggccaccagcaccaacacgccgtgtgcccgcatcccacgcatgactggcgaggagaaggagtttgagaccatcgagagagatgagcggtacatccacccccagcaggaggccttctccatccagctcatctccccggtcagctgggaggctattcccaatgccaggatcgagctgcaggagtgggagcatgtgacctgcatgaagacagtgtctctgcgcagtgaggagaccgtgtcgggcctcaaaggctacgtggccgccgggacctgcctcatgcagggggaggaggtcacgtgccgagggcggatcttgatcatggatgtgattgaggtggtgcccgagcctggccagcccttgaccaagaacaagttcaaagtcctttacgagaaggagcagaaggggcccgtgaccgccctgtgccactgcaatggccacctggtgtcggccatcggccagaagattttcctgtggagcctgcgggccagcgagctgacgggcatggccttcatcgacacgcagctctacatacaccagatgatcagcgtcaagaacttcatcctggcagccgacgtcatgaagagcatttcgctgctgcgctaccaggaggaaagcaagacgctgagcctggtgtcgcgggatgccaagcccctggaggtgtacagcgtggacttcatggtggacaatgcccagctgggttttctggtgtctgaccgcgaccgcaacctcatggtgtacatgtacctgcccgaagccaaggagagtttcgggggcatgcgcctgctgcgtcgggcagacttccacgtgggtgcccacgtgaacacgttctggaggaccccgtgccggggggccactgaagggctcagcaaaaagtcggtcgtgtgggagaataagcacatcacgtggtttgccaccctggacggcggcatcgggctgctgctgcccatgcaggagaagacctaccggcggctgctgatgctgcagaacgcgctgaccaccatgctgccacaccacgccggcctcaacccccgcgccttccggatgctgcacgtggaccgccgcaccctccagaatgccgtgcgcaacgtgctggatggggagctgctcaaccgctacctgtacctgagcaccatggagcgcagcgagctagccaagaagatcggcaccacaccagacataatcctggacgacttgctggagacggaccgcgtcaccgcccacttctag

SEQ ID NO: 120077 - DNA, 506 bp, Homo sapiens
  Payload ID: 3550
  Gene Symbol: CPSF1
  Gene Name: cleavage and polyadenylation specific factor 1, 160kDa
  ENST ID: ENST00000532935
  CDS Start-End: 1-506
gcctggccagcccttgaccaagaacaagttcaaagtcctttacgagaaggagcagaaggggcccgtgaccgccctgtgccactgcaatggccacctggtgtcggccatcggccagaagctctacatacaccagatgatcagcgtcaagaacttcatcctggcagccgacgtcatgaagagcatttcgctgctgcgctaccaggaggaaagcaagacgctgagcctggtgtcgcgggatgccaagcccctggaggtgtacagcgtggacttcatggtggacaatgcccagctgggttttctggtgtctgaccgcgaccgcaacctcatggtgtacatgtacctgcccgaagccaaggagagtttcgggggcatgcgcctgctgcgtcgggcagacttccacgtgggtgcccacgtgaacacgttctggaggaccccgtgccggggggccactgaagggctcagcaaaaagtcggtcgtgtgggagaataagcacatcacgtggtttg

SEQ ID NO: 120078 - DNA, 704 bp, Homo sapiens
  Payload ID: 3550
  Gene Symbol: CPSF1
  Gene Name: cleavage and polyadenylation specific factor 1, 160kDa
  ENST ID: ENST00000531727
  CDS Start-End: 1-615
atgaagagcatttcgctgctgcgctaccaggaggaaagcaagacgctgagcctggtgtcgcgggtacacctgtggcggcggtgctcgtgtctggtgtctgaccgcgaccgcaacctcatggtgtacatgtacctgcccgaagccaaggagagtttcgggggcatgcgcctgctgcgtcgggcagacttccacgtgggtgcccacgtgaacacgttctggaggaccccgtgccggggggccactgaagggctcagcaaaaagtcggtcgtgtgggagaataagcacatcacgtggtttgccaccctggacggcggcatcgggctgctgctgcccatgcaggagaagacctaccggcggctgctgatgctgcagaacgcgctgaccaccatgctgccacaccacgccggcctcaacccccgcgccttccggatgctgcacgtggaccgccgcaccctccagaatgccgtgcgcaacgtgctggatggggagctgctcaaccgctacctgtacctgagcaccatggagcgcagcgagctagccaagaagatcggcaccacaccagacataatcctggacgacttgctggagacggaccgcgtcaccgcccacttctagccccgtggatgccgtcaccaccagcacacggaactacctcccaccccctttttgtacaaaacacaaggaaaaacattttttgcttgaga

SEQ ID NO: 120079 - DNA, 4494 bp, Homo sapiens
  Payload ID: 3550
  Gene Symbol: CPSF1
  Gene Name: cleavage and polyadenylation specific factor 1, 160kDa
  Uniprot ID: Q10570
  ENST ID: ENST00000616140
  CDS Start-End: 76-4407
ggcccggccggactgagttcgctgctgtcccggttcctctcgagtcggctccaactgccagcccgggttggcgccatgtacgccgtgtacaaacaggcgcatccgcccaccggtctggagttctccatgtactgcaacttcttcaacaacagcgagcgcaacctggtagtggccgggacctcgcagctctacgtgtaccgcctcaaccgcgacgccgaggctctgaccaagaatgacaggagcacagaggggaaggcccaccgggagaagctcgagcttgctgcctccttctccttctttggcaacgtcatgtccatggccagcgtgcagctggcaggagccaagcgggatgccctgctcctaagcttcaaggatgccaagctgtctgtggtggagtacgacccgggcacccatgacctgaagaccctgtcactgcactactttgaggagcctgagcttcgggacgggtttgtgcagaatgtacacacgccgcgagtgcgggtggaccccgacgggcgctgtgcagccatgcttgtctacggcacgcggctggtggtcctgcccttccgcagggagagcctggctgaggagcacgaggggctcgtgggtgaggggcagaggtccagcttcctgcccagctacatcatcgacgtgcgggccctagacgagaagctgctcaacatcatcgacctgcagttcctgcatggctactacgagcctaccctcctcatcctgtttgagcccaaccagacctggcctgggcgcgtggccgtgcggcaggacacgtgctccattgtggccatctcactgaacatcacgcagaaggtgcaccccgtcatctggtccctcaccagcctgccctttgactgcacccaggctctggctgtgcccaagcccataggtggggtggtggtgtttgccgtcaactcgctgttgtacctgaaccagagcgtccccccgtatggcgtggctctcaacagcctcaccacaggaaccacggctttcccgcttcgcacccaggagggtgtgcggatcaccctggactgcgcccaggccaccttcatctcctacgacaagatggtcatctccctcaagggcggcgagatctacgtgctgaccctcatcaccgacggcatgcgcagtgtccgagcgttccactttgacaaggcggccgccagcgtcctcaccaccagcatggtcaccatggagcccgggtacctgttcctgggttctcgcctgggcaattccctcctcctcaagtacacggagaagctgcaggagcccccggccagtgctgtccgtgaggctgccgacaaggaagagcctccctcaaagaagaagcgagtggatgcgacggccggctggtcagctgcgggtaagtcggtgccgcaggatgaggtggacgagattgaagtgtacggcagcgaggcccagtcgggaacacagctggccacctactcctttgaggtgtgtgacagcatcctgaacattggaccctgtgccaatgccgccgtgggcgagcctgccttcctctctgaagagtttcagaacagccccgagccggacctggagattgtggtttgctccggccacgggaagaacggggctttgtcggtgctgcagaagagcatccggccccaggtggtgacaacctttgagcttcccggctgctatgacatgtggacagtcatcgccccggtgcgtaaggaggaggaggacaatcccaagggggagggcacagagcaggaacccagcaccacccctgaagcagacgacgacggccgcagacacggattcctgattctgagccgggaagactccaccatgatcctgcagacggggcaggagatcatggagctggacaccagtggcttcgccactcagggccccacggtctttgctgggaacatcggggacaaccgctacattgtccaagtgtcaccactgggcatccgcctgctggaaggagtgaatcagctgcacttcatccccgtggacctgggcgcccccatcgtgcagtgcgccgtggccgacccctatgtggtcatcatgagtgccgagggccacgtcaccatgttcctgctgaagagtgactcctacggtggccgccaccaccgcctggcgctgcacaagcccccgctgcaccatcagtccaaggtgattacgctgtgcctgtaccgagacctcagcggcatgttcaccactgagagccgcctgggtggggcccgtgacgagctcgggggccgcagtggcccggaggccgagggcctgggctcagagactagccccacagtggatgacgaggaggagatgctgtatggggattcgggctccctcttcagccccagcaaggaggaggcccgaagaagcagccagccccctgctgaccgggaccctgcacccttccgggcagagcctacccactggtgcctgctggtgcgggagaatggcaccatggagatctaccagcttcccgactggcggctggtgttcctggtgaagaacttccctgtggggcagcgggtccttgtggacagctcctttggacagcccactacacagggcgaggcccgcagggaggaggccacgcgccagggggagctgcccctcgtcaaggaggtgctgctggtggcgctgggcagccgccagagcaggccctacctgctggtgcatgtggaccaagagctgcttatctacgaggccttcccccacgactctcagctcggccagggcaatctcaaagtccgctttaagaaggtccctcacaacatcaacttccgtgagaagaagccaaagccatccaagaagaaagcagaaggtggcggcgcagaggagggggctggggcccggggccgcgtggcgcgtttccgctacttcgaggatatttatggctactcaggggtcttcatctgcggcccctcccctcactggctcttggtgaccggccgaggggctctgcggctacaccccatggccatcgacggcccggtcgactctttcgctccattccacaatgtcaactgtccccgcggcttcctgtacttcaacagacagggcgagctgaggatcagtgtcctgcctgcctacctgtcctatgatgccccatggcctgtcaggaagatcccgctgcgctgcacggcccactatgtggcttaccacgtggagtctaaggtgtatgctgtggccaccagcaccaacacgccgtgtgcccgcatcccacgcatgactggcgaggagaaggagtttgagaccatcgagagagatgagcggtacatccacccccagcaggaggccttctccatccagctcatctccccggtcagctgggaggctattcccaatgccaggatcgagctgcaggagtgggagcatgtgacctgcatgaagacagtgtctctgcgcagtgaggagaccgtgtcgggcctcaaaggctacgtggccgccgggacctgcctcatgcagggggaggaggtcacgtgccgagggcggatcttgatcatggatgtgattgaggtggtgcccgagcctggccagcccttgaccaagaacaagttcaaagtcctttacgagaaggagcagaaggggcccgtgaccgccctgtgccactgcaatggccacctggtgtcggccatcggccagaagattttcctgtggagcctgcgggccagcgagctgacgggcatggccttcatcgacacgcagctctacatacaccagatgatcagcgtcaagaacttcatcctggcagccgacgtcatgaagagcatttcgctgctgcgctaccaggaggaaagcaagacgctgagcctggtgtcgcgggatgccaagcccctggaggtgtacagcgtggacttcatggtggacaatgcccagctgggttttctggtgtctgaccgcgaccgcaacctcatggtgtacatgtacctgcccgaagccaaggagagtttcgggggcatgcgcctgctgcgtcgggcagacttccacgtgggtgcccacgtgaacacgttctggaggaccccgtgccggggggccactgaagggctcagcaaaaagtcggtcgtgtgggagaataagcacatcacgtggtttgccaccctggacggcggcatcgggctgctgctgcccatgcaggagaagacctaccggcggctgctgatgctgcagaacgcgctgaccaccatgctgccacaccacgccggcctcaacccccgcgccttccggatgctgcacgtggaccgccgcaccctccagaatgccgtgcgcaacgtgctggatggggagctgctcaaccgctacctgtacctgagcaccatggagcgcagcgagctagccaagaagatcggcaccacaccagacataatcctggacgacttgctggagacggaccgcgtcaccgcccacttctagccccgtggatgccgtcaccaccagcacacggaactacctcccaccccctttttgtacaaaacacaaggaaaaacattttttgcttga

SEQ ID NO: 120080 - DNA, 13035 bp, Homo sapiens
  Payload ID: 3551
  Gene Symbol: CPSF2
  Gene Name: cleavage and polyadenylation specific factor 2, 100kDa
  Uniprot ID: Q9P2I0
  ENST ID: ENST00000298875
  CDS Start-End: 286-2634
tggtctcgccctggttcctcctcgtctccgccgctagtctccagctccaaaatggcggctgccactgtggggcttctgccggccggtagtccctggcgctgctgacccagcatcggcttttctacgtcttgaacctggattcgcctaggggttgggaagggctgtggacggcgttgggggaggcctgacgagattaataaagaactcttcagaattcctggtgtttcatcatatatacgactaagatatcaactcttctagcttgctgtttctggaccaaaaaaaatgacgtctattatcaaattaactaccctttctggggtccaagaagaatctgccctttgctatcttctccaagttgatgagtttagatttttattggactgtggctgggatgagcacttttctatggatattattgattccctgaggaagcatgttcaccagattgatgcagtgctgttgtctcaccctgatcctctccaccttggtgccctcccgtatgctgtcggaaagttgggtctgaactgtgctatctatgcaaccattcctgtttataaaatgggacagatgttcatgtatgatctttatcagtctcgacacaatacagaagattttacactctttacattagatgatgtggatgcagcctttgataaaatacagcagctaaaattctctcagattgtgaatttgaaaggtaaaggacatggcctgtctatcacacctctgccagctggtcatatgataggtggaacaatatggaaaatagtcaaagatggagaagaagaaattgtttatgcagttgacttcaaccacaagagggagatccatttaaatggatgttccctggaaatgctaagcaggccttccctacttatcacagattcattcaatgctacatatgtacagcctagaagaaaacagagagatgagcagcttctgacaaatgtcctggaaacacttcgaggtgatggaaatgtgttaatagcagtggacacagcaggcagagttttggaacttgctcaacttcttgatcagatttggaggactaaagatgcaggattgggtgtttactcattggcactcctaaataatgtcagttacaatgtggtggagttttctaagtcccaggtagaatggatgagtgataaattgatgagatgttttgaagacaaaagaaataatccgtttcagtttcgccatctctctttatgtcatggtctttctgacttggcccgtgtacctagccctaaagttgtacttgccagccaacctgacctggaatgcggattttcaagggatctctttattcagtggtgtcaggaccctaaaaactcaatcattctaacctacagaactactcctgggactttagcacgtttcctaattgataatccttctgaaaaaattacagaaatagagttgaggaaacgtgtgaagcttgaagggaaagaacttgaagaatacttggaaaaagagaaactaaagaaagaagctgccaaaaagcttgagcagtcaaaagaggcagatatagattccagtgatgagagtgatattgaggaagatattgaccagccatcagctcataagacgaagcatgacttgatgatgaaaggtgaaggcagtcgtaaaggaagttttttcaaacaggcaaaaaagtcctatcctatgtttcctgccccagaagaaagaattaaatgggatgaatatggagagattatcaaaccagaggatttcttagtgccagagcttcaagctactgaagaagaaaaaagcaaattagaatctggtttgacaaatggagatgaacctatggatcaggatttatctgatgttcctactaaatgtatttctacaacagagtctattgaaataaaagcccgggttacctacatagactatgaaggacgctctgatggggattccattaaaaaaatcattaatcagatgaaaccacgacagttgatcatcgtccatggcccaccagaggccagtcaagatctggcagagtgctgtcgcgcctttggtgggaaagatattaaagtgtacatgccaaagctacatgaaacagttgatgccactagtgaaactcacatctaccaggtgaggttaaaagactcacttgtcagctctcttcagttttgtaaggcaaaagatgctgaattagcttggatagatggtgtcttagatatgagagtttccaaagtggacacaggggttattttagaagaaggagaactaaaggatgatggagaagactcagagatgcaagtggaagctccctcagattctagcgttatagcacaacaaaaggccatgaaaagtctgttcggagatgatgaaaaagaaacaggtgaagaaagtgagatcattcctactttggaacccttgccacctcatgaggttcctggacatcagtcagtttttatgaatgaaccaaggctgtcagacttcaagcaagttctcttacgggaggggattcaagctgaatttgtaggaggtgtacttgtttgcaacaatcaagtagcagtccgcagaacggaaactggacgcattggattagaaggctgcctttgtcaagatttttataggataagagaccttttatatgaacaatatgccattgtataaaggacatgatgtcaagaagtatctgcttgacctttctaagaaaaagggattcttatcttactctgagcttttgatgttttgttttgtaacatacaaaaagaatctgccagaaaaacttacatgtatcagatttttaaaaatataaatagagaacattttgcaaatgctcaaatgagcattctatcttttggctttcagagtgatagagctcctaacaggtgtacaggcccaagagttgaaggtgattggttttctttacagactccttgttctctagaagggctttttacttgaataaaacaatgcaacttagcaaaccaatttatggccttagagaaacatttttgcatgagttcttacaaactgtttgttatattttctggaatgataagtgagaattatttagaaaagacatgctccaaaaaaaaaacaaaactgataaaacagtttttcgaaacttacttttaaaagcatacgtgctatgactctctccagtttgaatatgcaattgttttcacaggcaggatgtctgttttctgcctgtatttcccagtgatttactctagggtaaggtagtacacatttggttcagaaattaatttttatttctcctatatcttgttttatcaagattttgttgtggcatttcaatgtaaattataacaccatcatttgagtatacataattcaaaagaactacttgatgcagtatagtcttaagggttctgcatacattttagaaacatcttagccgtaagttaggtcctgtgttaaactgtttagtgctctgtttttaagaaaacaaatgttgaacctcacacttttatgtggtgacagtgtaatttaattaaaaggtgtaaatgttttcatctcttaggcttgctgtctcctaaggtcacccaagcagtggttggattttatacacattactactaaaataatactgaagttggataaggttatcctttctgtatttgcgtctttcttgtgactaaccaccctgatatagtattaaccactgtgttcaagagtaaaaacaatatatgcaattttcattgaacttaaagagtgaaaaccatgtaaactattgaaactattgtaatccattaatgcttttttagaatggcagaccttgatgtttatttctcaaatggttaagccctcttctttactcttaatttttttttgagacagagtcacccaggctggagtgcagtggtgagattttggctcactataacctcttcctccagggttcaagtgattctcccacctcagcctcccaagtagctgggactacgggcacatgccactgcacctggctaatttttatatttttggtagagacagggtttcaccatgttggccaggctggtctcaaactcctgacctcaagcgatccacccacctaggcctcccaaagtgctgggattacaggcatgaatcaccacaactagcctacccttagatttttggaaggatcgatcttatttaactatgtgtggaacaacccagtaatatcagactcgaattactatttcattctatttcaaatgcttataaagctactattgtagattatagtgttaatgcaaagtttacagacttttgatatggaaaaccagataaaacaatgttacaaaaggcaaatataaagagtatgttttctttttagtgctttggaaaaatttcacttaaactcttattactgtatagattaagccctataatgctatttatattccaggggaacgaaaatctgaatttgttttatgatttaaagcatctggtttgcatattgtattgtaatactgatacagtttggctgtgtccccaccaaattgaattgtgttaatagttcccataatccctacgtgttgtgggagggacccagtgggcagtaatttaatcatggtggtggttaccctcatgctgttcttgtgatggtgagttctcatgagatctgatgggtgtttttttttgttttgttttttgttttttgagatggagttttgctcttgttgcccagactggagtgcaatggcacacgatctcggctcaccgcaacctctgcctcctgggttcaagcgattctcctgcctcagcatctcgagtagctgggattacaggcatgcaccaccacgcccagctaattttgtatttttagtagagacggggtttctccatgttggttaggctggcctcaaactcccgacctcaggtgatccgcccgcctgggcctcccaaagtgctgggattacaggcgtgagccactgctcctggcccaagatctgatggttttgtaagggaattttccccctttgcttggcacttcttcctgctgccatgtgaagaaggatgtgtttgcttccccttccaccatgattgtaagtttcatgaggcctccccagcctgtgggactgtgagtcaattaaacgtgtttactttataaattacccagtctcaggcaattctttatagcagtgtgagaacagactaatatgaataccaatactgaaaaattgtttcttgcctcaccttgtcctatgaacaggaattaaattttaaagtattgccttaagatggctgtgctaaataataatcattgcaagagcaatacttttacctgtttctagatgacaatattactaaaatttctcaaatgaagactttgttttagcttcaattacttcagaaaatataaattttaaagatgactatgagataaatcatgaactcagtggaattttcagatgagatggggcgcgttcagggtggtatgactgtagacggaattttcagatctttgttatttagaagcaagtataggtataacgtggactatcaactgatatctgcaaataatttggttaaaatgaaatttgattgtagtatttgttgctgtaggattataaatgtcaaatatcattgtaaacatttctatatttttagaaatatcttgggtggcctgaaacagaagtgaggaaatcaattttttaaggtgagccatttggcttttttaaaaaattgagattcaacttacataccataaagttcactcttctaaagtgtacaattcattggtgttagtatatttacagagttgtacaactattaccactatataatcccagaacactttcatcactccaaaaagaaacaccatacccactaccagtcactcctcatgcccccttcctatgacccctggcagccattaatctactttctgtctccttgaatttggattttctggacacttcataaaaattgaataatacaatatatgaacttttatgtttgacttctttcacttagcataatgttttcagagtgcatcactgttgtaacatgtatcagtaccctttttgtgactgaatattattccaccgaatggatataccacattttacttatccattcaaccgttgatgtacatttgagttgattccaaattttggctattaagaatgctgctctgaacattcatgtgcaagtttttttttttttgtatgtacatatgttttcaattttcttggatatatatctaagaattagaattgctggatcatacagtaattctgcttaaccttttgaggagctgccaggctgttttccaaagtggctacaacattttgcatttccaccagcatgtgtttgagggttccattttctcctcattcttgacaacatttattactccctttttaaattttagtcatcatagtgtgggtgaagaagtgtctcactgaggttttgatttgcatttccttaatgactgatgatgtggagcctctttccatgtgtttattgactttttatatattttggagtaatatctgttcatatcctttgtccattttcaatttgtttatgttcatatcctttgtccattttcaatttgtttatctttactgttgagatgtaagagtttttttatatattttctggatactaaaccattatatattgatttgcaagtattttattccattctgtggcttgtcttttcactttcttcgtagtgtagtttgaagcacaaaagtttttaattttgataaagtccagtttgtttttttcccttcagttctttgtgcttggttttatatctttttttttttttttttttttttttgagatggagtcttgctttgtcacccaggctggagtgcagtggcgcggtctcagctcactgcaacctctgcctcccagattaaagggattctcctgcctcagcctcctgagtactgggattacaggcacccaccaccatgcctggctaaatttttgtatttttagtaaagacatggttttgccatgttggccaggctggtcctgaactcctaacctcaagtgatccaccaaccttggcccccaaaagtgctgagattacaggtgtgagccaccttgcctggccttggttttatatcttaaaagctattccttcattcaaagtcacgaaggtttacacttaatttttttctatctaaaaaaccattgcttcatctaaagtcatgaagatttacactctttttttttctaacagttttacagtttaggctcttatcattaggtctttcatttattttgaattattatcattattattattttctttttgaggcagggtctcactctgtcacgcaggcttgtgtgcattggtgcaatcacagctcactgcagcttcagccttctggcctcaagcagtcctcccacctcagcctcccaagtagctgagattacaagtgtgtgccaccatgcctgactaatttttaaaatttttttgtgaagacagtttctcactctgttgcccaagctggtcatctcaaacttccagactcaaacaatactcccactttggctgcccaaagtgctgggattacaggcatgagtcaccattcctggcattaatttttgtatatggtgtgaggtaggggtccagtttcatttttttgcatgtggatatccagttgtcccagcatcatttgttgaaaagactatttcttcattgatttttttctgccacccctgtttaaaatcagttgcccatgagtgtatgggtttgttcctggacttgaaattatgtttcattgatctatatatctatgctagtaccacatgtcttcattactgtagctttgtagtaacttttgaaattggggaagtgtgagttccccaactttagttctccttcaggattgttttggctattctgggtctcttgcattttcatgtgagtttagattctgcttatcgatttcttttttttctttttttttttttttgagatagcatcttgctttgtcacccaggctggagtgctatggctcaatctcagctcactgcaacctccgcctcctgggttcgagagattctcctgcctcagcctccagagtagttaggactacaggcgcgtgccaccatgccaggctaatttttgtatttttaatagagatgaggtttcatcatgctgaccaggctggtctcgaactcctgacatcaagtaacccggctgcctcagcctcccaaagtgctgggattacagtcgtgagccaccatactcagcctaagattcagcttaccaatttctgcaaaaaagcccactcatttttaataggaggtaaaaagcagttgacatttataacttagagtcttttaatgttagtgctgaaagggactagagagctcatctaattcaacccacttattttagtattgaatgaatgaccctgtacaaggaaagggatttgcttgagatccacacagctgtttaaaggcagagttgggattggaaccaagtcttagagaatccattgttgcttctacactgcattattgctttggttccctagtgtacattcactttgcttaggagtgatatgttcagtttatcttctctaagaatggcagctgttatttaggacagtggcatgctgagaaatagattgatttctattctatactgtgtccagtaaaggtcgggggagaaagagtaaatcttatcttcttctgtacttttctttgattaatgtaagagtctagagttttatcagaagattattgtcctttaaaatattgatggactgattatcacttaaagggtataaacagtgggtagtaattcagtgattgagaggttaattgcaggttttttttttttttttttctggtaaccatagaatgaatgtagaatgaatttggattcaataatgggaactaaggtcaggcgtggtggctcacacctgtaatcccagcactttgggaggccgaggcgggtggatcatctgaggtcaggagttccagaccagcctggccaacatggtgaaacctcatctctactaaaattacgaaaaattagtcaggtgtggtgacgggtgcctataatcccagctacttgggaggctgaggcagtagaatcgcttgaacccgggatgcggaagttgcagtgagccaagatcacgccactgtactccatcttgggcgacagagcgcaactctgtctccaaaaaaaaaaaaaaaaaagggcagggggagcggctagagaaggaacattcaaatcttcccacgtgggcaagttccaagcaaatgtttatttttttacctcctctttggtttttgtctcacttgaagcactttgtgtttatgggaaaataccaaaaattaccaaaatttaaaaacccagggctttgctggaagtgagggtatcttcttggcttttcccttttcctccccaccactatacgcacatgcacacacagctctattttttggtgcttttcgttcattattcactccatttcattttagctcttgaagtcaaaatgggattccaaagagcaaaatagaagtttggagagtttgaaatctctcctcgtggctggacgccgtggctcacacctgtgatcccagcactttgggaggccaaggcaggcatactgcttgaactcaggagttcaagaccagcctggggaacatggtaaaaccctgtctctacaaaaaatagaaaaattagctgggcatggtggctgtagtcccagctatttgggaggctgaggtgggaggatcacttgagcctggggaggttgagactgcactgagtcttgaatgaatgaatccatctctctttctctctccatatagtcaaagagaaccaaaaatgtatgtgctttttttgtgaaattgttaaggattccatgatcctactaaaatttttgataatgataatttcaagtggagaatatataaaggactcgtgaggccttcctacctcattttctgaggttatgttgactttaatatccaatgtatcataggtgttttcttttttctctgacaattgttatgttaaaaacaaaaagaagcacatactgtacagtcaaaactatcagacgtaactctgtgggaaactttattccaagggtgctgccactgcccttgttttaaatatttttggaacttcatttctcttcaggtctatttaataagcttgttaggaatattgtaaattattttagaaacacattgtggtctcagcctcatgtggcattgccacttgttactacatgacccccccacaccccctaaaaaagaaaaaggactttaaaaaccctctcaggacaaacatttgctaccgtggttgattttttaattttacattaactatttaatatcagactataactaaaatacaagtagtggaattatacttttataaagtatcaaattatgtagatgatgacgaagttataaggttactataatttccaacttcacccataggtcatggtatagttgaaatttcatatttaaatatcaaaacataaatgtctaaagagattgtgtaaattctttatcagttataaggaaaaaccaaattcaaattcttaaggtttttcttatatgtgattttttttttttttttttttttgagacaaacttgcagggagagaattatgtggcatgaggaggattgagaatgttgttcattttatctaattactgcctattaagaaaagcttcacatttatttcagctattctattgaatacttttacctaagataatgaaaccgttaagtagagatttttctaatagtataaaaatcagtgtaggcccagcacagtggttcacacctgtaatcccagcaccttgggaggctaaaggcaggaggattgcttgagctcaggagtttgagaccaacctgggcaacatagtgagaactcatctctattaaaaatcagaaaaattggccaggtgtggtggctcatgcctgtagtcccagttactcaggaggctgaggcaggaggatcccttgagattgaggcttcagtgagctaatgatcgcgccactgcactccagcctgggtgacagagtgagaccctgtctcaaaaacaacaaaaatctcagtgtgacaaattcctaacagctcaaatactacttgtcttatttgttaactattttgaaataattttaaacttacagaaaagtagaatagttcaaaagatcctgtatatccttcccctagattcttctattgttaacatcttgccatattttccataccactctctagctatgtattcacattattttttgaactgtttgttactaagttgcaattgtgatgtcccattagtactaaatacttaagtgtatactttttaaaaacaaggacactcctacataaccacagtacttaaaatcaggaaaccagcattgataaaattctaccatttgatccacgaaccccattcaaatgttgccatttactccaaaaatatccttacaataaccctttccttttttggtccacagtccaatcaggatgaagcacgcatttagttacattttccctttagtcttcctcaatctggagcggttccttggtttttccttttttgtgaccttgacatttttgaagaatgcaggccaggtactttgtagaatgatgtgcactttgggtttgtctgatatttcctcaagattagattcaggttgtgaatttttggcaggaataccagagaggtgatgctgtcttcttctctgcattgtatcaggaggcacatcatgtcaattttttccattactggtgatgttaatttttaacagttggttacgatgttttcaagatttctccactgttagtattttctccacttgtatttgttttttggtataaacttaaaaagtacagcatgatgttttggtatatgtatccatagtgaaatgattattacaggtattaattaatgaggaattacgtattttgtgggtagctattttgagactctcaatatcctatttctcaaaattttaccctttacttttagcatccattgatgatccttgtctggatcagttattgccaaatggtagttttcttttcttttcttttcttttgagacagtgtcttgctctgttgcccaggctacagtgcagtgatgagatcatagcccactgcagcctcaaactcctgggctcatgccattttcccctcagcttttggagttagctgggactacaggcatgcatcaccacacccagattatttttaaagtttttgtagaaacggggtctcttcttccccatttattcaatatttatatcagtatagaacatgggtccctgttttatcatctgtaagttatgatttattttgatgcccccattgtccaagatttgactagcgagagcactttccagctagctcctgtgtcctttggacataccccatggttcattgagcacttccttgctttctggcaccacaagatgttccaggctcgtcttctattttccctaccccgctcctgacatcagccatttctccaaagagtcctggttcatattagtggagaatggtatttaaaaccaagatccggatgctaaaggctgtgctcattgcccctgtgctagcattgccactgtgcgttctcccagtggacaaatttggaaatatatgcgtctatgcttgttacctcatccatccatatatatattaaaaacaagtacacactgatacctatttcacatctactccacagagtttattctagtcttctccctttccacaattgtatcttctccaccctatatttaaaaactggacttccagagtctccaatacattggcttatttgttcattttccctgtgattaaccaacctcctgaccacgtggctggctcctttgctccatctctgcccctcaccccctaccgtacatcactgctgtgaggaccaagtttcctccctttcctcgatccatgacagcacctgccagttgaaccccacagtgggaattttaaagaaggcacttttggctcagatggcagtgccaaagcaggcattccaattcacatggtgctctagcaattgtgaaataaacagattctgaaggtc

SEQ ID NO: 120081 - DNA, 806 bp, Homo sapiens
  Payload ID: 3551
  Gene Symbol: CPSF2
  Gene Name: cleavage and polyadenylation specific factor 2, 100kDa
  ENST ID: ENST00000555244
  CDS Start-End: 1-806
cagctcataagacgaagcatgacttgatgatgaaaggtgaaggcagtcgtaaaggaagttttttcaaacaggcaaaaaagtcctatcctatgtttcctgccccagaagaaagaattaaatgggatgaatatggagagattatcaaagcccgggttacctacatagactatgaaggacgctctgatggggattccattaaaaaaatcattaatcagatgaaaccacgacagttgatcatcgtccatggcccaccagaggccagtcaagatctggcagagtgctgtcgcgcctttggtgggaaagatattaaagtgtacatgccaaagctacatgaaacagttgatgccactagtgaaactcacatctaccaggtgaggttaaaagactcacttgtcagctctcttcagttttgtaaggcaaaagatgctgaattagcttggatagatggtgtcttagatatgagagtttccaaagtggacacaggggttattttagaagaaggagaactaaaggatgatggagaagactcagagatgcaagtggaagctccctcagattctagcgttatagcacaacaaaaggccatgaaaagtctgttcggagatgatgaaaaagaaacaggtgaagaaagtgagatcattcctactttggaacccttgccacctcatgaggttcctggacatcagtcagtttttatgaatgaaccaaggctgtcagacttcaagcaagttctcttacgggaggggattcaagctgaatttgtaggaggtgtacttgtttgcaacaatcaagtagcagtccgcaga

SEQ ID NO: 120082 - DNA, 715 bp, Homo sapiens
  Payload ID: 3551
  Gene Symbol: CPSF2
  Gene Name: cleavage and polyadenylation specific factor 2, 100kDa
  ENST ID: ENST00000553427
  CDS Start-End: 474-715
agtctccagctccaaaatggcggctgccactgtggggcttctgccggccggtagtccctggcgctgctgacccagcatcggcttttctacgtcttgaacctggattcgcctaggggttgggaagggctgtggacggcgttgggggaggcctgacgaggcaagtgagggcgggagaaaggagcgagcctcgggctggggaaggcggcgtcattggccctccgggagcacggggccccgactccgacccggtctcccccgaggactcgcccccgccgcttcggctgcgactgtcccggtcgttcccggcagaagtggtcagcgagggaaagagaagtgacttctccatgggtttcaagctcccagctgttttgcggcagcccattaataaagaactcttcagaattcctggtgtttcatcatatatacgactaagatatcaactcttctagcttgctgtttctggaccaaaaaaaatgacgtctattatcaaattaactaccctttctggggtccaagaagaatctgccctttgctatcttctccaagttgatgagtttagatttttattggactgtggctgggatgagcacttttctatggatattattgattccctgaggaagcatgttcaccagattgatgcagtgctgttgtctcaccctgatcctctccaccttggtgccctcccgtatgctgtcggaaagttgggtctgaa

SEQ ID NO: 120083 - DNA, 558 bp, Homo sapiens
  Payload ID: 3551
  Gene Symbol: CPSF2
  Gene Name: cleavage and polyadenylation specific factor 2, 100kDa
  ENST ID: ENST00000554290
  CDS Start-End: 238-426
aaaatggcggctgccactgtggggcttctgccggccggtagtccctggcgctgctgacccagcatcggcttttctacgtcttgaacctggattcgcctaggggttgggaagggctgtggacggcgttgggggaggcctgacgagattaataaagaactcttcagaattcctggtgtttcatcatatatacgactaagatatcaactcttctagcttgctgtttctggaccaaaaaaaatgacgtctattatcaaattaactaccctttctggggtccaagaagaatctgccctttgctatcttctccaagttgatgagtttagatttttattggactgtggctgggatgagcacttttctatggatattattgattccctgaggaatctcgacacaatacagaagattttacactctttacattagatgatgtggatgcagcctttgataaaatacagcagctaaaattctctcagattgtgaatttgaaaggtaaaggacatggcctgtctatcacacctctgccagctggtcatatgataggtggaacaatatgga

SEQ ID NO: 120084 - DNA, 2345 bp, Homo sapiens
  Payload ID: 3552
  Gene Symbol: CPSF3
  Gene Name: cleavage and polyadenylation specific factor 3, 73kDa
  Uniprot ID: Q9UKF6
  ENST ID: ENST00000238112
  CDS Start-End: 207-2261
accccaagtggtgggaagcctcgcgagcggcgtcccccgaccggaagtcgaggggaggagtctagtgccgcgggctccggagtgacggaagttgtgctcttggtgaatggggttcttccttttttatttaccggtggctgtgcttccaatttaggaagaccccggcgacctgttcctcacccccgcttcgccctcacactttcgggatgtctgcgattcctgctgaggagagcgaccagctgctgatccgaccccttggagctgggcaagaagtaggaagatcatgtattattctcgagttcaaaggaagaaaaataatgctcgactgtgggatccaccctggcctagaaggaatggatgctcttccttatattgatttaattgacccagctgagattgatctcctattaattagtcatttccatttggatcactgtggagctctgccctggtttctacagaagacaagtttcaaaggaagaacatttatgactcatgccacaaaagctatttatagatggcttctttctgattatgtcaaagttagtaacatatcagcagacgacatgctgtataccgagacagatttggaagaaagcatggacaaaattgaaactatcaactttcatgaagttaaggaagttgcgggaatcaagttttggtgttaccatgcaggtcacgtcctaggagccgccatgttcatgattgagatcgcaggcgtgaagcttttgtacactggtgatttctcaagacaagaagataggcacttaatggcagctgaaattcctaatattaagcctgatattcttatcattgaatctacttatgggacccatatccatgagaaacgtgaagagcgagaagcaagattctgtaacactgtccacgatattgtaaacagaggaggcaggggtctcattcctgtctttgctcttggaagggctcaggagctgctcttgattctagatgagtactggcagaatcacccagaactacatgacattccaatatactatgcatcatctttggccaagaagtgtatggcagtgtaccagacatatgtaaatgccatgaatgacaaaatccgcaaacagatcaacatcaataatccctttgttttcaaacacattagtaacctcaagagcatggatcattttgatgacattggtcccagtgttgtaatggcctccccaggcatgatgcaaagtggcttatccagagaattatttgaaagctggtgtactgataagaggaatggtgtcattatagcgggatactgtgtagaagggacacttgccaagcacatcatgtctgaacctgaagaaatcactactatgtctggacagaagttaccactgaaaatgtctgttgattacatttctttctcagctcacacggattaccagcaaaccagtgaatttattcgtgctttgaaaccgcctcatgtgattttagtccatggagaacagaatgaaatggccagattgaaagcagcactgattcgagaatatgaagataacgatgaagttcacatagaggttcataatcctcggaatacagaagcagtgaccttaaacttcagaggagaaaaactagccaaggttatgggatttttagcagacaaaaaaccagaacaaggccagcgggtctcaggaatacttgttaaaagaaactttaattatcacatactttctccttgcgacctgtccaattatactgacctggccatgagcacggtgaagcagacccaagccattccatatactggtccctttaatttgctctgttaccagctgcagaaattgacaggtgatgtggaagaattagaaattcaagaaaaacctgctctgaaagtgttcaaaaatattactgtaatacaagaaccaggcatggtggtattagaatggctggcaaacccttctaatgatatgtatgcagatacagtaacaactgtgatattggaagttcagtcaaatcccaaaataagaaaaggtgcagtacagaaggtttctaaaaaattagaaatgcacgtttacagcaagaggttggagatcatgctccaggacatatttggagaagactgtgtaagtgtaaaggatgactctattcttagcgtcacagtggacgggaaaactgccaaccttaacttggagacacggactgtagaatgtgaagagggaagtgaagacgatgaatccctccgagaaatggtggagctggctgcacagagactgtacgaggccctgacgccagttcactgagactgtgcctgtatatgaactttgaaaaaatacttgactctacttttgttacctaaaataaaatgcattcgtttctctggggga

SEQ ID NO: 120085 - DNA, 3157 bp, Homo sapiens
  Payload ID: 3552
  Gene Symbol: CPSF3
  Gene Name: cleavage and polyadenylation specific factor 3, 73kDa
  ENST ID: ENST00000460593
  CDS Start-End: 1139-3082
ggagactggcctcctccgtcgcccgcgctcccacctaccccggcagcctgcctttggtccgcgcttgcgggccaggcttctcaggctcgaggggttggaggaccgttgatcggaaggggcctgctatagagtgaacgggattttgctttttcatcagtttcaggggagggtatgttggagtcggaaaaaaaaaagttttacggggccaccgctcgctttcgtacacgctaagaagcgttttcacttagcacaagcacggatctctgcgcgtcagggcaagctgtgagggagccggtgaagcttatgaccgacaggatgagaggaggacctgaatgaggctacagccgtgcagggaagaattaagtctgtttcttaacaccagggcttcacatgtgccagaagttagaaaatattagggacttgccgtgagtttcgatcttctcagctcaggccctagtagaataaggaaggtgtaaagctggagaagagaaagtgcagaggtgttagggacaaaaactcagccctcgactgtccataaggagagtggcctttcagtggacacgatcctcatcagtcgggaatgctgctgaaggggagatgcaaatgtagagaacttgaattcctacagatgagcatttcgaacccacaacatgtttattgttagatactagttggcacaacatgaatatacgctttccaaaaggtagaaagtatctcctttacacaatcattcagtaaggcttcattgagcacctgcttgggacatagtccgtttccttctgcttagttcacacctgtcatgtcttcctgtgatgagcaaacactgagcaagtgtcaagcaccacacatggggatatagacgcaacagagggcccagttaattgctctcgctcttttggagagaattacagtgcacagtgggaaatattggagagatactttggaataataggagactattactttgaagtcagacctgaagtccattatctacttgaccaattagtaggacaacaatctcactgaacccgttttctcatatggaaataagataaaacttgaagagtgaacatcgcgtggagctgggcaagaagtaggaagatcatgtattattctcgagttcaaaggaagaaaaataatgctcgactgtgggatccaccctggcctagaaggaatggatgctcttccttatattgatttaattgacccagctgagattgatctcctattaattagtcatttccatttggatcactgtggagctctgccctggtttctacagaagacaagtttcaaaggaagaacatttatgactcatgccacaaaagctatttatagatggcttctttctgattatgtcaaagttagtaacatatcagcagacgacatgctgtataccgagacagatttggaagaaagcatggacaaaattgaaactatcaactttcatgaagttaaggaagttgcgggaatcaagttttggtgttaccatgcaggtcacgtcctaggagccgccatgttcatgattgagatcgcaggcgtgaagcttttgtacactggtgatttctcaagacaagaagataggcacttaatggcagctgaaattcctaatattaagcctgatattcttatcattgaatctacttatgggacccatatccatgagaaacgtgaagagcgagaagcaagattctgtaacactgtccacgatattgtaaacagaggaggcaggggtctcattcctgtctttgctcttggaagggctcaggagctgctcttgattctagatgagtactggcagaatcacccagaactacatgacattccaatatactatgcatcatctttggccaagaagtgtatggcagtgtaccagacatatgtaaatgccatgaatgacaaaatccgcaaacagatcaacatcaataatccctttgttttcaaacacattagtaacctcaagagcatggatcattttgatgacattggtcccagtgttgtaatggcctccccaggcatgatgcaaagtggcttatccagagaattatttgaaagctggtgtactgataagaggaatggtgtcattatagcgggatactgtgtagaagggacacttgccaagcacatcatgtctgaacctgaagaaatcactactatgtctggacagaagttaccactgaaaatgtctgttgattacatttctttctcagctcacacggattaccagcaaaccagtgaatttattcgtgctttgaaaccgcctcatgtgattttagtccatggagaacagaatgaaatggccagattgaaagcagcactgattcgagaatatgaagataacgatgaagttcacatagaggttcataatcctcggaatacagaagcagtgaccttaaacttcagaggagaaaaactagccaaggttatgggatttttagcagacaaaaaaccagaacaaggccagcgggtctcaggaatacttgttaaaagaaactttaattatcacatactttctccttgcgacctgtccaattatactgacctggccatgagcacggtgaagcagacccaagccattccatatactggtccctttaatttgctctgttaccagctgcagaaattgacaggtgatgtggaagaattagaaattcaagaaaaacctgctctgaaagtgttcaaaaatattactgtaatacaagaaccaggcatggtggtattagaatggctggcaaacccttctaatgatatgtatgcagatacagtaacaactgtgatattggaagttcagtcaaatcccaaaataagaaaaggtgcagtacagaaggtttctaaaaaattagaaatgcacgtttacagcaagaggttggagatcatgctccaggacatatttggagaagactgtgtaagtgtaaaggatgactctattcttagcgtcacagtggacgggaaaactgccaaccttaacttggagacacggactgtagaatgtgaagagggaagtgaagacgatgaatccctccgagaaatggtggagctggctgcacagagactgtacgaggccctgacgccagttcactgagactgtgcctgtatatgaactttgaaaaaatacttgactctacttttgttacctaaaataaaatgcattcgtttc

SEQ ID NO: 120086 - DNA, 871 bp, Homo sapiens
  Payload ID: 3552
  Gene Symbol: CPSF3
  Gene Name: cleavage and polyadenylation specific factor 3, 73kDa
  ENST ID: ENST00000475482
  CDS Start-End: 464-871
gacggaagttgtgctcttggtgaatggggttcttccttttttatttaccggtggctgtgcttccaatttaggaagaccccggcgacctgttcctcacccccgcttcgccctcacactttcgggatgtctgcgattcctgctgaggagagcgaccagctgctgatccgacccctgtaagggaccagcgagagagggaatgaagccacgggctgtgaggggcgcgaggggtaaccggagactggcctcctccgtcgcccgcgctcccacctaccccggcagcctgcctttggtccgcgcttgcgggccaggcttctcaggctcgaggggttggaggaccgttgatcggaaggggcctgctatagagtgaacgggattttgctttttcatcagtttcaggggaggtggagctgggcaagaagtaggaagatcatgtattattctcgagttcaaaggaagaaaaataatgctcgactgtgggatccaccctggcctagaaggaatggatgctcttccttatattgatttaattgacccagctgagattgatctcctattaattagtcatttccatttggatcactgtggagctctgccctggtttctacagaagacaagtttcaaaggaagaacatttatgactcatgccacaaaagctatttatagatggcttctttctgattatgtcaaagttagtaacatatcagcagacgacatgctgtataccgagacagatttggaagaaagcatggacaaaattgaaactatcaactttcatgaagttaaggaagttgcgggaatcaagttttggtgttaccatgcaggtcacgtcctaggagccgccatgttcatgattgagatcgcaggcgtgaag

SEQ ID NO: 120087 - DNA, 1839 bp, Homo sapiens
  Payload ID: 3553
  Gene Symbol: CPSF3L
  Gene Name: cleavage and polyadenylation specific factor 3-like
  Uniprot ID: Q5TA45
  ENST ID: ENST00000450926
  CDS Start-End: 63-1799
ttgcgcctgcgcagtgcatcaccgcaggcgggcctcgcgggtccgggagcgcggcggagacgatgcctgagatcagagtcacgcccttgggggccggccaggacgtgggccgaagctgcatcctggtctccattgcgggcaagaatgtcatgctggactgtggaatgcacatgggcttcaatgacgaccgacgcttccctgacttctcctacatcacccagaacggccgcctaacagacttcctggactgtgtgatcattagccacttccacctggaccactgcggggcactcccctacttcagcgagatggtgggctacgacgggcccatctacatgactcaccccacccaggccatctgccccatcttgctggaggactaccgcaagatcgccgtagacaagaagggcgaggccaacttcttcacctcccagatgatcaaagactgcatgaagaaggtggtggctgtccacctccaccagacggtccagattaaagtgggctcagagtctgtggtctacacgggtgattataacatgaccccagaccgacacttaggagctgcctggattgacaagtgccgccccaacctgctcatcacagagtccacgtacgccacgaccatccgtgactccaagcgctgccgggagcgagacttcctgaagaaagtccacgagaccgtggagcgtggtgggaaggtgctgatacctgtgttcgcgctgggccgcgcccaggagctctgcatcctcctggagaccttctgggagcgcatgaacctgaaggtgcccatctacttctccacggggctgaccgagaaggccaaccactactacaagctgttcatcccctggaccaaccagaagatccgcaagactttcgtgcagaggaacatgtttgagttcaagcacatcaaggccttcgaccgggcttttgctgacaacccaggaccgatggttgtgtttgccacgccaggaatgctgcacgctgggcagtccctgcagatcttccggaaatgggccggaaacgaaaagaacatggtcatcatgcccggctactgcgtgcagggcaccgtcggccacaagatcctcagcgggcagcggaagctcgagatggaggggcggcaggtgctggaggtcaagatgcaggtggagtacatgtcattcagcgcacacgcggacgccaagggcatcatgcagctggtgggccaggcagagccggagagcgtgctgctggtgcatggcgaggccaagaagatggagttcctgaagcagaagatcgagcaggagctccgggtcaactgctacatgccggccaatggcgagacggtgacgctgcccacaagccccagcatccccgtaggcatctcgctggggctgctgaagcgggagatggcgcaggggctgctccctgaggccaagaagcctcggctcctgcacggcaccctgatcatgaaggacagcaacttccggctggtgtcctcagagcaagccctcaaagagctgggtctggctgagcaccagctgcgcttcacctgccgcgtgcacctgcatgacacacgcaaggagcaggagacggcattgcgcgtctacagccacctcaagagcgtcctgaaggaccactgtgtgcagcacctcccagacggctctgtgactgtggagtccgtcctcctccaggccgccgccccttctgaggacccaggcaccaaggtgctgctggtctcctggacctaccaggacgaggagctggggagcttcctcacatctctgctgaagaagggcctcccccaggcccccagctgaggccggcaactcacccagccgccacctctgccctctccca

SEQ ID NO: 120088 - DNA, 1832 bp, Homo sapiens
  Payload ID: 3553
  Gene Symbol: CPSF3L
  Gene Name: cleavage and polyadenylation specific factor 3-like
  ENST ID: ENST00000411962
  CDS Start-End: 66-1574
tggttgcgcctgcgcagtgcatcaccgcaggcgggcctcgcgggtccgggagcgcggcggagacgatgcctgagatcagagtcacgcccttgggtgcctgccctgtgctgtcctggaacctggtccttccaccgggcagggggtcgagggcaccttccagcacagacaccaggacgggattccatgtcctcccccatggcgtagatgatgagctggagatcaaggcctactatgcaggccacgtgctgggggcagccatgttccagattaaagtgggctcagagtctgtggtctacacgggtgattataacatgaccccagaccgacacttaggagctgcctggattgacaagtgccgccccaacctgctcatcacagagtccacgtacgccacgaccatccgtgactccaagcgctgccgggagcgagacttcctgaagaaagtccacgagaccgtggagcgtggtgggaaggtgctgatacctgtgttcgcgctgggccgcgcccaggagctctgcatcctcctggagaccttctgggagcgcatgaacctgaaggtgcccatctacttctccacggggctgaccgagaaggccaaccactactacaagctgttcatcccctggaccaaccagaagatccgcaagactttcgtgcagaggaacatgtttgagttcaagcacatcaaggccttcgaccgggcttttgctgacaacccaggaccgatggttgtgtttgccacgccaggaatgctgcacgctgggcagtccctgcagatcttccggaaatgggccggaaacgaaaagaacatggtcatcatgcccggctactgcgtgcagggcaccgtcggccacaagatcctcagcgggcagcggaagctcgagatggaggggcggcaggtgctggaggtcaagatgcaggtggagtacatgtcattcagcgcacacgcggacgccaagggcatcatgcagctggtgggccaggcagagccggagagcgtgctgctggtgcatggcgaggccaagaagatggagttcctgaagcagaagatcgagcaggagctccgggtcaactgctacatgccggccaatggcgagacggtgacgctgcccacaagccccagcatccccgtaggcatctcgctggggctgctgaagcgggagatggcgcaggggctgctccctgaggccaagaagcctcggctcctgcacggcaccctgatcatgaaggacagcaacttccggctggtgtcctcagagcaagccctcaaagagctgggtctggctgagcaccagctgcgcttcacctgccgcgtgcacctgcatgacacacgcaaggagcaggagacggcattgcgcgtctacagccacctcaagagcgtcctgaaggaccactgtgtgcagcacctcccagacggctctgtgactgtggagtccgtcctcctccaggccgccgccccttctgaggacccaggcaccaaggtgctgctggtctcctggacctaccaggacgaggagctggggagcttcctcacatctctgctgaagaagggcctcccccaggcccccagctgaggccggcaactcacccagccgccacctctgccctctcccagctggacagaccctgggcctgcacttcaggactgtgggtgccctgggtgaacagaccctgcaggtcccatccctggggacagaggccttgtgtcacctgcctgcccaggcagctgtttgcagctgaagaaacaaactggtctccaggctgtcttgcctttattcctggttagggcaggtggtcctagacagcagtttccagtaaaagctgaacaaaag

SEQ ID NO: 120089 - DNA, 849 bp, Homo sapiens
  Payload ID: 3553
  Gene Symbol: CPSF3L
  Gene Name: cleavage and polyadenylation specific factor 3-like
  ENST ID: ENST00000430786
  CDS Start-End: 18-323
ggagcgcggcggagacgatgcctgagatcagagtcacgcccttgggtgcctgccctgtgctgtcctggaacctggtccttccaccgggcagggggtcgagggcaccttccagcacagacaccaggacgggattccatgtcctcccccatggcgcagcccctcggctgtggccccgtcatcctgatgtgtggtgctggctttggacacttcgagtggctggcagggggaggggccggccaggacgtgggccgaagctgcatcctggtctccattgcgggcaagaatgtcatgctggactgtggaatgcacatgggcttcaatgacgaccgacgcttccctgacttctcctacatcacccagaacggccgcctaacagacttcctggactgtgtgatcattagccacttccacctggaccactgcggggcactcccctacttcagcgagatggtgggctacgacgggcccatctacatgactcaccccacccaggccatctgccccatcttgctggaggactaccgcaagatcgccgtagacaagaagggcgaggccaacttcttcacctcccagatgatcaaagactgcatgaagaaggtggtggctgtccacctccaccagacggtccaggtagatgatgagctggagatcaaggcctactatgcaggccacgtgctgggggcagccatgttccagattaaagtgggctcagagtctgtggtctacacgggtgattataacatgaccccagaccgacacttaggagctgcctggattgacaagtgccgccccaacctgctcatcacagagtccacgtacgccacgaccatccgtgactccaagcgctgc

SEQ ID NO: 120090 - DNA, 1798 bp, Homo sapiens
  Payload ID: 3553
  Gene Symbol: CPSF3L
  Gene Name: cleavage and polyadenylation specific factor 3-like
  Uniprot ID: Q5TA45
  ENST ID: ENST00000419704
  CDS Start-End: 46-1545
atcaccgcaggcgggcctcgcgggtccgggagcgcggcggagacgatgcctgagatcagagtcacgcccttgggggccggccaggacgtgggccgaagctgcatcctggtctccattgcgggcaagaatgtcatgctggactgtggaatgcacatgggcttcaatgacgacgtagatgatgagctggagatcaaggcctactatgcaggccacgtgctgggggcagccatgttccagattaaagtgggctcagagtctgtggtctacacgggtgattataacatgaccccagaccgacacttaggagctgcctggattgacaagtgccgccccaacctgctcatcacagagtccacgtacgccacgaccatccgtgactccaagcgctgccgggagcgagacttcctgaagaaagtccacgagaccgtggagcgtggtgggaaggtgctgatacctgtgttcgcgctgggccgcgcccaggagctctgcatcctcctggagaccttctgggagcgcatgaacctgaaggtgcccatctacttctccacggggctgaccgagaaggccaaccactactacaagctgttcatcccctggaccaaccagaagatccgcaagactttcgtgcagaggaacatgtttgagttcaagcacatcaaggccttcgaccgggcttttgctgacaacccaggaccgatggttgtgtttgccacgccaggaatgctgcacgctgggcagtccctgcagatcttccggaaatgggccggaaacgaaaagaacatggtcatcatgcccggctactgcgtgcagggcaccgtcggccacaagatcctcagcgggcagcggaagctcgagatggaggggcggcaggtgctggaggtcaagatgcaggtggagtacatgtcattcagcgcacacgcggacgccaagggcatcatgcagctggtgggccaggcagagccggagagcgtgctgctggtgcatggcgaggccaagaagatggagttcctgaagcagaagatcgagcaggagctccgggtcaactgctacatgccggccaatggcgagacggtgacgctgcccacaagccccagcatccccgtaggcatctcgctggggctgctgaagcgggagatggcgcaggggctgctccctgaggccaagaagcctcggctcctgcacggcaccctgatcatgaaggacagcaacttccggctggtgtcctcagagcaagccctcaaagagctgggtctggctgagcaccagctgcgcttcacctgccgcgtgcacctgcatgacacacgcaaggagcaggagacggcattgcgcgtctacagccacctcaagagcgtcctgaaggaccactgtgtgcagcacctcccagacggctctgtgactgtggagtccgtcctcctccaggccgccgccccttctgaggacccaggcaccaaggtgctgctggtctcctggacctaccaggacgaggagctggggagcttcctcacatctctgctgaagaagggcctcccccaggcccccagctgaggccggcaactcacccagccgccacctctgccctctcccagctggacagaccctgggcctgcacttcaggactgtgggtgccctgggtgaacagaccctgcaggtcccatccctggggacagaggccttgtgtcacctgcctgcccaggcagctgtttgcagctgaagaaacaaactggtctccaggctgtcttgcctttattcctggttagggcaggtggtcctagacagcagtttccagtaaaagctgaac

SEQ ID NO: 120091 - DNA, 1056 bp, Homo sapiens
  Payload ID: 3553
  Gene Symbol: CPSF3L
  Gene Name: cleavage and polyadenylation specific factor 3-like
  ENST ID: ENST00000434694
  CDS Start-End: 23-1056
gtccgggagcgcggcggagacgatgcctgagatcagagtcacgcccttgggggccggccaggacgtgggccgaagctgcatcctggtctccattgcgggcaagaatgtcatgctggactgtggaatgcacatgggcttcaatgacgaccgacgcttccctgacttctcctacatcacccagaacggccgcctaacagacttcctggactgtgtgatcattagccacttccacctggaccactgcggggcactcccctacttcagcgagatggtgggctacgacgggcccatctacatgactcaccccacccaggccatctgccccatcttgctggaggactaccgcaagatcgccgtagacaagaagggcgaggccaacttcttcacctcccagatgatcaaagactgcatgaagaaggtggtggctgtccacctccaccagacggtccaggtcaggttcccagggccacagctggcacagtcactgcccacccccacaccaaccatgccctccgcccgttctacacagtttctggaaggctggggcctcagggtgagcccaccccacctcactcttgcgtccagcaccgtggggacaccaggaggcgtcagcgcgaggatgcgggtcccagaccagactgggcgccgacccgggagagcacgtgcagggtggggagctgcctggattgacaagtgccgccccaacctgctcatcacagagtccacgtacgccacgaccatccgtgactccaagcgctgccgggagcgagacttcctgaagaaagtccacgagaccgtggagcgtggtgggaaggtgctgatacctgtgttcgcgctgggccgcgcccaggagctctgcatcctcctggagaccttctgggagcgcatgaacctgaaggtgcccatctacttctccacggggctgaccgagaaggccaaccactactacaagctgttcatcccctggaccaaccagaagatccgcaagactttcgtgcagaggaacatgtttgagttcaagcacatcaaggccttcgaccgggcttttgctgacaa

SEQ ID NO: 120092 - DNA, 2148 bp, Homo sapiens
  Payload ID: 3553
  Gene Symbol: CPSF3L
  Gene Name: cleavage and polyadenylation specific factor 3-like
  Uniprot ID: Q5TA45
  ENST ID: ENST00000435064
  CDS Start-End: 84-1886
ccggaagttgcagcgaggtggttgcgcctgcgcagtgcatcaccgcaggcgggcctcgcgggtccgggagcgcggcggagacgatgcctgagatcagagtcacgcccttgggggccggccaggacgtgggccgaagctgcatcctggtctccattgcgggcaagaatgtcatgctggactgtggaatgcacatgggcttcaatgacgaccgacgcttccctgacttctcctacatcacccagaacggccgcctaacagacttcctggactgtgtgatcattagccacttccacctggaccactgcggggcactcccctacttcagcgagatggtgggctacgacgggcccatctacatgactcaccccacccaggccatctgccccatcttgctggaggactaccgcaagatcgccgtagacaagaagggcgaggccaacttcttcacctcccagatgatcaaagactgcatgaagaaggtggtggctgtccacctccaccagacggtccaggtagatgatgagctggagatcaaggcctactatgcaggccacgtgctgggggcagccatgttccagattaaagtgggctcagagtctgtggtctacacgggtgattataacatgaccccagaccgacacttaggagctgcctggattgacaagtgccgccccaacctgctcatcacagagtccacgtacgccacgaccatccgtgactccaagcgctgccgggagcgagacttcctgaagaaagtccacgagaccgtggagcgtggtgggaaggtgctgatacctgtgttcgcgctgggccgcgcccaggagctctgcatcctcctggagaccttctgggagcgcatgaacctgaaggtgcccatctacttctccacggggctgaccgagaaggccaaccactactacaagctgttcatcccctggaccaaccagaagatccgcaagactttcgtgcagaggaacatgtttgagttcaagcacatcaaggccttcgaccgggcttttgctgacaacccaggaccgatggttgtgtttgccacgccaggaatgctgcacgctgggcagtccctgcagatcttccggaaatgggccggaaacgaaaagaacatggtcatcatgcccggctactgcgtgcagggcaccgtcggccacaagatcctcagcgggcagcggaagctcgagatggaggggcggcaggtgctggaggtcaagatgcaggtggagtacatgtcattcagcgcacacgcggacgccaagggcatcatgcagctggtgggccaggcagagccggagagcgtgctgctggtgcatggcgaggccaagaagatggagttcctgaagcagaagatcgagcaggagctccgggtcaactgctacatgccggccaatggcgagacggtgacgctgcccacaagccccagcatccccgtaggcatctcgctggggctgctgaagcgggagatggcgcaggggctgctccctgaggccaagaagcctcggctcctgcacggcaccctgatcatgaaggacagcaacttccggctggtgtcctcagagcaagccctcaaagagctgggtctggctgagcaccagctgcgcttcacctgccgcgtgcacctgcatgacacacgcaaggagcaggagacggcattgcgcgtctacagccacctcaagagcgtcctgaaggaccactgtgtgcagcacctcccagacggctctgtgactgtggagtccgtcctcctccaggccgccgccccttctgaggacccaggcaccaaggtgctgctggtctcctggacctaccaggacgaggagctggggagcttcctcacatctctgctgaagaagggcctcccccaggcccccagctgaggccggcaactcacccagccgccacctctgccctctcccagctggacagaccctgggcctgcacttcaggactgtgggtgccctgggtgaacagaccctgcaggtcccatccctggggacagaggccttgtgtcacctgcctgcccaggcagctgtttgcagctgaagaaacaaactggtctccaggctgtcttgcctttattcctggttagggcaggtggtcctagacagcagtttccagtaaaagctgaacaaaagacta

SEQ ID NO: 120093 - DNA, 1618 bp, Homo sapiens
  Payload ID: 3553
  Gene Symbol: CPSF3L
  Gene Name: cleavage and polyadenylation specific factor 3-like
  ENST ID: ENST00000532772
  CDS Start-End: 21-161
ccgggagcgcggcggagacgatgcctgagatcagagtcacgcccttgggggccggccaggacgtgggccgaagctgcatcctggtctccattgcgggcaagaatgtcatgctggactgtggaatgcacatgggcttcaatgacgacagctgcctggattgacaagtgccgccccaacctgctcatcacagagtccacgtacgccacgaccatccgtgactccaagcgctgccgggagcgagacttcctgaagaaagtccacgagaccgtggagcgtggtgggaaggtgctgatacctgtgttcgcgctgggccgcgcccaggagctctgcatcctcctggagaccttctgggagcgcatgaacctgaaggtgcccatctacttctccacggggctgaccgagaaggccaaccactactacaagctgttcatcccctggaccaaccagaagatccgcaagactttcgtgcagaggaacatgtttgagttcaagcacatcaaggccttcgaccgggcttttgctgacaacccaggaccgatggttgtgtttgccacgccaggaatgctgcacgctgggcagtccctgcagatcttccggaaatgggccggaaacgaaaagaacatggtcatcatgcccggctactgcgtgcagggcaccgtcggccacaagatcctcagcgggcagcggaagctcgagatggaggggcggcaggtgctggaggtcaagatgcaggtggagtacatgtcattcagcgcacacgcggacgccaagggcatcatgcagctggtgggccaggcagagccggagagcgtgctgctggtgcatggcgaggccaagaagatggagttcctgaagcagaagatcgagcaggagctccgggtcaactgctacatgccggccaatggcgagacggtgacgctgcccacaagccccagcatccccgtaggcatctcgctggggctgctgaagcgggagatggcgcaggggctgctccctgaggccaagaagcctcggctcctgcacggcaccctgatcatgaaggacagcaacttccggctggtgtcctcagagcaagccctcaaagagctgggtctggctgagcaccagctgcgcttcacctgccgcgtgcacctgcatgacacacgcaaggagcaggagacggcattgcgcgtctacagccacctcaagagcgtcctgaaggaccactgtgtgcagcacctcccagacggctctgtgactgtggagtccgtcctcctccaggccgccgccccttctgaggacccaggcaccaaggtgctgctggtctcctggacctaccaggacgaggagctggggagcttcctcacatctctgctgaagaagggcctcccccaggcccccagctgaggccggcaactcacccagccgccacctctgccctctcccagctggacagaccctgggcctgcacttcaggactgtgggtgccctgggtgaacagaccctgcaggtcccatccctggggacagaggccttgtgtcacctgcctgcccaggcagctgtttgcagctgaagaaacaaactggtctccaggctgtcttgcctttattcctggttagggcaggtggtcctagacagc

SEQ ID NO: 120094 - DNA, 668 bp, Homo sapiens
  Payload ID: 3553
  Gene Symbol: CPSF3L
  Gene Name: cleavage and polyadenylation specific factor 3-like
  ENST ID: ENST00000527383
  CDS Start-End: 1-104
agctggagatcaaggcctactatgcaggccacgtgctgggggcagccatgttccagattaaagtgggctcagagtctgtggtctacacgagctgcctggattgacaagtgccgccccaacctgctcatcacagagtccacgtacgccacgaccatccgtgactccaagcgctgccgggagcgagacttcctgaagaaagtccacgagaccgtggagcgtggtgggaaggtgctgatacctgtgttcgcgctgggccgcgcccaggagctctgcatcctcctggagaccttctgggagcgcatgaacctgaaggtgcccatctacttctccacggggctgaccgagaaggccaaccactactacaagctgttcatcccctggaccaaccagaagatccgcaagactttcgtgcagaggaacatgtttgagttcaagcacatcaaggccttcgaccgggcttttgctgacaacccaggaccgatggttgtgtttgccacgccaggaatgctgcacgctgggcagtccctgcagatcttccggaaatgggccggaaacgaaaagaacatggtcatcatgcccggctactgcgtgcagggcaccgtcggccacaagatcctcagcgggcagcggaagctcgagatggaggggcggcaggtgctggaggtcaa

SEQ ID NO: 120095 - DNA, 2004 bp, Homo sapiens
  Payload ID: 3553
  Gene Symbol: CPSF3L
  Gene Name: cleavage and polyadenylation specific factor 3-like
  ENST ID: ENST00000527098
  CDS Start-End: 59-337
gcctgcgcagtgcatcaccgcaggcgggcctcgcgggtccgggagcgcggcggagacgatgcctgagatcagagtcacgcccttgggtgcctgccctgtgctgtcctggaacctggtccttccaccgggcagggggtcgagggcaccttccagcacagacaccaggacgggattccatgtcctcccccatggcgggccggccaggacgtgggccgaagctgcatcctggtctccattgcgggcaagaatgtcatgctggactgtggaatgcacatgggcttcaatgacgaccgacgcttccctgacttctcctacatcacccagaacggccgcctaacagacttcctggactgtgtgatcattagccacttccacctggaccactgcggggcactcccctacttcagcgagatggtgggctacgacgggcccatctacatgactcaccccacccaggccatctgccccatcttgctggaggactaccgcaagatcgccgtagacaagaagggcgaggccaacttcttcacctcccagatgatcaaagactgcatgaagaaggtggtggctgtccacctccaccagacggtccaggtagatgatgagctggagatcaaggcctactatgcaggccacgtgctgggggcagccatgttccagattaaagtgggctcagagtctgtggtctacacgggtgattataacatgaccccagaccgacacttaggagctgcctggattgacaagtgccgccccaacctgctcatcacagagtccacgtacgccacgaccatccgtgactccaagcgctgccgggagcgagacttcctgaagaaagtccacgagaccgtggagcgtggtgggaaggtgctgatacctgtgttcgcgctgggccgcgcccaggagctctgcatcctcctggagaccttctgggagcgcatgaacctgaaggtgcccatctacttctccacggggctgaccgagaaggccaaccactactacaagctgttcatcccctggaccaaccagaagatccgcaagactttcgtgcagaggaacatgtttgagttcaagcacatcaaggccttcgaccgggcttttgctgacaacccaggaccgatggttgtgtttgccacgccaggaatgctgcacgctgggcagtccctgcagatcttccggaaatgggccggaaacgaaaagaacatggtcatcatgcccggctactgcgtgcagggcaccgtcggccacaagatcctcagcgggcagcggaagctcgagatggaggggcggcaggtgctggaggtcaagatgcaggtggagtacatgtcattcagcgcacacgcggacgccaagggcatcatgcagctggtgggccaggcagagccggagagcgtgctgctggtgcatggcgaggccaagaagatggagttcctgaagcagaagatcgagcaggagctccgggtcaactgctacatgccggccaatggcgagacggtgacgctgcccacaagccccagcatccccgtaggcatctcgctggggctgctgaagcgggagatggcgcaggggctgctccctgaggccaagaagcctcggctcctgcacggcaccctgatcatgaaggacagcaacttccggctggtgtcctcagagcaagccctcaaagagctgggtctggctgagcaccagctgcgcttcacctgccgcgtgcacctgcatgacacacgcaaggagcaggagacggcattgcgcgtctacagccacctcaagagcgtcctgaaggaccactgtgtgcagcacctcccagacggctctgtgactgtggagtccgtcctcctccaggccgccgccccttctgaggacccaggcaccaaggtgctgctggtctcctggacctaccaggacgaggagctggggagcttcctcacatctctgctgaagaagggcctcccccaggcccccagctgaggccggcaactcacccagccgccacctctgccctct

SEQ ID NO: 120096 - DNA, 800 bp, Homo sapiens
  Payload ID: 3553
  Gene Symbol: CPSF3L
  Gene Name: cleavage and polyadenylation specific factor 3-like
  ENST ID: ENST00000530031
  CDS Start-End: 52-800
cagtgcatcaccgcaggcgggcctcgcgggtccgggagcgcggcggagacgatgcctgagatcagagtcacgcccttgggtgcctgccctgtgctgtcctggaacctggtccttccaccgggcagggggtcgagggcaccttccagcacagacaccaggacgggattccatgtcctcccccatggcgtgagcgcttcctcggagggtgccccccgccccggggccggccaggacgtgggccgaagctgcatcctggtctccattgcgggcaagaatgtcatgctggactgtggaatgcacatgggcttcaatgacgaccgacgcttccctgacttctcctacatcacccagaacggccgcctaacagacttcctggactgtgtgatcattagccacttccacctggaccactgcggggcactcccctacttcagcgagatggtgggctacgacgggcccatctacatgactcaccccacccaggccatctgccccatcttgctggaggactaccgcaagatcgccgtagacaagaagggcgaggccaacttcttcacctcccagatgatcaaagactgcatgaagaaggtggtggctgtccacctccaccagacggtccaggtagatgatgagctggagatcaaggcctactatgcaggccacgtgctgggggcagccatgttccagattaaagtgggctcagagtctgtggtctacacgggtgattataacatgaccccagaccgacacttaggagctgcctggattgacaagtgccgccccaacctgctcatcacaga

SEQ ID NO: 120097 - DNA, 1524 bp, Homo sapiens
  Payload ID: 3553
  Gene Symbol: CPSF3L
  Gene Name: cleavage and polyadenylation specific factor 3-like
  ENST ID: ENST00000528879
  CDS Start-End: 41-877
cgcaggcgggcctcgcgggtccgggagcgcggcggagacgatgcctgagatcagagtcacgcccttgggggccggccaggacgtgggccgaagctgcatcctggtctccattgcgggcaagaatgtcatgctggactgtggaatgcacatgggcttcaatgacgaccgacgcttccctgacttctcctacatcacccagaacggccgcctaacagacttcctggactgtgtgatcattagccacttccacctggaccactgcggggcactcccctacttcagcgagatggtgggctacgacgggcccatctacatgactcaccccacccaggccatctgccccatcttgctggaggactaccgcaagatcgccgtagacaagaagggcgaggccaacttcttcacctcccagatgatcaaagactgcatgaagaaggtggtggctgtccacctccaccagacggtccaggtagatgatgagctggagatcaaggcctactatgcaggccacgtgctgggggcagccatgttccagattaaagtgggctcagagtctgtggtctacacgggtgattataacatgaccccagaccgacacttaggagctgcctggattgacaagtgccgccccaacctgctcatcacagagtccacgtacgccacgaccatccgtgactccaagcgctgccgggagcgagacttcctgaagaaagtccacgagaccgtggagcgtggtgggaagggagcgcatgaacctgaaggtgcccatctacttctccacggggctgaccgagaaggccaaccactactacaagctgttcatcccctggaccaaccagaagatccgcaagactttcgtgcagaggaacatgtttgagttcaagcacatcaaggccttcgaccgggcttttgctgacaacccaggaccgatggttgtgtttgccacgccaggaatgctgcacgctgggcagtccctgcagatcttccggaaatgggccggaaacgaaaagaacatggtcatcatgcccggctactgcgtgcagggcaccgtcggccacaagatcctcagcgggcagcggaagctcgagatggaggggcggcaggtgctggaggtcaagatgcaggtggagtacatgtcattcagcgcacacgcggacgccaagggcatcatgcagctggtgggccaggcagagccggagagcgtgctgctggtgcatggcgaggccaagaagatggagttcctgaagcagaagatcgagcaggagctccgggtcaactgctacatgccggccaatggcgagacggtgacgctgcccacaagccccagcatccccgtaggcatctcgctggggctgctgaagcgggagatggcgcaggggctgctccctgaggccaagaagcctcggctcctgcacggcaccctgatcatgaaggacagcaacttccggctggtgtcctcagagcaagccctcaaagagctgggtctggctgagcaccagctgcgcttcacctgccgcgtgcacc

SEQ ID NO: 120098 - DNA, 816 bp, Homo sapiens
  Payload ID: 3553
  Gene Symbol: CPSF3L
  Gene Name: cleavage and polyadenylation specific factor 3-like
  ENST ID: ENST00000531377
  CDS Start-End: 1-165
aaagactgcatgaagaaggtggtggctgtccacctccaccagacggtccaggtagatgatgagctggagatcaaggcctactatgcaggccacgtgctgggggcagccatgttccagattaaagtgggctcagagtctgtggtctacacgagctgcctggattgacaagtgccgccccaacctgctcatcacagagtccacgtacgccacgaccatccgtgactccaagcgctgccgggagcgagacttcctgaagaaagtccacgagaccgtggagcgtggtgggaagggagcgcatgaacctgaaggtgcccatctacttctccacggggctgaccgagaaggccaaccactactacaagctgttcatcccctggaccaaccagaagatccgcaagactttcgtgcagaggaacatgtttgagttcaagcacatcaaggccttcgaccgggcttttgctgacaacccaggaccgatggttgtgtttgccacgccaggaatgctgcacgctgggcagtccctgcagatcttccggaaatgggccggaaacgaaaagaacatggtcatcatgcccggctactgcgtgcagggcaccgtcggccacaagatcctcagcgggcagcggaagctcgagatggaggggcggcaggtgctggaggtcaagatgcaggtggagtacatgtcattcagcgcacacgcggacgccaagggcatcatgcagctggtgggccaggcagagccggagagcgtgctgctggtgcatggcgaggccaagaagatggagttcctgaagcagaagatcgagcaggagctcc

SEQ ID NO: 120099 - DNA, 549 bp, Homo sapiens
  Payload ID: 3553
  Gene Symbol: CPSF3L
  Gene Name: cleavage and polyadenylation specific factor 3-like
  ENST ID: ENST00000531019
  CDS Start-End: 53-223
gcagtgcatcaccgcaggcgggcctcgcgggtccgggagcgcggcggagacgatgcctgagatcagagtcacgcccttgggggccggccaggacgtgggccgaagctgcatcctggtctccattgcgggcaagaatgtcatgctggactgtggaatgcacatgggcttcaatgacgacccaggggtcctggtgccacctgcgggatgggagtgcccagcctgagtctgcacatagaaccccccttcctgggggcccctccctggggcatgggtggccccagatgctgcctggagaccactgtgcaacctgaaacccccacatccttcctagcgacgcttccctgacttctcctacatcacccagaacggccgcctaacagacttcctggactgtgtgatcattagccacttccacctggaccactgcggggcactcccctacttcagcgagatggtgggctacgacgggcccatctacatgactcaccccacccaggccatctgccccatcttgctggaggactaccgcaagatcgccgtagacaagaa

SEQ ID NO: 120100 - DNA, 2571 bp, Homo sapiens
  Payload ID: 3553
  Gene Symbol: CPSF3L
  Gene Name: cleavage and polyadenylation specific factor 3-like
  ENST ID: ENST00000458452
  CDS Start-End: 43-231
accgcaggcgggcctcgcgggtccgggagcgcggcggagacgatgcctgagatcagagtcacgcccttgggtgcctgccctgtgctgtcctggaacctggtccttccaccgggcagggggtcgagggcaccttccagcacagacaccaggacgggattccatgtcctcccccatggcgtgagcgcttcctcggagggtgccccccgccccggtgtggacactgtgctgtgaacacccctggcctgtgcacaccccatggcattttgcagctgtttgcatgggccccactgccctcccctgctctctgggtcctccgtggggtcctcccagcctgcccctttcccatttggcctcttggctgcctgttctgcccactctctggacatctgatctttctgatctttcatgtggcttcaattacccgcaatctgtacctgggtatattctcaaggtcacctcagccaaggcagcccctcggctgtggccccgtcatcctgatgtgtggtgctggctttggacacttcgagtggctggcagggggaggggccggccaggacgtgggccgaagctgcatcctggtctccattgcgggcaagaatgtcatgctggactgtggaatgcacatgggcttcaatgacgaccgacgcttccctgacttctcctacatcacccagaacggccgcctaacagacttcctggactgtgtgatcattagccacttccacctggaccactgcggggcactcccctacttcagcgagatggtgggctacgacgggcccatctacatgactcaccccacccaggccatctgccccatcttgctggaggactaccgcaagatcgccgtagacaagaagggcgaggccaacttcttcacctcccagatgatcaaagactgcatgaagaaggtggtggctgtccacctccaccagacggtccaggtagatgatgagctggagatcaaggcctactatgcaggccacgtgctgggggcagccatgttccagattaaagtgggctcagagtctgtggtctacacgggtgattataacatgaccccagaccgacacttaggagctgcctggattgacaagtgccgccccaacctgctcatcacagagtccacgtacgccacgaccatccgtgactccaagcgctgccgggagcgagacttcctgaagaaagtccacgagaccgtggagcgtggtgggaaggtgctgatacctgtgttcgcgctgggccgcgcccaggagctctgcatcctcctggagaccttctgggagcgcatgaacctgaaggtgcccatctacttctccacggggctgaccgagaaggccaaccactactacaagctgttcatcccctggaccaaccagaagatccgcaagactttcgtgcagaggaacatgtttgagttcaagcacatcaaggccttcgaccgggcttttgctgacaacccaggaccgatggttgtgtttgccacgccaggaatgctgcacgctgggcagtccctgcagatcttccggaaatgggccggaaacgaaaagaacatggtcatcatgcccggctactgcgtgcagggcaccgtcggccacaagatcctcagcgggcagcggaagctcgagatggaggggcggcaggtgctggaggtcaagatgcaggtggagtacatgtcattcagcgcacacgcggacgccaagggcatcatgcagctggtgggccaggcagagccggagagcgtgctgctggtgcatggcgaggccaagaagatggagttcctgaagcagaagatcgagcaggagctccgggtcaactgctacatgccggccaatggcgagacggtgacgctgcccacaagccccagcatccccgtaggcatctcgctggggctgctgaagcgggagatggcgcaggggctgctccctgaggccaagaagcctcggctcctgcacggcaccctgatcatgaaggacagcaacttccggctggtgtcctcagagcaagccctcaaagagctgggtctggctgagcaccagctgcgcttcacctgccgcgtgcacctgcatgacacacgcaaggagcaggagacggcattgcgcgtctacagccacctcaagagcgtcctgaaggaccactgtgtgcagcacctcccagacggctctgtgactgtggagtccgtcctcctccaggccgccgccccttctgaggacccaggcaccaaggtgctgctggtctcctggacctaccaggacgaggagctggggagcttcctcacatctctgctgaagaagggcctcccccaggcccccagctgaggccggcaactcacccagccgccacctctgccctctcccagctggacagaccctgggcctgcacttcaggactgtgggtgccctgggtgaacagaccctgcaggtcccatccctggggacagaggccttgtgtcacctgcctgcccaggcagctgtttgcagctgaagaaacaaactggtctccaggctgtcttgcctttattcctggttagggcaggtggtcctagacagcagtttccagtaaaagctgaac

SEQ ID NO: 120101 - DNA, 584 bp, Homo sapiens
  Payload ID: 3553
  Gene Symbol: CPSF3L
  Gene Name: cleavage and polyadenylation specific factor 3-like
  ENST ID: ENST00000470679
  CDS Start-End: 1-166
tgagatcagagtcacgcccttgggggccggccaggacgtgggccgaagctgcatcctggtctccattgcgggcaagaatgtcatgctggactgtggaatgcacatgggcttcaatgacgacccaggggtcctggtgccacctgcgggatgggagtgcccagcctgagtctgcacatagaaccccccttcctgggggcccctccctggggcatgggtggccccagatgctgcctggagaccactgtgcaacctgaaacccccacatccttcctagcgacgcttccctgacttctcctacatcacccagaacggccgcctaacagacttcctggactgtgtgatcattagactttgagactgaaagttccagggagacagttttgtgtttgctcattactgactcttcggtactcgggatgaggcctggcgcacagcaggcgaatgaaggggccagtgacccacaagcccagagcgggggtgaaggctggggcagggtgggcccaggctgacctgtgctgcgtccccctagccacttccacctggaccactgcggggcactcccctacttcagcgagatggtgggc

SEQ ID NO: 120102 - DNA, 579 bp, Homo sapiens
  Payload ID: 3553
  Gene Symbol: CPSF3L
  Gene Name: cleavage and polyadenylation specific factor 3-like
  ENST ID: ENST00000526332
  CDS Start-End: 253-579
gcagtgcatcaccgcaggcgggcctcgcgggtccgggagcgcggcggagacgatgcctgagatcagagtcacgcccttggccacttccacctggaccactgcggggcactcccctacttcagcgagatggtgggctacgacgggcccatctacatgactcaccccacccaggccatctgccccatcttgctggaggactaccgcaagatcgccgtagacaagaagggcgaggccaacttcttcacctcccagatgatcaaagactgcatgaagaaggtggtggctgtccacctccaccagacggtccaggtagatgatgagctggagatcaaggcctactatgcaggccacgtgctgggggcagccatgttccagattaaagtgggctcagagtctgtggtctacacgggtgattataacatgaccccagaccgacacttaggagctgcctggattgacaagtgccgccccaacctgctcatcacagagtccacgtacgccacgaccatccgtgactccaagcgctgccgggagcgagacttcctgaagaaagtccacgagaccgtggagcgtggtggg

SEQ ID NO: 120103 - DNA, 659 bp, Homo sapiens
  Payload ID: 3553
  Gene Symbol: CPSF3L
  Gene Name: cleavage and polyadenylation specific factor 3-like
  ENST ID: ENST00000526797
  CDS Start-End: 51-296
agtgcatcaccgcaggcgggcctcgcgggtccgggagcgcggcggagacgatgcctgagatcagagtcacgcccttgggggccggccaggacgtgggccgaagctgcatcctggtctccattgcgggcaagaatgtcatgctggactgtggaatgcacatgggcttcaatgacgaccgacgcttccctgacttctcctacatcacccagaacggccgcctaacagacttcctggactgtgtgatcattaggccatctgccccatcttgctggaggactaccgcaagatcgccgtagacaagaagggcgaggccaacttcttcacctcccagatgatcaaagactgcatgaagaaggtggtggctgtccacctccaccagacggtccaggtagatgatgagctggagatcaaggcctactatgcaggccacgtgctgggggcagccatgttccagattaaagtgggctcagagtctgtggtctacacgggtgattataacatgaccccagaccgacacttaggagctgcctggattgacaagtgccgccccaacctgctcatcacagagtccacgtacgccacgaccatccgtgactccaagcgctgccgggagcgagacttcctgaagaaagtccacgagaccgtggagcgtggtggga

SEQ ID NO: 120104 - DNA, 485 bp, Homo sapiens
  Payload ID: 3553
  Gene Symbol: CPSF3L
  Gene Name: cleavage and polyadenylation specific factor 3-like
  ENST ID: ENST00000534345
  CDS Start-End: 64-485
gttgcgcctgcgcagtgcatcaccgcaggcgggcctcgcgggtccgggagcgcggcggagacgatgcctgagatcagagtcacgcccttggtaggggccggccaggacgtgggccgaagctgcatcctggtctccattgcgggcaagaatgtcatgctggactgtggaatgcacatgggcttcaatgacgaccgacgcttccctgacttctcctacatcacccagaacggccgcctaacagacttcctggactgtgtgatcattagccacttccacctggaccactgcggggcactcccctacttcagcgagatggtgggctacgacgggcccatctacatgactcaccccacccaggccatctgccccatcttgctggaggactaccgcaagatcgccgtagacaagaagggcgaggccaacttcttcacctcccagatgatcaaagactgcatgaagaaggtggtggctgtccacctccacca

SEQ ID NO: 120105 - DNA, 579 bp, Homo sapiens
  Payload ID: 3553
  Gene Symbol: CPSF3L
  Gene Name: cleavage and polyadenylation specific factor 3-like
  ENST ID: ENST00000525285
  CDS Start-End: 1-194
agacgatgcctgagatcagagtcacgcccttgggtgcctgccctgtgctgtcctggaacctggtccttccaccgggcagggggtcgagggcaccttccagcacagacaccaggacgggattccatgtcctcccccatggcgtgagcgcttcctcggagggtgccccccgccccggtgtggacactgtgctgtgaacacccctggcctgtgcacaccccatggcattttgcagctgtttgcatgggccccactgccctcccctgctctctgggtcctccgtggggtcctcccagcctgcccctttcccatttggcctcttggctgcctgttctgcccactctctggacatctgatctttctgatctttcatgtggcttcaattacccgcaatctgtacctgggtatattctcaaggtcacctcagccaaggggccggccaggacgtgggccgaagctgcatcctggtctccattgcgggcaagaatgtcatgctggactgtggaatgcacatgggcttcaatgacgaccgacgcttccctgacttctcctacatcacccagaacggccgcctaacagact

SEQ ID NO: 120106 - DNA, 750 bp, Homo sapiens
  Payload ID: 3553
  Gene Symbol: CPSF3L
  Gene Name: cleavage and polyadenylation specific factor 3-like
  ENST ID: ENST00000527719
  CDS Start-End: 123-750
gttgcgcctgcgcagtgcatcaccgcaggcgggcctcgcgggtccgggagcgcggcggagacgatgcctgagatcagagtcacgcccttgggcagcccctcggctgtggccccgtcatcctgatgtgtggtgctggctttggacacttcgagtggctggcagggggaggggccggccaggacgtgggccgaagctgcatcctggtctccattgcgggcaagaatgtcatgctggactgtggaatgcacatgggcttcaatgacgaccgacgcttccctgacttctcctacatcacccagaacggccgcctaacagacttcctggactgtgtgatcattagccacttccacctggaccactgcggggcactcccctacttcagcgagatggtgggctacgacgggcccatctacatgactcaccccacccaggccatctgccccatcttgctggaggactaccgcaagatcgccgtagacaagaagggcgaggccaacttcttcacctcccagatgatcaaagactgcatgaagaaggtggtggctgtccacctccaccagacggtccaggtagatgatgagctggagatcaaggcctactatgcaggccacgtgctgggggcagccatgttccagattaaagtgggctcagagtctgtggtctacacgggtgattataacatgaccccagaccgacacttaggagctgcctggattgacaagtgccgccccaacctgctcatcacagagt

SEQ ID NO: 120107 - DNA, 554 bp, Homo sapiens
  Payload ID: 3553
  Gene Symbol: CPSF3L
  Gene Name: cleavage and polyadenylation specific factor 3-like
  ENST ID: ENST00000498476
  CDS Start-End: 53-554
gcagtgcatcaccgcaggcgggcctcgcgggtccgggagcgcggcggagacgatgcctgagatcagagtcacgcccttgggtgcctgccctgtgctgtcctggaacctggtccttccaccgggcagggggtcgagggcaccttccagcacagacaccaggacgggattccatgtcctcccccatggccccctcggctgtggccccgtcatcctgatgtgtggtgctggctttggacacttcgagtggctggcagggggaggggccggccaggacgtgggccgaagctgcatcctggtctccattgcgggcaagaatgtcatgctggactgtggaatgcacatgggcttcaatgacgaccgacgcttccctgacttctcctacatcacccagaacggccgcctaacagacttcctggactgtgtgatcattagccacttccacctggaccactgcggggcactcccctacttcagcgagatggtgggctacgacgggcccatctacatgactcaccccacccaggccatctgccccatcttgctggaggactacc

SEQ ID NO: 120108 - DNA, 2263 bp, Homo sapiens
  Payload ID: 3553
  Gene Symbol: CPSF3L
  Gene Name: cleavage and polyadenylation specific factor 3-like
  Uniprot ID: Q5TA45
  ENST ID: ENST00000545578
  CDS Start-End: 274-1989
aagttgcagcgaggtggttgcgcctgcgcagtgcatcaccgcaggcgggcctcgcgggtccgggagcgcggcggagacgatgcctgagatcagagtcacgcccttgggtgcctgccctgtgctgtcctggaacctggtccttccaccgggcagggggtcgagggcaccttccagcacagacaccaggacgggattccatgtcctcccccatggcgggccggccaggacgtgggccgaagctgcatcctggtctccattgcgggcaagaatgtcatgctggactgtggaatgcacatgggcttcaatgacgaccgacgcttccctgacttctcctacatcacccagaacggccgcctaacagacttcctggactgtgtgatcattagccacttccacctggaccactgcggggcactcccctacttcagcgagatggtgggctacgacgggcccatctacatgactcaccccacccaggccatctgccccatcttgctggaggactaccgcaagatcgccgtagacaagaagggcgaggccaacttcttcacctcccagatgatcaaagactgcatgaagaaggtggtggctgtccacctccaccagacggtccaggtagatgatgagctggagatcaaggcctactatgcaggccacgtgctgggggcagccatgttccagattaaagtgggctcagagtctgtggtctacacgggtgattataacatgaccccagaccgacacttaggagctgcctggattgacaagtgccgccccaacctgctcatcacagagtccacgtacgccacgaccatccgtgactccaagcgctgccgggagcgagacttcctgaagaaagtccacgagaccgtggagcgtggtgggaaggtgctgatacctgtgttcgcgctgggccgcgcccaggagctctgcatcctcctggagaccttctgggagcgcatgaacctgaaggtgcccatctacttctccacggggctgaccgagaaggccaaccactactacaagctgttcatcccctggaccaaccagaagatccgcaagactttcgtgcagaggaacatgtttgagttcaagcacatcaaggccttcgaccgggcttttgctgacaacccaggaccgatggttgtgtttgccacgccaggaatgctgcacgctgggcagtccctgcagatcttccggaaatgggccggaaacgaaaagaacatggtcatcatgcccggctactgcgtgcagggcaccgtcggccacaagatcctcagcgggcagcggaagctcgagatggaggggcggcaggtgctggaggtcaagatgcaggtggagtacatgtcattcagcgcacacgcggacgccaagggcatcatgcagctggtgggccaggcagagccggagagcgtgctgctggtgcatggcgaggccaagaagatggagttcctgaagcagaagatcgagcaggagctccgggtcaactgctacatgccggccaatggcgagacggtgacgctgcccacaagccccagcatccccgtaggcatctcgctggggctgctgaagcgggagatggcgcaggggctgctccctgaggccaagaagcctcggctcctgcacggcaccctgatcatgaaggacagcaacttccggctggtgtcctcagagcaagccctcaaagagctgggtctggctgagcaccagctgcgcttcacctgccgcgtgcacctgcatgacacacgcaaggagcaggagacggcattgcgcgtctacagccacctcaagagcgtcctgaaggaccactgtgtgcagcacctcccagacggctctgtgactgtggagtccgtcctcctccaggccgccgccccttctgaggacccaggcaccaaggtgctgctggtctcctggacctaccaggacgaggagctggggagcttcctcacatctctgctgaagaagggcctcccccaggcccccagctgaggccggcaactcacccagccgccacctctgccctctcccagctggacagaccctgggcctgcacttcaggactgtgggtgccctgggtgaacagaccctgcaggtcccatccctggggacagaggccttgtgtcacctgcctgcccaggcagctgtttgcagctgaagaaacaaactggtctccaggctgtcttgcctttattcctggttagggcaggtggtcctagacagcagtttccagtaaaagctgaacaaaagactacttggtactctc

SEQ ID NO: 120109 - DNA, 2629 bp, Homo sapiens
  Payload ID: 3553
  Gene Symbol: CPSF3L
  Gene Name: cleavage and polyadenylation specific factor 3-like
  Uniprot ID: Q5TA45
  ENST ID: ENST00000540437
  CDS Start-End: 535-2355
aagttgcagcgaggtggttgcgcctgcgcagtgcatcaccgcaggcgggcctcgcgggtccgggagcgcggcggagacgatgcctgagatcagagtcacgcccttgggtgcctgccctgtgctgtcctggaacctggtccttccaccgggcagggggtcgagggcaccttccagcacagacaccaggacgggattccatgtcctcccccatggcgtgagcgcttcctcggagggtgccccccgccccggtgtggacactgtgctgtgaacacccctggcctgtgcacaccccatggcattttgcagctgtttgcatgggccccactgccctcccctgctctctgggtcctccgtggggtcctcccagcctgcccctttcccatttggcctcttggctgcctgttctgcccactctctggacatctgatctttctgatctttcatgtggcttcaattacccgcaatctgtacctgggtatattctcaaggtcacctcagccaaggcagcccctcggctgtggccccgtcatcctgatgtgtggtgctggctttggacacttcgagtggctggcagggggaggggccggccaggacgtgggccgaagctgcatcctggtctccattgcgggcaagaatgtcatgctggactgtggaatgcacatgggcttcaatgacgaccgacgcttccctgacttctcctacatcacccagaacggccgcctaacagacttcctggactgtgtgatcattagccacttccacctggaccactgcggggcactcccctacttcagcgagatggtgggctacgacgggcccatctacatgactcaccccacccaggccatctgccccatcttgctggaggactaccgcaagatcgccgtagacaagaagggcgaggccaacttcttcacctcccagatgatcaaagactgcatgaagaaggtggtggctgtccacctccaccagacggtccaggtagatgatgagctggagatcaaggcctactatgcaggccacgtgctgggggcagccatgttccagattaaagtgggctcagagtctgtggtctacacgggtgattataacatgaccccagaccgacacttaggagctgcctggattgacaagtgccgccccaacctgctcatcacagagtccacgtacgccacgaccatccgtgactccaagcgctgccgggagcgagacttcctgaagaaagtccacgagaccgtggagcgtggtgggaaggtgctgatacctgtgttcgcgctgggccgcgcccaggagctctgcatcctcctggagaccttctgggagcgcatgaacctgaaggtgcccatctacttctccacggggctgaccgagaaggccaaccactactacaagctgttcatcccctggaccaaccagaagatccgcaagactttcgtgcagaggaacatgtttgagttcaagcacatcaaggccttcgaccgggcttttgctgacaacccaggaccgatggttgtgtttgccacgccaggaatgctgcacgctgggcagtccctgcagatcttccggaaatgggccggaaacgaaaagaacatggtcatcatgcccggctactgcgtgcagggcaccgtcggccacaagatcctcagcgggcagcggaagctcgagatggaggggcggcaggtgctggaggtcaagatgcaggtggagtacatgtcattcagcgcacacgcggacgccaagggcatcatgcagctggtgggccaggcagagccggagagcgtgctgctggtgcatggcgaggccaagaagatggagttcctgaagcagaagatcgagcaggagctccgggtcaactgctacatgccggccaatggcgagacggtgacgctgcccacaagccccagcatccccgtaggcatctcgctggggctgctgaagcgggagatggcgcaggggctgctccctgaggccaagaagcctcggctcctgcacggcaccctgatcatgaaggacagcaacttccggctggtgtcctcagagcaagccctcaaagagctgggtctggctgagcaccagctgcgcttcacctgccgcgtgcacctgcatgacacacgcaaggagcaggagacggcattgcgcgtctacagccacctcaagagcgtcctgaaggaccactgtgtgcagcacctcccagacggctctgtgactgtggagtccgtcctcctccaggccgccgccccttctgaggacccaggcaccaaggtgctgctggtctcctggacctaccaggacgaggagctggggagcttcctcacatctctgctgaagaagggcctcccccaggcccccagctgaggccggcaactcacccagccgccacctctgccctctcccagctggacagaccctgggcctgcacttcaggactgtgggtgccctgggtgaacagaccctgcaggtcccatccctggggacagaggccttgtgtcacctgcctgcccaggcagctgtttgcagctgaagaaacaaactggtctccaggctgtcttgcctttattcctggttagggcaggtggtcctagacagcagtttccagtaaaagctgaacaaaagactacttggtactctc

SEQ ID NO: 120110 - DNA, 1868 bp, Homo sapiens
  Payload ID: 3553
  Gene Symbol: CPSF3L
  Gene Name: cleavage and polyadenylation specific factor 3-like
  ENST ID: ENST00000421495
  CDS Start-End: 587-1615
ctcgcgggtccgggagcgcggcggagacgatgcctgagatcagagtcacgcccttgggtagatgatgagctggagatcaaggcctactatgcaggccacgtgctgggggcagccatgttccagattaaagtgggctcagagtctgtggtctacacgggtgattataacatgaccccagaccgacacttaggagctgcctggattgacaagtgccgccccaacctgctcatcacagagtccacgtacgccacgaccatccgtgactccaagcgctgccgggagcgagacttcctgaagaaagtccacgagaccgtggagcgtggtgggaaggtgctgatacctgtgttcgcgctgggccgcgcccaggagctctgcatcctcctggagaccttctggggttcctggttctccgctgagcccggctgctgcagggcttaatgggacaagtggtcgcgactggactcaacctggcccgtgcgtgggctgtgcagacacgggtgttgggggtgacccggccgagtcctgccctgcagcattctcccctgtggccactgtgctgactgggccggtggtccccagggagcgcatgaacctgaaggtgcccatctacttctccacggggctgaccgagaaggccaaccactactacaagctgttcatcccctggaccaaccagaagatccgcaagactttcgtgcagaggaacatgtttgagttcaagcacatcaaggccttcgaccgggcttttgctgacaacccaggaccgatggttgtgtttgccacgccaggaatgctgcacgctgggcagtccctgcagatcttccggaaatgggccggaaacgaaaagaacatggtcatcatgcccggctactgcgtgcagggcaccgtcggccacaagatcctcagcgggcagcggaagctcgagatggaggggcggcaggtgctggaggtcaagatgcaggtggagtacatgtcattcagcgcacacgcggacgccaagggcatcatgcagctggtgggccaggcagagccggagagcgtgctgctggtgcatggcgaggccaagaagatggagttcctgaagcagaagatcgagcaggagctccgggtcaactgctacatgccggccaatggcgagacggtgacgctgcccacaagccccagcatccccgtaggcatctcgctggggctgctgaagcgggagatggcgcaggggctgctccctgaggccaagaagcctcggctcctgcacggcaccctgatcatgaaggacagcaacttccggctggtgtcctcagagcaagccctcaaagagctgggtctggctgagcaccagctgcgcttcacctgccgcgtgcacctgcatgacacacgcaaggagcaggagacggcattgcgcgtctacagccacctcaagagcgtcctgaaggaccactgtgtgcagcacctcccagacggctctgtgactgtggagtccgtcctcctccaggccgccgccccttctgaggacccaggcaccaaggtgctgctggtctcctggacctaccaggacgaggagctggggagcttcctcacatctctgctgaagaagggcctcccccaggcccccagctgaggccggcaactcacccagccgccacctctgccctctcccagctggacagaccctgggcctgcacttcaggactgtgggtgccctgggtgaacagaccctgcaggtcccatccctggggacagaggccttgtgtcacctgcctgcccaggcagctgtttgcagctgaagaaacaaactggtctccaggctgtcttgcctttattcctggttagggcaggtggtcctagacagcagtttccagtaaaagctgaac

SEQ ID NO: 120111 - DNA, 1523 bp, Homo sapiens
  Payload ID: 3553
  Gene Symbol: CPSF3L
  Gene Name: cleavage and polyadenylation specific factor 3-like
  ENST ID: ENST00000618806
  CDS Start-End: 80-1249
aagttgcagcgaggtggttgcgcctgcgcagtgcatcaccgcaggcgggcctcgcgggtccgggagcgcggcggagacgatgcctgagatcagagtcacgcccttgggggccggccaggacgtgggccgaagctgcatcctggtctccattgcgggcaagaatgtcatgctggactgtggaatgcacatgggcttcaatgacgaccgacgcttccctgacttctcctacatcacccagaacggccgcctaacagacttcctggactgtgtgatcattagccacttccacctggaccactgcggggcactcccctacttcagcgagatggtgggctacgacgggcccatctacatgactcaccccacccaggccatctgccccatcttgctggaggactaccgcaagatcgccgtagacaagaagggcgaggccaacttcttcacctcccagatgatcaaagactgcatcctcctggagaccttctgggagcgcatgaacctgaaggtgcccatctacttctccacggggctgaccgagaaggccaaccactactacaagctgttcatcccctggaccaaccagaagatccgcaagactttcgtgcagaggaacatgtttgagttcaagcacatcaaggccttcgaccgggcttttgctgacaacccaggaccgatggttgtgtttgccacgccaggaatgctgcacgctgggcagtccctgcagatcttccggaaatgggccggaaacgaaaagaacatggtcatcatgcccggctactgcgtgcagggcaccgtcggccacaagatcctcagcgggcagcggaagctcgagatggaggggcggcaggtgctggaggtcaagatgcaggtggagtacatgtcattcagcgcacacgcggacgccaagggcatcatgcagctggtgtcctcagagcaagccctcaaagagctgggtctggctgagcaccagctgcgcttcacctgccgcgtgcacctgcatgacacacgcaaggagcaggagacggcattgcgcgtctacagccacctcaagagcgtcctgaaggaccactgtgtgcagcacctcccagacggctctgtgactgtggagtccgtcctcctccaggccgccgccccttctgaggacccaggcaccaaggtgctgctggtctcctggacctaccaggacgaggagctggggagcttcctcacatctctgctgaagaagggcctcccccaggcccccagctgaggccggcaactcacccagccgccacctctgccctctcccagctggacagaccctgggcctgcacttcaggactgtgggtgccctgggtgaacagaccctgcaggtcccatccctggggacagaggccttgtgtcacctgcctgcccaggcagctgtttgcagctgaagaaacaaactggtctccaggctgtcttgcctttattcctggttagggcaggtggtcctagacagcagtttccagtaaaagctgaacaaaagactacttggtactctc

SEQ ID NO: 120112 - DNA, 1104 bp, Homo sapiens
  Payload ID: 3553
  Gene Symbol: CPSF3L
  Gene Name: cleavage and polyadenylation specific factor 3-like
  ENST ID: ENST00000429572
  CDS Start-End: 59-928
gcctgcgcagtgcatcaccgcaggcgggcctcgcgggtccgggagcgcggcggagacgatgcctgagatcagagtcacgcccttgggggccggccaggacgtgggccgaagctgcatcctggtctccattgcgggcaagaatgtcatgctggactgtggaatgcacatgggcttcaatgacgaccgacgcttccctgacttctcctacatcacccagaacggccgcctaacagacttcctggactgtgtgatcattagccacttccacctggaccactgcggggcactcccctacttcagcgagatggtgggctacgacgggcccatctacatgactcaccccacccaggccatctgccccatcttgctggaggactaccgcaagatcgccgtagacaagaagggcgaggccaacttcttcacctcccagatgatcaaagactgcatgaagaaggtggtggctgtccacctccaccagacggtccaggtcaggttcccagggccacagctggcacagtcactgcccacccccacaccaaccatgccctccgcccgttctacacagtttctggaaggctggggcctcagggtgagcccaccccacctcactcttgcgtccagcaccgtggggacaccaggaggcgtcagcgcgaggatgcgggtcccagaccagactgggcgccgacccgggagagcacgtgcagggtgggggtatgcaccggcttatgaacccaccaggctctgtccgagcggcattgaaatggccagagtgggacaggctggtgccctcagagcgcttggagcggccagagactcgctggagctcccggggtgttgccgggcagggaggcaggggctggaggggagatgggccagctctggagggtgcctggttctgggtgtgggtcagggaagaagtgaaggttaaatcagcgagtgacaggtgaaattccatttctgacaaagattatgggtttgtctgtgtctcactcgaatctctgggtattgcttttatatttcttgaaactatattaggtacctatgtattttggaacatttaattttctgattgaacttgtcaaaatgaagtatgtttatcttttt

SEQ ID NO: 120113 - DNA, 1862 bp, Homo sapiens
  Payload ID: 3553
  Gene Symbol: CPSF3L
  Gene Name: cleavage and polyadenylation specific factor 3-like
  ENST ID: ENST00000620829
  CDS Start-End: 80-1588
aagttgcagcgaggtggttgcgcctgcgcagtgcatcaccgcaggcgggcctcgcgggtccgggagcgcggcggagacgatgcctgagatcagagtcacgcccttgggtgcctgccctgtgctgtcctggaacctggtccttccaccgggcagggggtcgagggcaccttccagcacagacaccaggacgggattccatgtcctcccccatggcgtgaatgatgagctggagatcaaggcctactatgcaggccacgtgctgggggcagccatgttccagattaaagtgggctcagagtctgtggtctacacgggtgattataacatgaccccagaccgacacttaggagctgcctggattgacaagtgccgccccaacctgctcatcacagagtccacgtacgccacgaccatccgtgactccaagcgctgccgggagcgagacttcctgaagaaagtccacgagaccgtggagcgtggtgggaaggtgctgatacctgtgttcgcgctgggccgcgcccaggagctctgcatcctcctggagaccttctgggagcgcatgaacctgaaggtgcccatctacttctccacggggctgaccgagaaggccaaccactactacaagctgttcatcccctggaccaaccagaagatccgcaagactttcgtgcagaggaacatgtttgagttcaagcacatcaaggccttcgaccgggcttttgctgacaacccaggaccgatggttgtgtttgccacgccaggaatgctgcacgctgggcagtccctgcagatcttccggaaatgggccggaaacgaaaagaacatggtcatcatgcccggctactgcgtgcagggcaccgtcggccacaagatcctcagcgggcagcggaagctcgagatggaggggcggcaggtgctggaggtcaagatgcaggtggagtacatgtcattcagcgcacacgcggacgccaagggcatcatgcagctggtgggccaggcagagccggagagcgtgctgctggtgcatggcgaggccaagaagatggagttcctgaagcagaagatcgagcaggagctccgggtcaactgctacatgccggccaatggcgagacggtgacgctgcccacaagccccagcatccccgtaggcatctcgctggggctgctgaagcgggagatggcgcaggggctgctccctgaggccaagaagcctcggctcctgcacggcaccctgatcatgaaggacagcaacttccggctggtgtcctcagagcaagccctcaaagagctgggtctggctgagcaccagctgcgcttcacctgccgcgtgcacctgcatgacacacgcaaggagcaggagacggcattgcgcgtctacagccacctcaagagcgtcctgaaggaccactgtgtgcagcacctcccagacggctctgtgactgtggagtccgtcctcctccaggccgccgccccttctgaggacccaggcaccaaggtgctgctggtctcctggacctaccaggacgaggagctggggagcttcctcacatctctgctgaagaagggcctcccccaggcccccagctgaggccggcaactcacccagccgccacctctgccctctcccagctggacagaccctgggcctgcacttcaggactgtgggtgccctgggtgaacagaccctgcaggtcccatccctggggacagaggccttgtgtcacctgcctgcccaggcagctgtttgcagctgaagaaacaaactggtctccaggctgtcttgcctttattcctggttagggcaggtggtcctagacagcagtttccagtaaaagctgaacaaaagactacttggtactctc

SEQ ID NO: 120114 - DNA, 138 bp, Homo sapiens
  Payload ID: 3553
  Gene Symbol: CPSF3L
  Gene Name: cleavage and polyadenylation specific factor 3-like
  ENST ID: ENST00000627245
  CDS Start-End: 1-138
atgcctgagatcagagtcacgcccttgggggccggccaggacgtgggccgaagctgcatcctggtctccattgcgggcaagaatgtcatgctggactgtggaatgcacatgggcttcaatgacgacttgtgcttggat

SEQ ID NO: 120115 - DNA, 1691 bp, Homo sapiens
  Payload ID: 3554
  Gene Symbol: CPSF4
  Gene Name: cleavage and polyadenylation specific factor 4, 30kDa
  Uniprot ID: O95639
  ENST ID: ENST00000292476
  CDS Start-End: 11-820
cgccgccgccatgcaggaaatcatcgccagcgtggaccacatcaagtttgacttggagatcgcggtggagcagcagctgggggcgcagccgctgcccttccccggcatggacaagtcgggcgctgctgtctgtgaattctttttgaaagctgcctgcggcaaagggggcatgtgtccgtttcgccacatcagtggtgagaagacagttgtgtgcaaacactggctgcgtggcctatgcaagaaaggggaccagtgtgagttcctgcatgagtatgacatgaccaagatgcccgagtgctacttctactccaagttcggggagtgcagcaacaaggaatgtcccttcctgcacatcgaccccgagtccaagatcaaggactgtccttggtatgaccgtggcttctgcaagcacggtcccctctgcaggcaccggcacacacggagagtcatctgtgtgaattacctcgtgggattctgcccggaggggccctcgtgtaaattcatgcaccctcgatttgaactgcccatgggaaccaccgagcagcccccactgccgcagcagacacagcctccagcaaagcaaagtaacaatccgccattacaaaggtcgtcctccttgatccagttaacgagtcagaactcttctcccaatcagcagagaaccccgcaggtcatcggggtcatgcagagtcaaaacagcagcgcgggcaaccggggaccccggccactggagcaggtcacctgttacaagtgtggcgagaaaggacactacgccaacagatgcaccaaagggcacttggcctttctcagtggacagtgacagcagctggagccagctccgagcagcccgggggccccgctgttgggagtgtgcatttaactgtttcatgcgcttgttggcgcgactgtggctcgagctggcccgcagacacgtgggtttcatcactctgaggggccacgtctgttagtttcctatcattttgccttagtattttttgaaaaagggacatgtgtcctgtgggtccctgcagtcgacatcatgtttggctgggcatcgatgcctcctttctgggactcccggcacaactcccctcatccagggagggaggcagctgctggggaggggcttggctaggtagttctgtgtggcggtggtcattcccctcattaaacaccagttcttggtgacgccaggggctggtaggtcattcaaagctgtggccagctcacgcctgcttcctccctccctgccctgctgaatcctaaagctgtgcctatatctgtgatttgaatgagggagccctttggggcaaattcaggtgcccccattgcctcaggctggccctggtcccaggtggcagcggttgaggaggggtacagggctctcaagcctgaggttttcttctctgggcttaattttctcttggggtacgtgcctgacagtgtttaaggtgtccgttgaactggagttgcagacttttaaatagatgaccccttcagatcatctgtgcctacctcctgcccatcaggcgtctacactgtcactcagacacctgtggcatgtggaggagactgccctgtcctgagcctggaaaatgtgaaactgtctcctgcaacctgctgggcatgtgggcctggctgtgttcaattgcaagaacaatttttatgaaatggattaaagcttgtttttt

SEQ ID NO: 120116 - DNA, 687 bp, Homo sapiens
  Payload ID: 3554
  Gene Symbol: CPSF4
  Gene Name: cleavage and polyadenylation specific factor 4, 30kDa
  ENST ID: ENST00000452047
  CDS Start-End: 1-687
acagagtcgggcgctgctgtctgtgaattctttttgaaagctgcctgcggcaaagggggcatgtgtccgtttcgccacatcagtggtgagaagacagttgtgtgcaaacactggctgcgtggcctatgcaagaaaggggaccagtgtgagttcctgcatgagtatgacatgaccaagatgcccgagtgctacttctactccaagttcggggagtgcagcaacaaggaatgtcccttcctgcacatcgaccccgagtccaagatcaaggactgtccttggtatgaccgtggcttctgcaagcacgccctcgatttgaactgcccatgggaaccaccgagcagcccccactgccgcagcagacacagcctccagcaaagcagagaaccccgcaggtcatcggggtcatgcagagtcaaaacagcagcgcgggcaaccggggaccccggccactggagcaggtcacctgttacaagtgtggcgagaaaggacactacgccaacagatgcaccaaagggcacttggcctttctcagtggacagtgacagcagctggagccagctccgagcagcccgggggccccgctgttgggagtgtgcatttaactgtttcatgcgcttgttggcgcgactgtggctcgagctggcccgcagacacgtgggtttcatcactctgaggggccacgtctgt

SEQ ID NO: 120117 - DNA, 1738 bp, Homo sapiens
  Payload ID: 3554
  Gene Symbol: CPSF4
  Gene Name: cleavage and polyadenylation specific factor 4, 30kDa
  Uniprot ID: O95639
  ENST ID: ENST00000436336
  CDS Start-End: 162-896
gcgcgggctccgggcgctcccggcatccctcgggcggcggcggcggcggcggcgaggcgaagcgaaggaggagtgtgtgcggcggggccggcggcgggtaaaggcgagaaggctgcaggagaccgagggggagccgggccggtggggccgccgccgccgccatgcaggaaatcatcgccagcgtggaccacatcaagtttgacttggagatcgcggtggagcagcagctgggggcgcagccgctgcccttccccggcatggacaagtcgggcgctgctgtctgtgaattctttttgaaagctgcctgcggcaaagggggcatgtgtccgtttcgccacatcagtggtgagaagacagttgtgtgcaaacactggctgcgtggcctatgcaagaaaggggaccagtgtgagttcctgcatgagtatgacatgaccaagatgcccgagtgctacttctactccaagttcggggagtgcagcaacaaggaatgtcccttcctgcacatcgaccccgagtccaagatcaaggactgtccttggtatgaccgtggcttctgcaagcacggtcccctctgcaggcaccggcacacacggagagtcatctgtgtgaattacctcgtgggattctgcccggaggggccctcgtgtaaattcatgcaccctcgatttgaactgcccatgggaaccaccgagcagcccccactgccgcagcagacacagcctccagcaaagcagagaaccccgcaggtcatcggggtcatgcagagtcaaaacagcagcgcgggcaaccggggaccccggccactggagcaggtcacctgttacaagtgtggcgagaaaggacactacgccaacagatgcaccaaagggcacttggcctttctcagtggacagtgacagcagctggagccagctccgagcagcccgggggccccgctgttgggagtgtgcatttaactgtttcatgcgcttgttggcgcgactgtggctcgagctggcccgcagacacgtgggtttcatcactctgaggggccacgtctgttagtttcctatcattttgccttagtattttttgaaaaagggacatgtgtcctgtgggtccctgcagtcgacatcatgtttggctgggcatcgatgcctcctttctgggactcccggcacaactcccctcatccagggagggaggcagctgctggggaggggcttggctaggtagttctgtgtggcggtggtcattcccctcattaaacaccagttcttggtgacgccaggggctggtaggtcattcaaagctgtggccagctcacgcctgcttcctccctccctgccctgctgaatcctaaagctgtgcctatatctgtgatttgaatgagggagccctttggggcaaattcaggtgcccccattgcctcaggctggccctggtcccaggtggcagcggttgaggaggggtacagggctctcaagcctgaggttttcttctctgggcttaattttctcttggggtacgtgcctgacagtgtttaaggtgtccgttgaactggagttgcagacttttaaatagatgaccccttcagatcatctgtgcctacctcctgcccatcaggcgtctacactgtcactcagacacctgtggcatgtggaggagactgccctgtcctgagcctggaaaatgtgaaactgtctcctgcaacctgctgggcatgtgggcctggctgtgttcaattgcaagaacaatt

SEQ ID NO: 120118 - DNA, 1644 bp, Homo sapiens
  Payload ID: 3554
  Gene Symbol: CPSF4
  Gene Name: cleavage and polyadenylation specific factor 4, 30kDa
  ENST ID: ENST00000451876
  CDS Start-End: 138-773
atccctcgggcggcggcggcggcggcggcgaggcgaagcgaaggaggagtgtgtgcggcggggccggcggcgggtaaaggcgagaaggctgcaggagaccgagggggagccgggccggtggggccgccgccgccgccatgcaggaaatcatcgccagcgtggaccacatcaagtttgacttggagatcgcggtggagcagcagctgggggcgcagccgctgcccttccccggcatggacaagtcgggcgctgctgtctgtgaattctttttgaaagctgcctgcggcaaagggggcatgtgtccgtttcgccacatcagtggtgagaagacagttgtgtgcaaacactggctgcgtggcctatgcaagaaaggggaccagtgtgagttcctgcatgagtatgacatgaccaagatgcccgagtgctacttctactccaagttcggtcccctctgcaggcaccggcacacacggagagtcatctgtgtgaattacctcgtgggattctgcccggaggggccctcgtgtaaattcatgcaccctcgatttgaactgcccatgggaaccaccgagcagcccccactgccgcagcagacacagcctccagcaaagagaaccccgcaggtcatcggggtcatgcagagtcaaaacagcagcgcgggcaaccggggaccccggccactggagcaggtcacctgttacaagtgtggcgagaaaggacactacgccaacagatgcaccaaagggcacttggcctttctcagtggacagtgacagcagctggagccagctccgagcagcccgggggccccgctgttgggagtgtgcatttaactgtttcatgcgcttgttggcgcgactgtggctcgagctggcccgcagacacgtgggtttcatcactctgaggggccacgtctgttagtttcctatcattttgccttagtattttttgaaaaagggacatgtgtcctgtgggtccctgcagtcgacatcatgtttggctgggcatcgatgcctcctttctgggactcccggcacaactcccctcatccagggagggaggcagctgctggggaggggcttggctaggtagttctgtgtggcggtggtcattcccctcattaaacaccagttcttggtgacgccaggggctggtaggtcattcaaagctgtggccagctcacgcctgcttcctccctccctgccctgctgaatcctaaagctgtgcctatatctgtgatttgaatgagggagccctttggggcaaattcaggtgcccccattgcctcaggctggccctggtcccaggtggcagcggttgaggaggggtacagggctctcaagcctgaggttttcttctctgggcttaattttctcttggggtacgtgcctgacagtgtttaaggtgtccgttgaactggagttgcagacttttaaatagatgaccccttcagatcatctgtgcctacctcctgcccatcaggcgtctacactgtcactcagacacctgtggcatgtggaggagactgccctgtcctgagcctggaaaatgtgaaactgtctcctgcaacctgctgggcatgtgggcctggctgtgttcaattgcaagaacaatttttatgaaatggattaaagcttgtttttt

SEQ ID NO: 120119 - DNA, 745 bp, Homo sapiens
  Payload ID: 3554
  Gene Symbol: CPSF4
  Gene Name: cleavage and polyadenylation specific factor 4, 30kDa
  ENST ID: ENST00000412686
  CDS Start-End: 408-745
ctcttcccactccatcctgagacctcctcttctggatcccgggacgctccccttggtttcaggactcctgactcccaggcccccatttccaccgtctggggactccttttaccctcactcggactcaggagttcactgcctcggatctttggccctctgcggctgttcaaagtttcttatcatcttcagactttctggaaattgaagagacattcaaaccaaatctttgagctctttccttcggcttatccaagttaaccataggtgtgttcagatgacagacttttgttggaactgaagaaatcccaaacctagctgcctgagcagctttcttactctccaagctcacagagtcgggcgctgctgtctgtgaattctttttgaaagctgcctgcggcaaagggggcatgtgtccgtttcgccacatcagtggtgagaagacagttgtgtgcaaacactggctgcgtggcctatgcaagaaaggggaccagtgtgagttcctgcatgagtatgacatgaccaagatgcccgagtgctacttctactccaagttcggggagtgcagcaacaaggaatgtcccttcctgcacatcgaccccgagtccaagatcaaggactgtccttggtatgaccgtggcttctgcaagcacggtcccctctgcaggcaccggcacacacggagagtcatctgtgtgaattacctcgtgggattctgcccggaggggccctcgtgtaaattcatgca

SEQ ID NO: 120120 - DNA, 735 bp, Homo sapiens
  Payload ID: 3554
  Gene Symbol: CPSF4
  Gene Name: cleavage and polyadenylation specific factor 4, 30kDa
  ENST ID: ENST00000430038
  CDS Start-End: 67-201
atcaagtttgacttggagatcgcggtggagcagcagctgggggcgcagccgctgcccttccccggcatggacaagtcgggcgctgctgtctgtgaattctttttgaaagctgcctgcggcaaagaagagacaggatttcaccgtgacagccaggatggtctccgtgccagccaggatggtctcgatctcctgaccttgtgatccgcccacctcggccttccaaagtgctgggattaccagcgtgatccactgcgcccggccatgagtaactattaaaatgtaaaatgtctgtcagtgtagtacctcaaatcatgttgccttctgtgagggggacctctgcccctttccaggacgtgatgccttcaggtggctccaggagttaggaagtgaagggggcatgtgtccgtttcgccacatcagtggtgagaagacagttgtgtgcaaacactggctgcgtggcctatgcaagaaaggggaccagtgtgagttcctgcatgagtatgacatgaccaagatgcccgagtgctacttctactccaagttcggggagtgcagcaacaaggaatgtcccttcctgcacatcgaccccgagtccaagatcaaggactgtccttggtatgaccgtggcttctgcaagcacggtcccctctgcaggcaccggcacacacggagagtcatctgtgtgaattacctcgtgggattctgcccggaggggccctcgtgtaaattcatgca

SEQ ID NO: 120121 - DNA, 942 bp, Homo sapiens
  Payload ID: 3554
  Gene Symbol: CPSF4
  Gene Name: cleavage and polyadenylation specific factor 4, 30kDa
  ENST ID: ENST00000441580
  CDS Start-End: 278-853
tgggatcctcccctttagttaccgaactccctcatctgtggtcccgagactcttcccactccatcctgagacctcctcttctggatcccgggacgctccccttggtttcaggactcctgactcccaggcccccatttccaccgtctggggactccttttaccctcactcggactcaggagttcactgcctcggatctttggccctctgcggctgttcaaagagtcgggcgctgctgtctgtgaattctttttgaaagctgcctgcggcaaagggggcatgtgtccgtttcgccacatcagtggtgagaagacagttgtgtgcaaacactggctgcgtggcctatgcaagaaaggggaccagtgtgagttcctgcatgagtatgacatgaccaagatgcccgagtgctacttctactccaagttcggggagtgcagcaacaaggaatgtcccttcctgcacatcgaccccgagtccaagatcaaggactgtccttggtatgaccgtggcttctgcaagcacggtcccctctgcaggcaccggcacacacggagagtcatctgtgtgaattacctcgtgggattctgcccggaggggccctcgtgtaaattcatgcaccctcgatttgaactgcccatgggaaccaccgagcagcccccactgccgcagcagacacagcctccagcaaagcagagaaccccgcaggtcatcggggtcatgcagagtcaaaacagcagcgcgggcaaccggggaccccggccactggagcaggtcacctgttacaagtgtggcgagaaaggacactacgccaacagatgcaccaaagggcacttggcctttctcagtggacagtgacagcagctggagccagctccgagcagcccgggggccccgctgttgggagtgtgcatttaactgtttcatgcgcttgttggcgcgactgt

SEQ ID NO: 120122 - DNA, 578 bp, Homo sapiens
  Payload ID: 3554
  Gene Symbol: CPSF4
  Gene Name: cleavage and polyadenylation specific factor 4, 30kDa
  ENST ID: ENST00000440514
  CDS Start-End: 1-578
caagatcaaggactgtccttggtatgaccgtggcttctgcaagcacggtcccctctgcaggcaccggcacacacggagagtcatctgtgtgaattacctcgtgggattctgcccggaggggccctcgtgtaaattcatgcaccctcgatttgaactgcccatgggaaccaccgagcagcccccactgccgcagcagacacagcctccagcaaagcaaagtaacaatccgccattacaaaggtcgtcctccttgatccagttaacgagtcagaactcttctcccaatcagcagagaaccccgcaggtcatcggggtcatgcagagtcaaaacagcagcgcgggcaaccggggaccccggccactggagcaggtcacctgttacaagtgttgttgtctgtctctcctcttcccccacttcctgctgttcccagtgtggcgagaaaggacactacgccaacagatgcaccaaagggcacttggcctttctcagtggacagtgacagcagctggagccagctccgagcagcccgggggccccgctgttgggagtgtgcatttaactgtttcatgcgcttgtt

SEQ ID NO: 120123 - DNA, 647 bp, Homo sapiens
  Payload ID: 3555
  Gene Symbol: CPSF4L
  Gene Name: cleavage and polyadenylation specific factor 4-like
  Uniprot ID: A6NMK7
  ENST ID: ENST00000344935
  CDS Start-End: 63-602
gctatattgggcccacctgcctgggttccagcagcttccgcagccccagcaggagacggaagatgcaagaggtcattgcggggctagagcggttcacctttgccttcgagaaggatgtcgagatgcagaagggcactgggctcctgcctttccagggcatggacaagtcggcctcagctgtgtgcaacttcttcactaaagggctctgtgagaaagggaaactctgccccttccgacatgaccgaggggagaagatggtggtatgcaagcactggctccgggggctctgcaagaagggtgatcactgcaagttcctgcaccagtatgacctcaccaggatgcctgagtgctacttctactccaagtttggtgactgcagcaacaaggagtgttccttcctccatgtgaagccagctttcaagtcccaggactgtccttggtatgaccaaggtttctgcaaggacggtcctctgtgtaaataccgccatgtccccagaataatgtgtctcaactatttagttggcttctgccccgagggacccaagtgccaatttgctcagaagattcgggaattcaagctgctgcctggaagcaagatctaagcgttgcttcttacctagcggggcactccaatgccacagacaggg

SEQ ID NO: 120124 - DNA, 1275 bp, Homo sapiens
  Payload ID: 3555
  Gene Symbol: CPSF4L
  Gene Name: cleavage and polyadenylation specific factor 4-like
  ENST ID: ENST00000397671
  CDS Start-End: 334-792
gggtgtcaggggccccagagggagaccccttccctcatgggaagaagcggggaggtgggacggctccctccctctgcaaacccccaccacccccagctctggcagaataacagccttgctgcggttggtttgtgcaactctttgctaacctgtggctgtgtcttcatggacaaagtatgagcccaggtttggtaatgtctgtgtgcacgccacgtttgtgttcggtaacatgcaaagataagcaagtcggcctcagctgtgtgcaacttcttcactaaagggctctgtgagaaagggaaactctgccccttccgacatgaccgaggggagaagatggtggtatgcaagcactggctccgggggctctgcaagaagggtgatcactgcaagttcctgcaccagtatgacctcaccaggatgcctgagtgctacttctactccaagtttggtgactgcagcaacaaggagtgttccttcctccatgtgaagccagctttcaagtcccaggactgtccttggtatgaccaaggtttctgcaaggacgcaggtcctctgtgtaaataccgccatgtccccagaataatgtgtctcaactatttagttggcttctgccccgagggacccaagtgccaatttgctcactgtagcttgccagccggccccgggattcagcacctcctatttctgctgtggaagcttggaaacccccatccccaacagagtgcctgctctcctgcctggggatcaggggtcaagggcagggcctgtgccacagggccattatgccagtaagtacagtaagactcaactgataggagttattaaaaactaacctatggtcaggagaagatgctcaatggtcttactatgggattctgtttcccaagttccacagtaagcctgctgtcatcctaagcagggtatgagtgaggtgcagaagtagcctgtggcaggcaggtttatttcttttgatcctgtaagtgaacgagctactaaaaatacaacaggtttggaggcagattggcaggaacgagttatccataaaacgggagcaaaatgtacataaaaccaaaagctcgagtctatgggaaatccacgatcattatactttgctcagctcctaccaacaggtctgggttgcacgtggcagctcctctgtatatggcttcagctgccgctatcaactggcaattaactcaaatggctttctttagcatgacagctgcttccctgtatggcttatttaaatctaagaatatactctgtaccttatgt

SEQ ID NO: 120125 - DNA, 2229 bp, Homo sapiens
  Payload ID: 3556
  Gene Symbol: CPSF6
  Gene Name: cleavage and polyadenylation specific factor 6, 68kDa
  Uniprot ID: Q16630
  ENST ID: ENST00000266679
  CDS Start-End: 32-1798
cggcggcggcggcggccgaggctgaaggaagatggcggacggcgtggaccacatagacatttacgcggatgtcggcgaagagttcaaccaggaagctgaatatggtgggcatgatcagatagatttgtatgacgatgtcatatctccatctgcaaataatggagatgccccagaagaccgagattacatggatactctcccaccaactgttggtgatgatgtgggtaaaggagcagcaccaaatgttgtctatacatatactggaaagagaattgcattatatattggaaatctaacatggtggacaacagatgaagacttaactgaagcagttcattctttgggagtaaatgatattttggagataaaattttttgaaaatcgggcaaatggccagtcaaaggggtttgcccttgttggtgttggatctgaagcatcttcaaaaaagttaatggatctgttacctaaaagagaacttcatggtcagaatcctgttgtaactccatgcaataaacagttcctgagtcaatttgaaatgcagtccaggaaaactacacaatcaggacaaatgtctggggaaggtaaagctggtcctccaggaggcagttcccgtgcagcatttccacaaggtggtagaggacggggccgttttccaggggctgttcctggtggggacagatttcctgggccagcaggaccaggagggccacccccaccttttccaggaaatttgatcaagcatcttgttaaaggaactcggcctttgttcctggaaactaggattccatggcatatggggcacagcatagaggaaatacccatttttggcctaaaagctggacagactccaccacgtccacccttaggtcctccaggcccacctggtccaccaggtcctccacctcctggtcaggttctgcctcctcctctagctgggcctcctaatcgaggagatcgccctccaccaccagttctttttcctggacaaccttttgggcagcctccattgggtccacttcctcctggccctccacctccagttccaggctacggcccccctcctggcccaccacctccacaacagggaccacctccacctccaggcccctttccacctcgtccacccggtccacttgggccaccccttacactagctcctcctccgcatcttcctggaccacctccaggtgccccaccgccagctccgcatgtgaacccagctttctttcctccaccaactaacagtggcatgcctacatcagatagccgaggtccaccaccaacagatccatatgggcgacctccaccatatgataggggtgactatggcccccctggaagggaaatggatactgcaagaacgccattgagtgaagctgaatttgaagaaatcatgaatagaaatagggcaatctcaagcagtgctatttcgagagctgtgtctgatgccagtgctggtgattatgggagtgctattgagacactggtaactgcaatttctttaattaaacaatccaaagtatctgctgatgatcgttgcaaagttcttattagttctttgcaagattgccttcatggaattgagtccaagtcttatggttctggatcaagacgtgaacgatcaagagagagggaccatagtagatcacgagaaaagagtcgacgtcataaatcccgtagtagagaccgtcatgacgattattacagagagagaagcagagaacgagagaggcaccgggatcgtgaccgagaccgtgaccgagagcgtgaccgagagcgcgaatatcgtcatcgttagaagctgaaggaagaggatcaccttccaagacaaaacagtcttcatgggggaaaaatgacgcttgtccagcagtttgcttcttgtgattgaactgaacctgtaaggattcatggataaaatgaacaggaatagatctgaataaagcaaatctgcataaatggtaaccagtagctctacttttattttttatgttgcttaactgttttatttgaaggaaacctgtgtgatttaaaaagttatagcttttgcaactttattactggttatatacatttggccattatgatgtgcaagcaattggaaaaaaagtcaagtaaatgcttgtttttgtagtagtttgttcttgttaaaaatgtttatatgataatgtctgtaaacagcatcactttgattacaatagatgtagtgttgtaataaactgtttaatgggg

SEQ ID NO: 120126 - DNA, 1915 bp, Homo sapiens
  Payload ID: 3556
  Gene Symbol: CPSF6
  Gene Name: cleavage and polyadenylation specific factor 6, 68kDa
  ENST ID: ENST00000456847
  CDS Start-End: 48-1484
gacctgcaggaggcggcggcggcggcggcggccgaggctgaaggaagatggcggacggcgtggaccacatagacatttacgcggatgtcggcgaagagttcaaccaggaagctgaatatggtgggcatgatcagatagatttgtatgacgatgtcatatctccatctgcaaataatggagatgccccagaagaccgagattacatggatactctcccaccaactgttggtgatgatgtgggtaaaggagcagcaccaaatgttgtctatacatatactggaaagagaattgcattatatattggaaatctaacatggtggacaacagatgaagacttaactgaagcagttcattctttgggagtaaatgatattttggagataaaattttttgaaaatcgggcaaatggccagtcaaaggggtttgcccttgttggtgttggatctgaagcatcttcaaaaaagttaatggatctgttacctaaaagagaacttcatggtcagaatcctgttgtaactccatgcaataaacagttcctgagtcaatttgaaatgcagtccaggaaaactacacaatcaggacaaatgtctggggaaggtaaagctggtcctccaggagctgggcctcctaatcgaggagatcgccctccaccaccagttctttttcctggacaaccttttgggcagcctccattgggtccacttcctcctggccctccacctccagttccaggctacggcccccctcctggcccaccacctccacaacagggaccacctccacctccaggcccctttccacctcgtccacccggtccacttgggccaccccttacactagctcctcctccgcatcttcctggaccacctccaggtgccccaccgccagctccgcatgtgaacccagctttctttcctccaccaactaacagtggcatgcctacatcagatagccgaggtccaccaccaacagatccatatgggcgacctccaccatatgataggggtgactatggcccccctggaagggaaatggatactgcaagaacgccattgagtgaagctgaatttgaagaaatcatgaatagaaatagggcaatctcaagcagtgctatttcgagagctgtgtctgatgccagtgctggtgattatgggagtgctattgagacactggtaactgcaatttctttaattaaacaatccaaagtatctgctgatgatcgttgcaaagttcttattagttctttgcaagattgccttcatggaattgagtccaagtcttatggttctggatcaagacgtgaacgatcaagagagagggaccatagtagatcacgagaaaagagtcgacgtcataaatcccgtagtagagaccgtcatgacgattattacagagagagaagcagagaacgagagaggcaccgggatcgtgaccgagaccgtgaccgagagcgtgaccgagagcgcgaatatcgtcatcgttagaagctgaaggaagaggatcaccttccaagacaaaacagtcttcatgggggaaaaatgacgcttgtccagcagtttgcttcttgtgattgaactgaacctgtaaggattcatggataaaatgaacaggaatagatctgaataaagcaaatctgcataaatggtaaccagtagctctacttttattttttatgttgcttaactgttttatttgaaggaaacctgtgtgatttaaaaagttatagcttttgcaactttattactggttatatacatttggccattatgatgtgcaagcaattggaaaaaaagtcaagtaaatgcttgtttttgtagtagtttgttcttgttaaaaatgtttatatgataatgtctgtaaacagcatcactttgattacaatagatgtagtgttgtaataaactgtttaatgggg

SEQ ID NO: 120127 - DNA, 6616 bp, Homo sapiens
  Payload ID: 3556
  Gene Symbol: CPSF6
  Gene Name: cleavage and polyadenylation specific factor 6, 68kDa
  Uniprot ID: Q16630
  ENST ID: ENST00000435070
  CDS Start-End: 111-1766
ctcggaagtgacgcaagcgcccccccaccgccgctagatccgctgctgctgccgcggcgggcagacctgcaggaggcggcggcggcggcggcggccgaggctgaaggaagatggcggacggcgtggaccacatagacatttacgcggatgtcggcgaagagttcaaccaggaagctgaatatggtgggcatgatcagatagatttgtatgacgatgtcatatctccatctgcaaataatggagatgccccagaagaccgagattacatggatactctcccaccaactgttggtgatgatgtgggtaaaggagcagcaccaaatgttgtctatacatatactggaaagagaattgcattatatattggaaatctaacatggtggacaacagatgaagacttaactgaagcagttcattctttgggagtaaatgatattttggagataaaattttttgaaaatcgggcaaatggccagtcaaaggggtttgcccttgttggtgttggatctgaagcatcttcaaaaaagttaatggatctgttacctaaaagagaacttcatggtcagaatcctgttgtaactccatgcaataaacagttcctgagtcaatttgaaatgcagtccaggaaaactacacaatcaggacaaatgtctggggaaggtaaagctggtcctccaggaggcagttcccgtgcagcatttccacaaggtggtagaggacggggccgttttccaggggctgttcctggtggggacagatttcctgggccagcaggaccaggagggccacccccaccttttccagctggacagactccaccacgtccacccttaggtcctccaggcccacctggtccaccaggtcctccacctcctggtcaggttctgcctcctcctctagctgggcctcctaatcgaggagatcgccctccaccaccagttctttttcctggacaaccttttgggcagcctccattgggtccacttcctcctggccctccacctccagttccaggctacggcccccctcctggcccaccacctccacaacagggaccacctccacctccaggcccctttccacctcgtccacccggtccacttgggccaccccttacactagctcctcctccgcatcttcctggaccacctccaggtgccccaccgccagctccgcatgtgaacccagctttctttcctccaccaactaacagtggcatgcctacatcagatagccgaggtccaccaccaacagatccatatgggcgacctccaccatatgataggggtgactatggcccccctggaagggaaatggatactgcaagaacgccattgagtgaagctgaatttgaagaaatcatgaatagaaatagggcaatctcaagcagtgctatttcgagagctgtgtctgatgccagtgctggtgattatgggagtgctattgagacactggtaactgcaatttctttaattaaacaatccaaagtatctgctgatgatcgttgcaaagttcttattagttctttgcaagattgccttcatggaattgagtccaagtcttatggttctggatcaagacgtgaacgatcaagagagagggaccatagtagatcacgagaaaagagtcgacgtcataaatcccgtagtagagaccgtcatgacgattattacagagagagaagcagagaacgagagaggcaccgggatcgtgaccgagaccgtgaccgagagcgtgaccgagagcgcgaatatcgtcatcgttagaagctgaaggaagaggatcaccttccaagacaaaacagtcttcatgggggaaaaatgacgcttgtccagcagtttgcttcttgtgattgaactgaacctgtaaggattcatggataaaatgaacaggaatagatctgaataaagcaaatctgcataaatggtaaccagtagctctacttttattttttatgttgcttaactgttttatttgaaggaaacctgtgtgatttaaaaagttatagcttttgcaactttattactggttatatacatttggccattatgatgtgcaagcaattggaaaaaaagtcaagtaaatgcttgtttttgtagtagtttgttcttgttaaaaatgtttatatgataatgtctgtaaacagcatcactttgattacaatagatgtagtgttgtaataaactgtttaatggggctgatgtgtaaagctgttcaagttatttgatgtttacacctcagggaaagtcttgtgttcagcaatatctaaagataatgttactatgacaacatttttactgtcctttaaagcattgcaatagcgtttttggatatgcctcaatctaatcttgcgttcagtgaattaaacatagtaattaagtgtcttttgcccttgattttgatattagaataggtgattacatggatatttaatatttctatattctgcttttctagctgtttttacctagttagcttgtgactttgctgaatggtatgtaaacttgtaaaaatagagatttgacagacatagcaatctagtcaatgtgtaaggggtcaaaaaaacagaggttttaacacataagtaaaaacccgtacatatttgatgtgtaatgcaggttaattacaacacagatgtaccgaaacacttaattgtgaaccgctaacattgaagaaattttgacaattccgatttgatgctgcaattacttgctgtttttattgatcttatggtttatttcttaagccatagtcagtgtaaatacagccctgcagcaggtaaatgtgagtaaagagagccttatattttccaattggtataaatttttgaaggatgtgatgttcattaacattcggttgtattccccagtatttgtaatgggaaattacagataaaccgtgtctgcacagtttaaggaatactatgtatattcatgcaccgtattgattcatgctatagttacttaatcaaagatttttttcaaacctgccttacatataggcccactttaaaagcacctgactagcatgtgttcttgattgcaaaattggcagaggcagggtgtcaacttgattaggtgtttttatgggaatgtaatttgaaatcactacttcagaaatttgacttaaaattcttgagcacgttaatatgtttttaagatctgattatctttgagagatcttctgttaatacacattggttgttaaagagtacccaaattctaggacaatgcttaaagtgttaaaataccctagatactgtgttatgtgcaactgtagaaaccctccagaaatttccactgctgttcttcactttcatcttgtctgctatcaaaccacttctgacaaaattagctgttttgaattacccatatcactgccagttttattttaaaatattttgtgtttgaagtatctgtgcatgggatcgttgatgtttatcagaactgttcactttcagaaatgattttttaaagcattttgttgaaaatgcggttgcttttttaacattattttagagttgtatcaaaattttcctgttttctgtatattgttgtgtcatttcttggctttttaatattttgactacaatgccctaatgcgaagaagtatggacatataaatattacaagagaaattagttaatagtaaagggttaaaaggtaagtaaaatgtccatgaaaataaaattttctttgaacagtttaaaaatggaatcacaaaaatctaactgcacttgaaatgaaactggaaattttatactaattaaatcctttatttaccttttcatattttatcaatggaaccttttaattgctccttctatatcactcttctccttgcttggctgatctcattacatgactttcgttacagacagtgtgagtgtactagatttgtttgctgctaatccgttattttaagtgttgtcagaaggaaataacttcttggtttgaccaagtaattttgcaaagtccttctctacctgataacacgtgaatgtatagcagtaaaggtgaaaattgcaggccttgttttgttcttcatacccccttcagttgtttatgggttaatgttatttgaaaactcttcctttttttaatgtgtaaaaacaatccaaagagataaatccttgcatagacaccaaaaacagtgtctcagagaccttttcattttttccttagttaataactgtagtggatgtgaaaacaaacgagttgaattttaaaacatagcatttattagtgctatacagtcacattcctttcagccagtagtaaagttaaacagatgagtgatacagtacctgaatggtactgcttctgaggcaacactttggattgaaagtgctgcttttggttaaaggaactatgttgtggaaagcatattccagtgtaaatttgcagatgtgtgttttttttttttgtcacttttcataaggtttggagtaagttgcagtggcttttgatcatagtttagcccatttaatggtccttttacctagaatgttcttaagcagttaatgacaatttggaatacacagataacttgtagcttaagatactattttcatttaattctcctgtggagaatattgctttattttttactagtttcaggtcagttattaaaataaacatggaggttttaatgaatgttgtataatattttatagtgaaggaaaattgtggaaagggcaaagactttctctttcccttatgtatttaactgtgccaatctaaatacatactgttttatacaatgagatgcattacaagacttttctgttggagtgctctcgacattttggttttcatacctgaatgatcattgcattttctgtattttctaaaatggctccaattttgtgttttaagcttcagcttaagaggaagtttatgttctaattcttgactgagaatacagtattgagattctctgttttacagataacaactggtttttattactcattaagttcatttgcatcccgtagccctctgtaaatgtttcccctagttgtatgtacgtaaatgcacgcttatccagtgtatattagacatttttgtgctaaaatatattaagtgggatttttgtagcaaagcattctatttttctgttcttacagtgtgtgtgtgtgtgtgtgtgtgtgtgtatgcgtttttttaaccttaacttcagtttaaacactggtgtatttatttttttaagcaacttgactcttagaagccttagactgattttttcaataaatattcaaccaaaaattataaatttattaagatgtggccttacatatggcattccttgtgttcgtaatgtgagatttttgatttagataaatcaagattcaggattaaagtttcattgtaagttgaaatagaaaatgtattaaaatgtctaggcttctgggaggaagttcttatactcttctttcttggcattagaaagaagcaatatgaatttttgtgaatattctaaatattcaggcaacactgttcagattgatttaggtttgtcttaaccaatgttctttttttagaatttcaggttgtggcattcactgagtatgcagctactatggtttttgtatgggacgtataaatacttgattatatacgacagattttaatgtctttaaagacttcctgctgtattaacatattgtaatggagtcttttaaatactaggttgaatttaattgaagtcacacacatcttgaagtggtaactgcatagtaaatactaccaagagtttttttcacgtgggagtatcctaaaactctgccatgggtgtaaatgttttacattaatttcataattggacagaccctgcatttagcgaaaacattttgttttgaaagtgtgttctttttgtcgcactgttactgcgtaacacttctcaacattctgtaagttaaattattttaaaataactatggtgaattcatgtttatttttttactttgaaaattgtagtactcaggtggtatttaatgggaaaggatcctttgggtataaatcataatgtattttaaggaatgcatctataacattgataactttagccttaaaaaaaaggtctattattccttcctctgcatcccatggtatattagcaaagtagtttacagccctgtacagccttacaaagttgttttacaatttttaatggaaagcccttaacaacaacaacaaaaaattgtatcattttaccaatatccacgaattactgatcacagtttgtaaataatttgtttaatatcagaaggccaaagaaagtcttaaaattttagctattgactctatggtgacttcacaataagatttctgtgcaaaaaggtaaggtgataattgatctaatagacttttttttttttttttttgctgtccatgagaattagacttcatattagcttcaattaaaaagctcattccattttattaaaatgtttgtaattgcaattttgtgtttaatgtttactttgtctttcctttctttagcatttaggtgactgttcggcagtttgatatatggccattgtcggccttaaactgcactagtaacaagcatggtatttatcttgtattgaaaataaaacaaacttttgataaga

SEQ ID NO: 120128 - DNA, 540 bp, Homo sapiens
  Payload ID: 3556
  Gene Symbol: CPSF6
  Gene Name: cleavage and polyadenylation specific factor 6, 68kDa
  ENST ID: ENST00000550075
  CDS Start-End: 76-399
agatccgctgctgctgccgcggcgggcagacctgcaggaggcggcggcggcggcggcggccgaggctgaaggaagatggcggacggcgtggaccacatagacatttacgcggatgtcggcgaagagttcaaccaggaagctgaatatggtgggcatgatcagatagatttgtatgacgatgtcatatctccatctgcaaataatggagatgccccagaagaccgagattacatggatactctcccaccaactgttggtgatgatgtgggtaaaggagcagcaccaaatgttgtctatacatatactggaaagagaattgcattatatattggaaatctaacatggggggagacagaatttgcaaaactctgtcacccaggctggagtgcagtggtgtaatcatagctcactgaagcctcaaactcctgggctgaagtgattctcctgtgtcagcctccaagtagctaggaccacagtggacaacagatgaagacttaactgaagcagttcattctttgggagtaaatgatattttggaga

SEQ ID NO: 120129 - DNA, 234 bp, Homo sapiens
  Payload ID: 3556
  Gene Symbol: CPSF6
  Gene Name: cleavage and polyadenylation specific factor 6, 68kDa
  ENST ID: ENST00000551516
  CDS Start-End: 6-176
ggaagatggcggacggcgtggaccacatagacatttacgcggatgtcggcgaagagttcaaccaggaagctgaatatgagagagaagcagagaacgagagaggcaccgggatcgtgaccgagaccgtgaccgagagcgtgaccgagagcgcgaatatcgtcatcgttagaagctgaaggaagaggatcaccttccaagacaaaacagtcttcatgggggaaaaatgacgcttgt

SEQ ID NO: 120130 - DNA, 3695 bp, Homo sapiens
  Payload ID: 3557
  Gene Symbol: CPSF7
  Gene Name: cleavage and polyadenylation specific factor 7, 59kDa
  Uniprot ID: Q8N684
  ENST ID: ENST00000340437
  CDS Start-End: 82-1626
aacgggggcgcgcggtcgggggcaggttgggccggaagaggggtccgggccggcactgaggcgggaagggggtcggttgagatgggacggccggagtctgcgggcggagggagtcgcgggccttttgagggaggaggcagagcgcgccgggccggtggcatcttccttactttgtccatcctccggactcgcgatcttccttccggagccatgtcagaaggagtggacttgattgatatatatgctgacgaggagttcaaccaggacccagagttcaacaatacagatcagattgacctgtatgatgatgtgctgacagccacctcacagccctcagatgacagaagcagcagcactgaaccacctcctcctgttcgccaggagccatctcccaagcccaacaacaagacccctgcaattctgtatacctacagtggcctgcgtaatagacgagctgccgtttatgtgggcagcttctcctggtggaccacagaccagcagctgatccaggttattcgctctataggagtctatgatgtggtggagttgaaatttgcagagaatcgagcaaatggccagtccaaagggtatgctgaggtggtggtagcctctgaaaactctgtccacaaattgttggaactcctaccagggaaagttcttaatggagaaaaagtggacgtgaggccggccacccggcagaacctgtcacagtttgaggcacaggctcggaaacgtgagtgtgtccgagtcccaagagggggaatacctccacgggcccattcccgagattctagtgattctgctgatggacgggccacaccctctgagaaccttgtaccctcatctgctcgtgtggataagccccccagtgtgctgccctacttcaatcgtcctccttcggcccttcccctgatgggtctgcccccaccaccaattccacccccaccacctctctcctcaagctttggggtccctcctcctcctcctggtatccactaccagcatctcatgcccccacctcctcgattacctcctcatcttgctgtacctccccctggggccatcccacctgcccttcacctcaatccagccttcttccccccaccaaacgctacagtggggcctccaccagatacttacatgaaggcctctgccccctataaccaccatggcagccgagattcgggccctccaccctctacagtgagtgaagccgaatttgaagatatcatgaagcgaaacagagcaatttccagcagtgccatttccaaagcagtatctggagccagtgcaggggattacagtgacgcaattgagacgctgctcacagccattgcggttatcaaacagtcccgggttgccaatgatgagcgttgccgtgtcctcatctcctctcttaaggactgtcttcatggcatcgaagccaagtcctacagtgtgggtgccagtgggagctcttccaggaaaagacatcgctcccgggaaaggtcacctagccggtcccgggagagcagcaggaggcaccgggatctgcttcataatgaagatcggcatgatgattatttccaagaaaggaaccgggagcatgagagacaccgggatagagaacgggaccggcaccactgagaaaggagtctggttggaagcaaatgtttttttaatggacttgcatctcctcaccttgatcaggactaaaggacggaggccgccccacccccttccctttcctccaaacccctaactccctccagacacccagggaataccctctgccccacaggattgaagactgcttggcagtcctcccaatcccacacctcctgtttgccaggggaaagaacctaaagacttcgtgtgattgggaggggtggcagacaggaagaaaacatgtccaggcccctggtctccatagagaatggtgctttgtccaagaaaacgtatgagtttctgattctccgggagccgttcaatggtgaggttgatgggaagacttccttcccaaagaaaatagatcctccatgcaggatctaggagagtgactgggtgtgccaaaatatgcccagggtcctgccctcagcactagatttaatggggccaagagggtccaaaccccttgctaacataccacttctttgtttaactcctttacctttccagccctttgaggagggaccatgagaacagaaattaccttatgaaaagctacttctgttcctgctttccctctcacgtattgacggtttatttctttgacctcccagagggctgaactctttcaactctgcgctgcccagccttctcagtggacttgcccctcctaagcagagaaggcctatgaggttgcttgctgctgggaagcctggcagagccaattaccaccctctgctgcttagtgcttgggtacctcttgcaataaccagctcttagttgttccctttccctggggcttttccatttaacacatggagcccttcccccagaaggctacttccttgttttagaggaaggtactgcccattgggagatggggacattgggacctcagcaatgaagaacccttgtgaagtaaccaggaggaatggggaaagaagcaagttgggcaggatatggcctacttccataggcttttcttttttcaggtttgatgtaagcatgggcttacatcccccaggtacatacttttacttattgtgggataacctggcactagtaggcaggtaaagtcacaaatttggtgtcttttcaccttttgactgttgacttaatagctcctctcactctgcctggagatacttcctgcctcagatgaggagccagaagaaacagagcccgacttgaatgaactcagctcagagttctaaggaccagcattctgggggccattttctctacaggcaaatggaattgcttttccataacatccaaattgtaatgtggttgctgctgaaggaggaggcagcagcgaggtcctgcggtacccatggggtgatgctacttctgcatgcatctacagggcatctgacacctaacatgagacgtggcatgtgagatgagacttggcatgtgagacatagggtcactagagacccttctgggtcagaggagagagactgaattggactaaacccgtcctctgttcccagcacgtttctcatatagccctcagtcactgagggagtcccccgcaggattggagaggcacattcccttgggacagaggctacaggttggagctttttttcccctgtcccccaaccccatccccacctccacttcagaacatggcaccccacccaactggccaagtgttaagtgatgtgcttattgagagcaactccgggtgtcttttaaaatgtagagaaaaggtgacagtttaaggaaaaatatatatagaataccagaaatgccgtttacccggagaatttttttctccccatttgttttgtttttactcaatgacaccatttttagttttatttcctgatagcaaaaggaaaaaaaacacccatccctcaaaaaggccaaggtcccgtccccctgttgtcggtgatttgtttgtctttctgataggttgaaaattgtgtaataaacttgatgacgctgtcaatcttttatactgcattgtatttttttccttttgtaacaaaatatttttaaataataaatggggtgtgagctgttttatggattctgca

SEQ ID NO: 120131 - DNA, 3650 bp, Homo sapiens
  Payload ID: 3557
  Gene Symbol: CPSF7
  Gene Name: cleavage and polyadenylation specific factor 7, 59kDa
  Uniprot ID: Q8N684
  ENST ID: ENST00000394888
  CDS Start-End: 174-1589
atgccggaagtggcggtgcgtgtgacgccggcggcggggggggcgggacctggggcggagagcggttcgcgcgcttcgggcctagtccggactcgccgccgccgccgccatattcccgtggcatcttccttactttgtccatcctccggactcgcgatcttccttccggagccatgtcagaaggagtggacttgattgatatatatgctgacgaggagttcaaccaggacccagagttcaacaatacagatcagattgacctgtatgatgatgtgctgacagccacctcacagccctcagatgacagaagcagcagcactgaaccacctcctcctgttcgccaggagccatctcccaagcccaacaacaagacccctgcaattctgtatacctacagtggcctgcgtaatagacgagctgccgtttatgtgggcagcttctcctggtggaccacagaccagcagctgatccaggttattcgctctataggagtctatgatgtggtggagttgaaatttgcagagaatcgagcaaatggccagtccaaagggtatgctgaggtggtggtagcctctgaaaactctgtccacaaattgttggaactcctaccagggaaagttcttaatggagaaaaagtggacgtgaggccggccacccggcagaacctgtcacagtttgaggcacaggctcggaaacgtgagtgtgtccgagtcccaagagggggaatacctccacgggcccattcccgagattctagtgattctgctgatggacgggccacaccctctgagaaccttgtaccctcatctgctcgtgtggataagccccccagtgtgctgccctacttcaatcgtcctccttcggcccttcccctgatgggtctgcccccaccaccaattccacccccaccacctctctcctcaagctttggggtccctcctcctcctcctggtatccactaccagcatctcatgcccccacctcctcgattacctcctcatcttgctgtacctccccctggggccatcccacctgcccttcacctcaatccagccttcttccccccaccaaacgctacagtggggcctccaccagatacttacatgaaggcctctgccccctataaccaccatggcagccgagattcgggccctccaccctctacagtgagtgaagccgaatttgaagatatcatgaagcgaaacagagcaatttccagcagtgccatttccaaagcagtatctggagccagtgcaggggattacagtgacgcaattgagacgctgctcacagccattgcggttatcaaacagtcccgggttgccaatgatgagcgttgccgtgtcctcatctcctctcttaaggactgtcttcatggcatcgaagccaagtcctacagtgtgggtgccagtgggagctcttccaggaaaagacatcgctcccgggaaaggtcacctagccggtcccgggagagcagcaggaggcaccgggatctgcttcataatgaagatcggcatgatgattatttccaagaaaggaaccgggagcatgagagacaccgggatagagaacgggaccggcaccactgagaaaggagtctggttggaagcaaatgtttttttaatggacttgcatctcctcaccttgatcaggactaaaggacggaggccgccccacccccttccctttcctccaaacccctaactccctccagacacccagggaataccctctgccccacaggattgaagactgcttggcagtcctcccaatcccacacctcctgtttgccaggggaaagaacctaaagacttcgtgtgattgggaggggtggcagacaggaagaaaacatgtccaggcccctggtctccatagagaatggtgctttgtccaagaaaacgtatgagtttctgattctccgggagccgttcaatggtgaggttgatgggaagacttccttcccaaagaaaatagatcctccatgcaggatctaggagagtgactgggtgtgccaaaatatgcccagggtcctgccctcagcactagatttaatggggccaagagggtccaaaccccttgctaacataccacttctttgtttaactcctttacctttccagccctttgaggagggaccatgagaacagaaattaccttatgaaaagctacttctgttcctgctttccctctcacgtattgacggtttatttctttgacctcccagagggctgaactctttcaactctgcgctgcccagccttctcagtggacttgcccctcctaagcagagaaggcctatgaggttgcttgctgctgggaagcctggcagagccaattaccaccctctgctgcttagtgcttgggtacctcttgcaataaccagctcttagttgttccctttccctggggcttttccatttaacacatggagcccttcccccagaaggctacttccttgttttagaggaaggtactgcccattgggagatggggacattgggacctcagcaatgaagaacccttgtgaagtaaccaggaggaatggggaaagaagcaagttgggcaggatatggcctacttccataggcttttcttttttcaggtttgatgtaagcatgggcttacatcccccaggtacatacttttacttattgtgggataacctggcactagtaggcaggtaaagtcacaaatttggtgtcttttcaccttttgactgttgacttaatagctcctctcactctgcctggagatacttcctgcctcagatgaggagccagaagaaacagagcccgacttgaatgaactcagctcagagttctaaggaccagcattctgggggccattttctctacaggcaaatggaattgcttttccataacatccaaattgtaatgtggttgctgctgaaggaggaggcagcagcgaggtcctgcggtacccatggggtgatgctacttctgcatgcatctacagggcatctgacacctaacatgagacgtggcatgtgagatgagacttggcatgtgagacatagggtcactagagacccttctgggtcagaggagagagactgaattggactaaacccgtcctctgttcccagcacgtttctcatatagccctcagtcactgagggagtcccccgcaggattggagaggcacattcccttgggacagaggctacaggttggagctttttttcccctgtcccccaaccccatccccacctccacttcagaacatggcaccccacccaactggccaagtgttaagtgatgtgcttattgagagcaactccgggtgtcttttaaaatgtagagaaaaggtgacagtttaaggaaaaatatatatagaataccagaaatgccgtttacccggagaatttttttctccccatttgttttgtttttactcaatgacaccatttttagttttatttcctgatagcaaaaggaaaaaaaacacccatccctcaaaaaggccaaggtcccgtccccctgttgtcggtgatttgtttgtctttctgataggttgaaaattgtgtaataaacttgatgacgctgtcaatcttttatactgcattgtatttttttccttttgtaacaaaatatttttaaataataaatggggtgtgagctgttttatgg

SEQ ID NO: 120132 - DNA, 574 bp, Homo sapiens
  Payload ID: 3557
  Gene Symbol: CPSF7
  Gene Name: cleavage and polyadenylation specific factor 7, 59kDa
  ENST ID: ENST00000450000
  CDS Start-End: 138-574
atattcccggtaacgggggcgcgcggtcgggggcaggttgggccggaagaggggtccgggccggcactgaggcgggaaggggtggcatcttccttactttgtccatcctccggactcgcgatcttccttccggagccatgtcagaaggagtggacttgattgatatatatgctgacgaggagttcaaccaggacccagagttcaacaatacagatcagattgacctgtatgatgatgtgctgacagccacctcacagccctcagatgacagaagcagcagcactgaaccacctcctcctgttcgccaggagccatctcccaagcccaacaacaagacccctgcaattctgtatacctacagtggcctgcgtaatagacgagctgccgtttatgtgggcagcttctcctggtggaccacagaccagcagctgatccaggttattcgctctataggagtctatgatgtggtggagttgaaatttgcagagaatcgagcaaatggccagtccaaagggtatgctgaggtggtggtagcctctgaaaactctgtccacaaattgttggaactcctacc

SEQ ID NO: 120133 - DNA, 567 bp, Homo sapiens
  Payload ID: 3557
  Gene Symbol: CPSF7
  Gene Name: cleavage and polyadenylation specific factor 7, 59kDa
  ENST ID: ENST00000449811
  CDS Start-End: 137-567
gagtaggcctgggttgggggcagaggcggctggagctgcttgacacctgggggctctggccggagccgccttgggggctagtggcatcttccttactttgtccatcctccggactcgcgatcttccttccggagccatgtcagaaggagtggacttgattgatatatatgctgacgaggagttcaaccaggacccagagttcaacaatacagatcagattgacctgtatgatgatgtgctgacagccacctcacagccctcagatgacagaagcagcagcactgaaccacctcctcctgttcgccaggagccatctcccaagcccaacaacaagacccctgcaattctgtatacctacagtggcctgcgtaatagacgagctgccgtttatgtgggcagcttctcctggtggaccacagaccagcagctgatccaggttattcgctctataggagtctatgatgtggtggagttgaaatttgcagagaatcgagcaaatggccagtccaaagggtatgctgaggtggtggtagcctctgaaaactctgtccacaaattgttggaact

SEQ ID NO: 120134 - DNA, 727 bp, Homo sapiens
  Payload ID: 3557
  Gene Symbol: CPSF7
  Gene Name: cleavage and polyadenylation specific factor 7, 59kDa
  ENST ID: ENST00000413232
  CDS Start-End: 114-727
ctgcgggcggagggagtcgcgggccttttgagggaggaggcagagcgcgccgggccggtggcatcttccttactttgtccatcctccggactcgcgatcttccttccggagccatgtcagaaggagtggacttgattgatatatatgctgacgaggagttcaaccaggacccagagttcaacaatacagatcagattgacctgtatgatgatgtgctgacagccacctcacagccctcagatgacagaagcagcagcactgaaccacctcctcctgttcgccaggagccatctcccaagcccaacaacaagacccctgcaattctgtatacctacagtggcctgcgtaatagacgagctgccgtttatgtgggcagcttctcctggtggaccacagaccagcagctgatccaggttattcgctctataggagtctatgatgtggtggagttgaaatttgcagagaatcgagcaaatggccagtccaaagggtatgctgaggtggtggtagcctctgaaaactctgtccacaaattgttggaactcctaccagggaaagttcttaatggagaaaaagtggacgtgaggccggccacccggcagaacctgtcacagtttgaggcacaggctcggaaacgaatacctccacgggcccattcccgagattctagtgattctgctgatggacgggccacaccctctgagaaccttgtaccctcatctgctcg

SEQ ID NO: 120135 - DNA, 3524 bp, Homo sapiens
  Payload ID: 3557
  Gene Symbol: CPSF7
  Gene Name: cleavage and polyadenylation specific factor 7, 59kDa
  Uniprot ID: Q8N684
  ENST ID: ENST00000439958
  CDS Start-End: 157-1545
gcgtgtgacgccggcggcggggggggcgggacctggggcggagagcggttcgcgcgcttcgggcctagtccggactcgccgccgccgccgccatattcccgtggcatcttccttactttgtccatcctccggactcgcgatcttccttccggagccatgtcagaaggagtggacttgattgatatatatgctgacgaggagttcaaccaggacccagagttcaacaatacagatcagattgacctgtatgatgatgtgctgacagccacctcacagccctcagatgacagaagcagcagcactgaaccacctcctcctgttcgccaggagccatctcccaagcccaacaacaagacccctgcaattctgtatacctacagtggcctgcgtaatagacgagctgccgtttatgtgggcagcttctcctggtggaccacagaccagcagctgatccaggttattcgctctataggagtctatgatgtggtggagttgaaatttgcagagaatcgagcaaatggccagtccaaagggtatgctgaggtggtggtagcctctgaaaactctgtccacaaattgttggaactcctaccagggaaagttcttaatggagaaaaagtggacgtgaggccggccacccggcagaacctgtcacagtttgaggcacaggctcggaaacgaatacctccacgggcccattcccgagattctagtgattctgctgatggacgggccacaccctctgagaaccttgtaccctcatctgctcgtgtggataagccccccagtgtgctgccctacttcaatcgtcctccttcggcccttcccctgatgggtctgcccccaccaccaattccacccccaccacctctctcctcaagctttggggtccctcctcctcctcctggtatccactaccagcatctcatgcccccacctcctcgattacctcctcatcttgctgtacctccccctggggccatcccacctgcccttcacctcaatccagccttcttccccccaccaaacgctacagtggggcctccaccagatacttacatgaaggcctctgccccctataaccaccatggcagccgagattcgggccctccaccctctacagtgagtgaagccgaatttgaagatatcatgaagcgaaacagagcaatttccagcagtgccatttccaaagcagtatctggagccagtgcaggggattacagtgacgcaattgagacgctgctcacagccattgcggttatcaaacagtcccgggttgccaatgatgagcgttgccgtgtcctcatctcctctcttaaggactgtcttcatggcatcgaagccaagtcctacagtgtgggtgccagtgggagctcttccaggaaaagacatcgctcccgggaaaggtcacctagccggtcccgggagagcagcaggaggcaccgggatctgcttcataatgaagatcggcatgatgattatttccaagaaaggaaccgggagcatgagagacaccgggatagagaacgggaccggcaccactgagaaaggagtctggttggaagcaaatgtttttttaatggacttgcatctcctcaccttgatcaggactaaaggacggaggccgccccacccccttccctttcctccaaacccctaactccctccagacacccagggaataccctctgccccacaggattgaagactgcttggcagtcctcccaatcccacacctcctgtttgccaggggaaagaacctaaagacttcgtgtgattgggaggggtggcagacaggaagaaaacatgtccaggcccctggtctccatagagaatggtgctttgtccaagaaaacgtatgagtttctgattctccgggagccgttcaatggtgaggttgatgggaagacttccttcccaaagaaaatagatcctccatgcaggatctaggagagtgactgggtgtgccaaaatatgcccagggtcctgccctcagcactagatttaatggggccaagagggtccaaaccccttgctaacataccacttctttgtttaactcctttacctttccagccctttgaggagggaccatgagaacagaaattaccttatgaaaagctacttctgttcctgctttccctctcacgtattgacggtttatttctttgacctcccagagggctgaactctttcaactctgcgctgcccagccttctcagtggacttgcccctcctaagcagagaaggcctatgaggttgcttgctgctgggaagcctggcagagccaattaccaccctctgctgcttagtgcttgggtacctcttgcaataaccagctcttagttgttccctttccctggggcttttccatttaacacatggagcccttcccccagaaggctacttccttgttttagaggaaggtactgcccattgggagatggggacattgggacctcagcaatgaagaacccttgtgaagtaaccaggaggaatggggaaagaagcaagttgggcaggatatggcctacttccataggcttttcttttttcaggtttgatgtaagcatgggcttacatcccccaggtacatacttttacttattgtgggataacctggcactagtaggcaggtaaagtcacaaatttggtgtcttttcaccttttgactgttgacttaatagctcctctcactctgcctggagatacttcctgcctcagatgaggagccagaagaaacagagcccgacttgaatgaactcagctcagagttctaaggaccagcattctgggggccattttctctacaggcaaatggaattgcttttccataacatccaaattgtaatgtggttgctgctgaaggaggaggcagcagcgaggtcctgcggtacccatggggtgatgctacttctgcatgcatctacagggcatctgacacctaacatgagacgtggcatgtgagatgagacttggcatgtgagacatagggtcactagagacccttctgggtcagaggagagagactgaattggactaaacccgtcctctgttcccagcacgtttctcatatagccctcagtcactgagggagtcccccgcaggattggagaggcacattcccttgggacagaggctacaggttggagctttttttcccctgtcccccaaccccatccccacctccacttcagaacatggcaccccacccaactggccaagtgttaagtgatgtgcttattgagagcaactccgggtgtcttttaaaatgtagagaaaaggtgacagtttaaggaaaaatatatatagaataccagaaatgccgtttacccggagaatttttttctccccatttgttttgtttttactcaatgacaccatttttagttttatttcctgatagcaaaaggaaaaaaaacacccatccctcaaaaaggccaaggtcccgtccccctgttgtcggtgatttgtttgtctttctgataggttgaaaattgtgtaataaacttgatgacgctgtc

SEQ ID NO: 120136 - DNA, 1749 bp, Homo sapiens
  Payload ID: 3557
  Gene Symbol: CPSF7
  Gene Name: cleavage and polyadenylation specific factor 7, 59kDa
  Uniprot ID: Q8N684
  ENST ID: ENST00000448745
  CDS Start-End: 70-1458
tccgaatcccgcagtggcatcttccttactttgtccatcctccggactcgcgatcttccttccggagccatgtcagaaggagtggacttgattgatatatatgctgacgaggagttcaaccaggacccagagttcaacaatacagatcagattgacctgtatgatgatgtgctgacagccacctcacagccctcagatgacagaagcagcagcactgaaccacctcctcctgttcgccaggagccatctcccaagcccaacaacaagacccctgcaattctgtatacctacagtggcctgcgtaatagacgagctgccgtttatgtgggcagcttctcctggtggaccacagaccagcagctgatccaggttattcgctctataggagtctatgatgtggtggagttgaaatttgcagagaatcgagcaaatggccagtccaaagggtatgctgaggtggtggtagcctctgaaaactctgtccacaaattgttggaactcctaccagggaaagttcttaatggagaaaaagtggacgtgaggccggccacccggcagaacctgtcacagtttgaggcacaggctcggaaacgaatacctccacgggcccattcccgagattctagtgattctgctgatggacgggccacaccctctgagaaccttgtaccctcatctgctcgtgtggataagccccccagtgtgctgccctacttcaatcgtcctccttcggcccttcccctgatgggtctgcccccaccaccaattccacccccaccacctctctcctcaagctttggggtccctcctcctcctcctggtatccactaccagcatctcatgcccccacctcctcgattacctcctcatcttgctgtacctccccctggggccatcccacctgcccttcacctcaatccagccttcttccccccaccaaacgctacagtggggcctccaccagatacttacatgaaggcctctgccccctataaccaccatggcagccgagattcgggccctccaccctctacagtgagtgaagccgaatttgaagatatcatgaagcgaaacagagcaatttccagcagtgccatttccaaagcagtatctggagccagtgcaggggattacagtgacgcaattgagacgctgctcacagccattgcggttatcaaacagtcccgggttgccaatgatgagcgttgccgtgtcctcatctcctctcttaaggactgtcttcatggcatcgaagccaagtcctacagtgtgggtgccagtgggagctcttccaggaaaagacatcgctcccgggaaaggtcacctagccggtcccgggagagcagcaggaggcaccgggatctgcttcataatgaagatcggcatgatgattatttccaagaaaggaaccgggagcatgagagacaccgggatagagaacgggaccggcaccactgagaaaggagtctggttggaagcaaatgtttttttaatggacttgcatctcctcaccttgatcaggactaaaggacggaggccgccccacccccttccctttcctccaaacccctaactccctccagacacccagggaataccctctgccccacaggattgaagactgcttggcagtcctcccaatcccacacctcctgtttgccaggggaaagaacctaaagacttcgtgtgattgggaggggtggcagacaggaagaaaacatgtccaggcccctggtctccatagagaat

SEQ ID NO: 120137 - DNA, 571 bp, Homo sapiens
  Payload ID: 3557
  Gene Symbol: CPSF7
  Gene Name: cleavage and polyadenylation specific factor 7, 59kDa
  ENST ID: ENST00000413184
  CDS Start-End: 157-571
gacttttccgtcgcgccataggcagctgcggcgcagacgcggcgctacccgggtcgggcccgagggtgatgggcagcgacccccggcggcctgggagagcgtggcatcttccttactttgtccatcctccggactcgcgatcttccttccggagccatgtcagaaggagtggacttgattgatatatatgctgacgaggagttcaaccaggacccagagttcaacaatacagatcagattgacctgtatgatgatgtgctgacagccacctcacagccctcagatgacagaagcagcagcactgaaccacctcctcctgttcgccaggagccatctcccaagcccaacaacaagacccctgcaattctgtatacctacagtggcctgcgtaatagacgagctgccgtttatgtgggcagcttctcctggtggaccacagaccagcagctgatccaggttattcgctctataggagtctatgatgtggtggagttgaaatttgcagagaatcgagcaaatggccagtccaaagggtatgctgaggtggtggtagcctctgaaaactctgtcc

SEQ ID NO: 120138 - DNA, 598 bp, Homo sapiens
  Payload ID: 3557
  Gene Symbol: CPSF7
  Gene Name: cleavage and polyadenylation specific factor 7, 59kDa
  ENST ID: ENST00000536548
  CDS Start-End: 92-397
atattcccggtaacgggggcgcgcggtcgggggcagtggcatcttccttactttgtccatcctccggactcgcgatcttccttccggagccatgtcagaaggagtggacttgattgatatatatgctgacgaggagttcaaccaggacccagagttcaacaatacagatcagattgacctgtatgatgatgtgctgacagccacctcacagccctcagatgacagaagcagcagcactgaaccacctcctcctgttcgccaggagccatctcccaagcccaacaacaagacccctgcaattctgtatacctacagtggcctgcgtaatagacgagctgccgtttatgtgggcagcttctcctgggttggattgatctctgaaagagaactatcctgaggacgtactggtgccgaagaaagcaatgattaatggaccacagaccagcagctgatccaggttattcgctctataggagtctatgatgtggtggagttgaaatttgcagagaatcgagcaaatggccagtccaaagggtatgctgaggtggtggtagcctctgaaaactctgtccacaaattgttggaactcctaccaggg

SEQ ID NO: 120139 - DNA, 722 bp, Homo sapiens
  Payload ID: 3557
  Gene Symbol: CPSF7
  Gene Name: cleavage and polyadenylation specific factor 7, 59kDa
  ENST ID: ENST00000544585
  CDS Start-End: 65-722
atattcccgtggcatcttccttactttgtccatcctccggactcgcgatcttccttccggagccatgtcagaaggagtggacttgattgatatatatgctgacgaggagttcaaccaggacccagagttcaacaatacagatcagattgacctgtatgatgatgtgctgacagccacctcacagccctcagatgacagaagcagcagcactgaaccacctcctcctgttcgccaggagccatctcccaagcccaacaacaagacccctgcaattctgtatacctacagtggcctgcgtaatagacgagctgccgtttatgtgggcagcttctcctggtggaccacagaccagcagctgatccaggttattcgctctataggagtctatgatgtggtggagttgaaatttgcagagaatcgagcaaatggccagtccaaagggtatgctgaggtggtggtagcctctgaaaactctgtccacaaattgttggaactcctaccagggaaagttcttaatggagaaaaagtggacgtgaggccggccacccggcagaacctgtcacagtttgaggcacaggctcggaaacgaatacctccacgggcccattcccgagattctagtgattctgctgatggacgggccacaccctctgagaaccttgtaccctcatctgctcgtgtggataagccccccagtgtgctgccctacttcaatcgtcctc

SEQ ID NO: 120140 - DNA, 546 bp, Homo sapiens
  Payload ID: 3557
  Gene Symbol: CPSF7
  Gene Name: cleavage and polyadenylation specific factor 7, 59kDa
  ENST ID: ENST00000536145
  CDS Start-End: 56-361
tggcatcttccttactttgtccatcctccggactcgcgatcttccttccggagccatgtcagaaggagtggacttgattgatatatatgctgacgaggagttcaaccaggacccagagttcaacaatacagatcagattgacctgtatgatgatgtgctgacagccacctcacagccctcagatgacagaagcagcagcactgaaccacctcctcctgttcgccaggagccatctcccaagcccaacaacaagacccctgcaattctgtatacctacagtggcctgcgtaatagacgagctgccgtttatgtgggcagcttctcctggcagggtcatctgagggacgagatttcagagtgaacaccttgaactcttggtggtcattagatggtcctgtgataatgtggaccacagaccagcagctgatccaggttattcgctctataggagtctatgatgtggtggagttgaaatttgcagagaatcgagcaaatggccagtccaaagggtatgctgaggtggtggtagcctctgaaaactctgtc

SEQ ID NO: 120141 - DNA, 1234 bp, Homo sapiens
  Payload ID: 3557
  Gene Symbol: CPSF7
  Gene Name: cleavage and polyadenylation specific factor 7, 59kDa
  ENST ID: ENST00000477890
  CDS Start-End: 111-1234
ggttcgcgcgcttcgggcctagtccggactcgccgccgccgccgccatattcccgtggcatcttccttactttgtccatcctccggactcgcgatcttccttccggagccatgtcagaaggagtggacttgattgatatatatgctgacgaggagttcaaccaggacccagagttcaacaatacagatcagattgacctgtatgatgatgtgctgacagccacctcacagccctcagatgacagaagcagcagcactgaaccacctcctcctgttcgccaggagccatctcccaagcccaacaacaagacccctgcaattctgtatacctacagtggcctgcgtaatagacgagctgccgtttatgtgggcagcttctcctggtggaccacagaccagcagctgatccaggttattcgctctataggagtctatgatgtggtggagttgaaatttgcagagaatcgagcaaatggccagtccaaagggtatgctgaggtggtggtagcctctgaaaactctgtccacaaattgttggaactcctaccagggaaagttcttaatggagaaaaagtggacgtgaggccggccacccggcagaacctgtcacagtttgaggcacaggctcggaaacgaatacctccacgggcccattcccgagattctagtgattctgctgatggacgggccacaccctctgagaaccttgtaccctcatctgctcgtgtggataagccccccagtgtgctgccctacttcaatcgtcctccttcggcccttcccctgatggtggggcctccaccagatacttacatgaaggcctctgccccctataaccaccatggcagccgagattcgggccctccaccctctacagtgagtgaagccgaatttgaagatatcatgaagcgaaacagagcaatttccagcagtgccatttccaaagcagtatctggagccagtgcaggggattacagtgacgcaattgagacgctgctcacagccattgcggttatcaaacagtcccgggttgccaatgatgagcgttgccgtgtcctcatctcctctcttaaggactgtcttcatggcatcgaagccaagtcctacagtgtgggtgccagtgggagctcttccaggaaaagacatcgctcccgggaaaggtcacctagccggtcccgggagagcagcaggaggcaccgggatctgcttcataatgaagatcggcatgatgatta

SEQ ID NO: 120142 - DNA, 953 bp, Homo sapiens
  Payload ID: 3557
  Gene Symbol: CPSF7
  Gene Name: cleavage and polyadenylation specific factor 7, 59kDa
  ENST ID: ENST00000539952
  CDS Start-End: 90-953
attcccggtaacgggggcgcgcggtcgggggcagtggcatcttccttactttgtccatcctccggactcgcgatcttccttccggagccatgtcagaaggagtggacttgattgatatatatgctgacgaggagttcaaccaggacccagagttcaacaatacagatcagattgacctgtatgatgatgtgctgacagccacctcacagccctcagatgacagaagcagcagcactgaaccacctcctcctgttcgccaggagccatctcccaagcccaacaacaagacccctgcaattctgtatacctacagtggcctgcgtaatagacgagctgccgtttatgtgggcagcttctcctggtggaccacagaccagcagctgatccaggttattcgctctataggagtctatgatgtggtggagttgaaatttgcagagaatcgagcaaatggccagtccaaagggtatgctgaggtggtggtagcctctgaaaactctgtccacaaattgttggaactcctaccagggaaagttcttaatggagaaaaagtggacgtgaggccggccacccggcagaacctgtcacagtttgaggcacaggctcggaaacgaatacctccacgggcccattcccgagattctagtgattctgctgatggacgggccacaccctctgagaaccttgtaccctcatctgctcgtgtggataagccccccagtgtgctgccctacttcaatcgtcctccttcggcccttcccctgatgggtctgcccccaccaccaattccacccccaccacctctctcctcaagctttggggtccctcctcctcctcctggtatccactaccagcatctcatgcccccacctcctcgattacctcctcatcttgctgtacctccccctggggccatcccacctgcccttcacctcaatccagccttcttcccc

SEQ ID NO: 120143 - DNA, 646 bp, Homo sapiens
  Payload ID: 3557
  Gene Symbol: CPSF7
  Gene Name: cleavage and polyadenylation specific factor 7, 59kDa
  ENST ID: ENST00000544990
  CDS Start-End: 50-358
cttccttactttgtccatcctccggactcgcgatcttccttccggagccatgtcagaaggagtggacttgattgatatatatgctgacgaggagttcaaccaggacccagagttcaacaatacagatcagattgacctgtatgatgatgtgctgacagccacctcacagccctcagatgacagaagcagcagcactgaaccacctcctcctgttcgccaggagccatctcccaagcccaacaacaagacccctgcaattctgtatacctacagtggcctgcgtaatagacgagctgccgtttatgtgggcagcttctcctggtggaccacagaccagcagctgatccaggtatgctgaggtggtggtagcctctgaaaactctgtccacaaattgttggaactcctaccagggaaagttcttaatggagaaaaagtggacgtgaggccggccacccggcagaacctgtcacagtttgaggcacaggctcggaaacgaatacctccacgggcccattcccgagattctagtgattctgctgatggacgggccacaccctctgagaaccttgtaccctcatctgctcgtgtggataagccccccagtgtgctgccctacttcaatcgtcctccttcggcccttcccct

SEQ ID NO: 120144 - DNA, 801 bp, Homo sapiens
  Payload ID: 3557
  Gene Symbol: CPSF7
  Gene Name: cleavage and polyadenylation specific factor 7, 59kDa
  ENST ID: ENST00000537162
  CDS Start-End: 131-436
cgggacctggggcggagagcggttcgcgcgcttcgggcctagtccggactcgccgccgccgccgccatattcccgtggcatcttccttactttgtccatcctccggactcgcgatcttccttccggagccatgtcagaaggagtggacttgattgatatatatgctgacgaggagttcaaccaggacccagagttcaacaatacagatcagattgacctgtatgatgatgtgctgacagccacctcacagccctcagatgacagaagcagcagcactgaaccacctcctcctgttcgccaggagccatctcccaagcccaacaacaagacccctgcaattctgtatacctacagtggcctgcgtaatagacgagctgccgtttatgtgggcagcttctcctgggttggattgatctctgaaagagaactatcctgaggacgtactggtgccgaagaaagcaatgattaatggaccacagaccagcagctgatccaggttattcgctctataggagtctatgatgtggtggagttgaaatttgcagagaatcgagcaaatggccagtccaaagggtatgctgaggtggtggtagcctctgaaaactctgtccacaaattgttggaactcctaccagggaaagttcttaatggagaaaaagtggacgtgaggccggccacccggcagaacctgtcacagtttgaggcacaggctcggaaacgtgagtgtgtccgagtcccaagagggggaatacctccacgggcccattcccgagattctagtgattctgctgatggacgggc

SEQ ID NO: 120145 - DNA, 495 bp, Homo sapiens
  Payload ID: 3557
  Gene Symbol: CPSF7
  Gene Name: cleavage and polyadenylation specific factor 7, 59kDa
  ENST ID: ENST00000543545
  CDS Start-End: 30-311
tccggactcgcgatcttccttccggagccatgtcagaaggagtggacttgattgatatatatgctgacgaggagttcaaccaggacccagagttcaacaatacagatcagattgacctgtatgatgatgtgctgacagccacctcacagccctcagatgacagaagcagcagcactgaaccacctcctcctgttcgccaggagccatctcccaagcccaacaacaagacccctgcaattctgtatacctacagtggcctgcgtaatagacgagctgccgtttatgtgggcagcttctcctgggtatgctgaggtggtggtagcctctgaaaactctgtccacaaattgttggaactcctaccagggaaagttcttaatggagaaaaagtggacgtgaggccggccacccggcagaacctgtcacagtttgaggcacaggctcggaaacgtgagtgtgtccgagtcccaagagggggaatacctccacgggcccat

SEQ ID NO: 120146 - DNA, 940 bp, Homo sapiens
  Payload ID: 3557
  Gene Symbol: CPSF7
  Gene Name: cleavage and polyadenylation specific factor 7, 59kDa
  ENST ID: ENST00000535222
  CDS Start-End: 121-423
ggcggagagcggttcgcgcgcttcgggcctagtccggactcgccgccgccgccgccatattcccgtggcatcttccttactttgtccatcctccggactcgcgatcttccttccggagccatgtcagaaggagtggacttgattgatatatatgctgacgaggagttcaaccaggacccagagttcaacaatacagatcagattgacctgtatgatgatgtgctgacagccacctcacagccctcagatgacagaagcagcagcactgaaccacctcctcctgttcgccaggagccatctcccaagcccaacaacaagacccctgcaattctgtatacctacagtggcctgcgtaatagacgagctgccgtttatgtgggcagcttctcctggggtcatctgagggacgagatttcagagtgaacaccttgaactcttggtggtcattagatggtcctgtgataatgtggaccacagaccagcagctgatccaggttattcgctctataggagtctatgatgtggtggagttgaaatttgcagagaatcgagcaaatggccagtccaaagggtatgctgaggtggtggtagcctctgaaaactctgtccacaaattgttggaactcctaccagggaaagttcttaatggagaaaaagtggacgtgaggccggccacccggcagaacctgtcacagtttgaggcacaggctcggaaacgaatacctccacgggcccattcccgagattctagtgattctgctgatggacgggccacaccctctgagaaccttgtaccctcatctgctcgtgtggataagccccccagtgtgctgccctacttcaatcgtcctccttcggcccttcccctgatgggtctgcccccaccaccaattccacccccaccacctctctcctcaagctttggggtccctcctcctcc

SEQ ID NO: 120147 - DNA, 549 bp, Homo sapiens
  Payload ID: 3557
  Gene Symbol: CPSF7
  Gene Name: cleavage and polyadenylation specific factor 7, 59kDa
  ENST ID: ENST00000541963
  CDS Start-End: 91-387
agtccggactcgccgccgccgccgccatattcccgtggcatcttccttactttgtccatcctccggactcgcgatcttccttccggagccatgtcagaaggagtggacttgattgatatatatgctgacgaggagttcaaccaggacccagagttcaacaatacagatcagattgacctgtatgatgatgtgctgacagccacctcacagccctcagatgacagaagcagcagcactgaaccacctcctcctgttcgccaggagccatctcccaagcccaacaacaagacccctgcaattctgtatacctacagtggcctgcgtaatagacgagctgccgtttatgtgggcagcttctcctgggagtctatgatgtggtggagttgaaatttgcagagaatcgagcaaatggccagtccaaagggtatgctgaggtggtggtagcctctgaaaactctgtccacaaattgttggaactcctaccagggaaagttcttaatggagaaaaagtggacgtgaggccggccacccggcagaacctgtcacagt

SEQ ID NO: 120148 - DNA, 306 bp, Homo sapiens
  Payload ID: 3557
  Gene Symbol: CPSF7
  Gene Name: cleavage and polyadenylation specific factor 7, 59kDa
  ENST ID: ENST00000626926
  CDS Start-End: 1-306
atgtcagaaggagtggacttgattgatatatatgctgacgaggagttcaaccaggacccagagttcaacaatacagatcagattgacctgtatgatgatgtgctgacagccacctcacagccctcagatgacagaagcagcagcactgaaccacctcctcctgttcgccaggagccatctcccaagcccaacaacaagacccctgcaattctgtatacctacagtggcctgcgtaatagacgagctgccgtttatgtgggcagcttctcctgggttggattgatctctgaaagagaactatcctga

SEQ ID NO: 120149 - DNA, 4290 bp, Homo sapiens
  Payload ID: 3558
  Gene Symbol: CSTF1
  Gene Name: cleavage stimulation factor, 3' pre-RNA, subunit 1, 50kDa
  Uniprot ID: Q05048
  ENST ID: ENST00000217109
  CDS Start-End: 353-1648
aacggccagccagacctgtggcagtcccagccccagggtgctctccgcggtcggccatttatcggtgaagcaacagccccttgacgtcaagcttgacgcattggagataaagtccaaggaggtgaactaacctttgaacgtgccagtaagtaagatggcgagaaaagcaagagagagtgggaccgatcgatagcgcagcggtcggcttggcgccctttcagcgtgcgcagtgaacgtgcgctcggagcggtagattgggcaggattcgcgcctccatttttccaggagagagcgggataccaagagaaccggaccagctgctggcagggaaactgtcttccttttctccaagatgtacagaaccaaagtgggcttgaaggaccgccagcagctctacaagctgatcattagccagctgctatatgacggctacatcagcatcgccaatggcctcatcaatgaaatcaagcctcagtctgtgtgtgcaccctcggagcagctcctgcatctcatcaaactcggaatggaaaacgatgacaccgcagttcagtatgcaattggtcgttcagatactgttgcccctggcacagggattgacctggaatttgatgcagatgttcagactatgtccccagaggcttctgagtacgaaacatgctatgtcacatcacataaaggaccatgccgtgtagctacctatagtagagatggacagttaatagctactgggtctgctgatgcttcgataaagatacttgacacagagaggatgttggccaaaagtgccatgccaatagaggtcatgatgaatgagaccgcacaacaaaatatggaaaaccacccagtgattcgaactctttatgaccatgtggatgaagtcacgtgccttgctttccacccaacagaacagatcctggcttctggttcaagggattatactcttaaattatttgattattccaaaccatcagcaaaaagagccttcaaatacattcaggaagctgaaatgttacgttccatctcttttcatccttctggagactttatacttgtcggaactcagcatcctactcttcgcctttatgatatcaacacctttcaatgttttgtctcttgcaatcctcaagatcaacacaccgatgctatatgttccgttaattacaattctagtgccaatatgtacgtaactggaagcaaggacggctgcatcaaattatgggatggtgtttcaaatcgatgcatcacaacttttgagaaagcacatgacggtgctgaagtttgttctgccattttttccaaaaattctaaatacattctctcaagtggaaaagactctgtagctaaactttgggaaatatcaacgggacgaacactggtcagatacacgggcgcgggtttaagtggacgccaggtgcaccggacacaggctgtgtttaaccacaccgaggactatgtgttgctgcccgacgagaggacgatcagtctttgctgctgggactcgaggacagccgagcggagaaacctgctgtcgttggggcacaacaatattgtacgctgcatagtgcactcccccaccaaccccgggttcatgacgtgcagcgatgacttcagagcgcggttttggtaccggagatcgaccactgactgagccaccctctccgtagggttctttctcgaggactctaccctcctcccccacgtcctgtctcagctgcagtcgtaagtccgtgcaccatccttgacgttttgctgccacctctgtccacattcttcttggatttgtataaaagaatctttttttaccttgatgtagaatcatggtggaaaaagttggaaacacagatctgtgcagttctacattcactgattattacagtgtgattttcatcggttttgtaagtacaggacttgccgtttcttttgatctcttgattgaaggaggatagggcattaaagtgcttttgacatgaggaattttcatttggttcttctgtcaactttcttgcttattctgctgaaccctctgtgtatttcccttccaggtatatttgaacagataagcaggcatgcagctctgagactcctgagttttatgccattatcaaaagcattttcaagaatccctcaattctatcctgaaatgatgttattctgataataaagctcagatctgcaactttattgttatatatttttcacttctgtaaaattaatggccagtttttcctgacaatttataggaacagtatctttcaacatactccctacattatccttcaatatctgcaatacttgtctttagtaactgtatttctggtaagattatgatttcatgagaaacaattgaaaatatatccgatctaattaaattaggtcagcctgctattgctctcaggtgttgcctgtcttcacgaatgattagtatcgattgacctctttcttaggtggttttaagtcttcagttctcgtcagcatgaactaacttctcatcatggaggcacatagtaactgcattctcagaagatttatgcagttaaccaattgatacaagttttctttttcttgaatttttttttttttaattgaggcacagtcttgctctgtcacccaggttggagtgcagtggcgtgatctcagctcactgcaagctccgcctcctggtttcacaccattttcctgcctcagcctcccaagtagctgggactacaggcacccaccaccacgcccggctaattttttttttttttttttttttttttgtatttttagtagagccagggtttcaccatgttagccaggatggtctctatctcctgacctcgtgatccgcctgcctcagcctcccaaagttttgggattacaggcgtgagccaccgcgcccagccttcctgaagctttttagaacatgacagtacttctctggattcagcactagcagagtcagagaactctgaactccccttgtacaaacataaactttgctttatatttatcccaaaaaacaaataccttatgatctgcataggagtacctagaaatataatctgggatcatttgataaaaatagtaaatagattgaagtaaaagtcattgctttatattataggaagttttgttttgttttgttttgtttgttttgtttttgagacggagtttcgctcttgtcccccaggctttagtgcaatggcgcgatctcggctcaccgcagcctccgccacctgggttcaaacgattctcctgcctcaggctcccgagtaactaggattacaggcgtgcgccaccatgcccggctaattttgtattttttttagtagagacggggtttctccatgttggtcaggctggtctcgaactcccaacctcaggtaatccgcccgcctcagcctcccaaagtgctaggattacaggcgtgagccaccacgcgcggccccatcatacgaagttactgaagttattgcgtaaacattctgttttagtcatccttgaggatcgttttaactccttgatctgtaaaactgtcttaagcatcttaacatgttacatcacagggttttagctcagatttccaaagagccatattttttgatgcatatttccagttgaattccagtgtgaatttccagttgtactttgcattctgattctttgatatttgaacttggccatctgtgggtgctactctcgtaagactaaaaggcacctactaaatacgaacaaggataaccagttctaccaaaaacattaccaaccaaacctcccctgttcttttttcagactttccttttgctttcaacctcttaaactgtaaaggagagatttaatgtttccctattattctgctttgactcacatactaaaatgaccacatggcactccattgaatcttttcagttgttcacgaattaaaataatgcccatgttttacagtttttcgagtagtctcagcaatggatctgtagtttcaggacctgtttttaaaagatcaagatacttttatgtgtttcagaagtagctgttttttcattttttgtgggtttgttttttttgtgtttgtttggttggttggtttttggtttttttgctttttaaaggtcacagtgttgtgagcctggtgtaaatgccaggaatattatatggacttagtatctgcatctcgttaattgtaccacacaacactctgccattcaaataatgaatatctggtcaggatacgaacttataccctctgtgtgttttttttttttaagatacgtgatttctgaaataaactttatatacaatgataagcta

SEQ ID NO: 120150 - DNA, 1236 bp, Homo sapiens
  Payload ID: 3558
  Gene Symbol: CSTF1
  Gene Name: cleavage stimulation factor, 3' pre-RNA, subunit 1, 50kDa
  ENST ID: ENST00000415828
  CDS Start-End: 201-1236
aagaacccggaagtggtggagccaacggccagccagacctgtggcagtcccagccccagggtgctctccgcggtcggccatttatcggtgaagcaacagccccttgacgtcaagcttgacgcattggagataaagtccaaggaggtgaactaacctttgaacgtgccactggcagggaaactgtcttccttttctccaagatgtacagaaccaaagtgggcttgaaggaccgccagcagctctacaagctgatcattagccagctgctatatgacggctacatcagcatcgccaatggcctcatcaatgaaatcaagcctcagtctgtgtgtgcaccctcggagcagctcctgcatctcatcaaactcggaatggaaaacgatgacaccgcagttcagtatgcaattggtcgttcagatactgttgcccctggcacagggattgacctggaatttgatgcagatgttcagactatgtccccagaggcttctgagtacgaaacatgctatgtcacatcacataaaggaccatgccgtgtagctacctatagtagagatggacagttaatagctactgggtctgctgatgcttcgataaagatacttgacacagagaggatgttggccaaaagtgccatgccaatagaggtcatgatgaatgagaccgcacaacaaaatatggaaaaccacccagtgattcgaactctttatgaccatgtggatgaagtcacgtgccttgctttccacccaacagaacagatcctggcttctggttcaagggattatactcttaaattatttgattattccaaaccatcagcaaaaagagccttcaaatacattcaggaagctgaaatgttacgttccatctcttttcatccttctggagactttatacttgtcggaactcagcatcctactcttcgcctttatgatatcaacacctttcaatgttttgtctcttgcaatcctcaagatcaacacaccgatgctatatgttccgttaattacaattctagtgccaatatgtacgtaactggaagcaaggacggctgcatcaaattatgggatggtgtttcaaatcgatgcatcacaacttttgagaaagcacatgacggtgctgaagtttgttctgccattttttccaaaaattctaaatacattctctcaagtggaaaagactctgtagctaaactttgggaaatatcaacgggacgaacactggtcagatacacgg

SEQ ID NO: 120151 - DNA, 554 bp, Homo sapiens
  Payload ID: 3558
  Gene Symbol: CSTF1
  Gene Name: cleavage stimulation factor, 3' pre-RNA, subunit 1, 50kDa
  ENST ID: ENST00000428552
  CDS Start-End: 129-554
gtggcagtcccagccccagggtgctctccgcggtcggccatttatcggtgaagcaacagccccttgacgtcaagcttgacgcattggagataaagtccaaggaggtgaactaacctttgaacgtgccaatgtacagaaccaaagtgggcttgaaggaccgccagcagctctacaagctgatcattagccagctgctatatgacggctacatcagcatcgccaatggcctcatcaatgaaatcaagcctcagtctgtgtgtgcaccctcggagcagctcctgcatctcatcaaactcggaatggaaaacgatgacaccgcagttcagtatgcaattggtcgttcagatactgttgcccctggcacagggattgacctggaatttgatgcagatgttcagactatgtccccagaggcttctgagtacgaaacatgctatgtcacatcacataaaggaccatgccgtgtagctacctatagtagagatggacagttaatagctactgggtctgctgatgcttcgataaagatacttgacacagagaggatgttggcc

SEQ ID NO: 120152 - DNA, 1233 bp, Homo sapiens
  Payload ID: 3558
  Gene Symbol: CSTF1
  Gene Name: cleavage stimulation factor, 3' pre-RNA, subunit 1, 50kDa
  ENST ID: ENST00000452950
  CDS Start-End: 198-1233
ggcaggattcgcgcctccatttttccaggagagagcgggataccaagagaaccggaccagctggtactgggacacggggagagtagctggtgcggtcggctggggcatttagagaaaaccacagaaacgactggggcgagactggaagagtcgagagttagcaagctggcagggaaactgtcttccttttctccaagatgtacagaaccaaagtgggcttgaaggaccgccagcagctctacaagctgatcattagccagctgctatatgacggctacatcagcatcgccaatggcctcatcaatgaaatcaagcctcagtctgtgtgtgcaccctcggagcagctcctgcatctcatcaaactcggaatggaaaacgatgacaccgcagttcagtatgcaattggtcgttcagatactgttgcccctggcacagggattgacctggaatttgatgcagatgttcagactatgtccccagaggcttctgagtacgaaacatgctatgtcacatcacataaaggaccatgccgtgtagctacctatagtagagatggacagttaatagctactgggtctgctgatgcttcgataaagatacttgacacagagaggatgttggccaaaagtgccatgccaatagaggtcatgatgaatgagaccgcacaacaaaatatggaaaaccacccagtgattcgaactctttatgaccatgtggatgaagtcacgtgccttgctttccacccaacagaacagatcctggcttctggttcaagggattatactcttaaattatttgattattccaaaccatcagcaaaaagagccttcaaatacattcaggaagctgaaatgttacgttccatctcttttcatccttctggagactttatacttgtcggaactcagcatcctactcttcgcctttatgatatcaacacctttcaatgttttgtctcttgcaatcctcaagatcaacacaccgatgctatatgttccgttaattacaattctagtgccaatatgtacgtaactggaagcaaggacggctgcatcaaattatgggatggtgtttcaaatcgatgcatcacaacttttgagaaagcacatgacggtgctgaagtttgttctgccattttttccaaaaattctaaatacattctctcaagtggaaaagactctgtagctaaactttgggaaatatcaacgggacgaacactggtcagatacacgg

SEQ ID NO: 120153 - DNA, 2234 bp, Homo sapiens
  Payload ID: 3558
  Gene Symbol: CSTF1
  Gene Name: cleavage stimulation factor, 3' pre-RNA, subunit 1, 50kDa
  ENST ID: ENST00000493039
  CDS Start-End: 166-345
gagcgggataccaagagaaccggaccagctggtactgggacacggggagagtagctggtgcggtcggctggggcatttagagaaaaccacagaaacgactggggcgagactggaagagtcgagagttagcaagctggcagggaaactgtcttccttttctccaagatgtacagaaccaaagtgggcttgaaggaccgccagcagctctacaagctgatcattagccagctgctatatgacggctacatcagcatcgccaatggcctcatcaatgaaatcaagcctcagtctgtgtgtgcaccctcggagcagctcctgcatctcatcaaactcggtagattgtgaacacaaatccatacgtcccatggcaaggaatggaaaacgatgacaccgcagttcagtatgcaattggtcgttcagatactgttgcccctggcacagggattgacctggaatttgatgcagatgttcagactatgtccccagaggcttctgagtacgaaacatgctatgtcacatcacataaaggaccatgccgtgtagctacctatagtagagatggacagttaatagctactgggtctgctgatgcttcgataaagatacttgacacagagaggatgttggccaaaagtgccatgccaatagaggtcatgatgaatgagaccgcacaacaaaatatggaaaaccacccagtgattcgaactctttatgaccatgtggatgaagtcacgtgccttgctttccacccaacagaacagatcctggcttctggttcaagggattatactcttaaattatttgattattccaaaccatcagcaaaaagagccttcaaatacattcaggaagctgaaatgttacgttccatctcttttcatccttctggagactttatacttgtcggaactcagcatcctactcttcgcctttatgatatcaacacctttcaatgttttgtctcttgcaatcctcaagatcaacacaccgatgctatatgttccgttaattacaattctagtgccaatatgtacgtaactggaagcaaggacggctgcatcaaattatgggatggtgtttcaaatcgatgcatcacaacttttgagaaagcacatgacggtgctgaagtttgttctgccattttttccaaaaattctaaatacattctctcaagtggaaaagactctgtagctaaactttgggaaatatcaacgggacgaacactggtcagatacacgggcgcgggtttaagtggacgccaggtgcaccggacacaggctgtgtttaaccacaccgaggactatgtgttgctgcccgacgagaggacgatcagtctttgctgctgggactcgaggacagccgagcggagaaacctgctgtcgttggggcacaacaatattgtacgctgcatagtgcactcccccaccaaccccgggttcatgacgtgcagcgatgacttcagagcgcggttttggtaccggagatcgaccactgactgagccaccctctccgtagggttctttctcgaggactctaccctcctcccccacgtcctgtctcagctgcagtcgtaagtccgtgcaccatccttgacgttttgctgccacctctgtccacattcttcttggatttgtataaaagaatctttttttaccttgatgtagaatcatggtggaaaaagttggaaacacagatctgtgcagttctacattcactgattattacagtgtgattttcatcggttttgtaagtacaggacttgccgtttcttttgatctcttgattgaaggaggatagggcattaaagtgcttttgacatgaggaattttcatttggttcttctgtcaactttcttgcttattctgctgaaccctctgtgtatttcccttccaggtatatttgaacagataagcaggcatgcagctctgagactcctgagttttatgccattatcaaaagcattttcaagaatccctcaattctatcctgaaatgatgttattctgataataaagctcagatctgcaactttattgttatatatttttcacttctgtaaaattaatggccagtttttcctgacaatttataggaacagtatctttcaacatactccctacattatccttcaatatctgcaatacttgtctttagtaactgtatttctggtaagattatgatttcatgagaaacaattgaaaatatatccgatctaattaaattaggtcagcctgc

SEQ ID NO: 120154 - DNA, 929 bp, Homo sapiens
  Payload ID: 3558
  Gene Symbol: CSTF1
  Gene Name: cleavage stimulation factor, 3' pre-RNA, subunit 1, 50kDa
  ENST ID: ENST00000490539
  CDS Start-End: 52-231
aagagaaccggaccagctgctggcagggaaactgtcttccttttctccaagatgtacagaaccaaagtgggcttgaaggaccgccagcagctctacaagctgatcattagccagctgctatatgacggctacatcagcatcgccaatggcctcatcaatgaaatcaagcctcagtctgtgtgtgcaccctcggagcagctcctgcatctcatcaaactcggtagattgtgaacacaaatccatacgtcccatggcaaggaatggaaaacgatgacaccgcagttcagtatgcaattggtcgttcagatactgttgcccctggcacagggattgacctggaatttgatgcagatgttcagactatgtccccagaggcttctgagtacgaaacatgctatgtcacatcacataaaggaccatgccgtgtagctacctatagtagagatggacagttaatagctactgggtctgctgatgcttcgataaagatacttgacacagagaggatgttggccaaaagtgccatgccaatagaggtcatgatgaatgagaccgcacaacaaaatatggaaaaccacccagtgattcgaactctttatgaccatgtggatgaagtcacgtgccttgctttccacccaacagaacagatcctggcttctggttcaagggattatactcttaaattatttgattattccaaaccatcagcaaaaagagccttcaaatacattcaggaagctgaaatgttacgttccatctcttttcatccttctggagactttatacttgtcggaactcagcatcctactcttcgcctttatgatatcaacacctttcaatgttttgtctcttgcaatcctcaagatcaacacaccgatgctatatgttccgttaattacaattctagtgccaatatgtacgtaactgga

SEQ ID NO: 120155 - DNA, 1958 bp, Homo sapiens
  Payload ID: 3559
  Gene Symbol: CSTF2
  Gene Name: cleavage stimulation factor, 3' pre-RNA, subunit 2, 64kDa
  Uniprot ID: P33240
  ENST ID: ENST00000372972
  CDS Start-End: 17-1750
ccgactcaacagagctatggcgggtttgactgtgagagacccagcggtggatcgttctctacgttctgtgttcgtggggaacattccttatgaagctactgaagagcagttgaaggacatcttttctgaggttggacctgttgttagtttcagattggtatacgatagagagacaggaaagccaaagggttatggcttctgtgaataccaagaccaagagacagcacttagtgccatgcggaacctgaatgggcgcgaattcagtgggagagcacttcgagtggacaatgctgccagtgaaaagaacaaagaagagctgaagagccttggcactggtgcccctgtcattgagtcaccttatggagagaccatcagtcctgaggatgcccctgagtccattagcaaagcagttgccagccttccaccagagcagatgtttgagctgatgaaacaaatgaagctctgtgtccagaatagtccccaggaggcacggaacatgttacttcagaaccctcaactggcttatgctttgctgcaagcacaggtagtgatgagaattgtggatccggaaattgccctgaaaattctgcatcgccagacaaatatcccaacgctgattgcaggcaaccctcagccagtccatggtgctgggcctggctcaggatccaatgtgtcaatgaaccagcagaatcctcaggcccctcaggcccagtctttgggtggaatgcatgtcaatggcgcacctcctctgatgcaagcttctatgcagggtggagttccagcaccagggcaaatgccagctgctgtcacaggacctggccctggttccttagctcctggaggaggaatgcaggctcaggttggaatgccaggaagtggaccagtgtccatggaacgggggcaagtgccgatgcaagaccccagagcagctatgcagcggggatccttgcctgcgaatgtcccaacccctcgaggcttgttaggagatgctccgaatgatccacggggaggcactttactttctgtaactggagaggtagagcctagaggttacttgggaccacctcatcagggtccacccatgcaccatgtccctggccatgagagccgaggaccacccccacatgaactgaggggagggccattacccgagcccagacctctaatggcagaaccaagaggacccatgctagatcagaggggtccacccttggatggcagaggtggaagggatccccgaggaatagatgcacgagggatggaggcccgagccatggaggcaagagggttagatgccagaggattagaggcccgtgcaatggaggcccgtgcgatggaagctcgtgcaatggaggcccgagcgatggaggcccgtgcaatggaagtccgagggatggaggccagaggcatggataccagaggcccagtgcctggccccagaggacctatacctagtggaatgcagggtcccagtccaattaacatgggggcggttgtcccccagggatccagacaggtcccagtcatgcagggaacaggaatgcaaggagcaagtatacagggtggaagccagcctggcggctttagtcccgggcagaaccaagtcactccacaggatcatgagaaggctgctttgattatgcaggttctacaactgactgcagaccagattgccatgttgcctcctgagcaaaggcagagtatcctgattttaaaggaacaaatacagaaatccactggagcaccttgataggttttcaaaaatacctggcaagaaatctggaaattctataattttgttgaaatattgaaaaaagatgacctgcatcctaacccttgaatgactcaaatcagtgccaggtggaggactcccatcaccttctctcagaacaaaatcacttcattttattgtcttagtttgtatattttctgtgacttgaaataaactttgaacacaa

SEQ ID NO: 120156 - DNA, 2074 bp, Homo sapiens
  Payload ID: 3559
  Gene Symbol: CSTF2
  Gene Name: cleavage stimulation factor, 3' pre-RNA, subunit 2, 64kDa
  ENST ID: ENST00000415585
  CDS Start-End: 59-1852
ggcttgtgctccgtacggaagtgtgctttggcgcaccggaagccgactcaacagagctatggcgggtttgactgtgagagacccagcggtggatcgttctctacgttctgtgttcgtggggaacattccttatgaagctactgaagagcagttgaaggacatcttttctgaggttggacctgttgttagtttcagattggtatacgatagagagacaggaaagccaaagggttatggcttctgtgaataccaagaccaagagacagcacttagtgccatgcggaacctgaatgggcgcgaattcagtgggagagcacttcgagtggacaatgctgccagtgaaaagaacaaagaagagctgaagagccttggcactggtgcccctgtcattgagtcaccttatggagagaccatcagtcctgaggatgcccctgagtccattagcaaagcagttgccagccttccaccagagcagatgtttgagctgatgaaacaaatgaagctctgtgtccagaatagtccccaggaggcacggaacatgttacttcagaaccctcaactggcttatgctttgctgcaagcacaggtagtgatgagaattgtggatccggaaattgccctgaaaattctgcatcgccagacaaatatcccaacgctgattgcaggcaaccctcagccagtccatggtgctgggcctggctcaggatccaatgtgtcaatgaaccagcagaatcctcaggcccctcaggcccagtctttgggtggaatgcatgtcaatggcgcacctcctctgatgcaagcttctatgcagggtggagttccagcaccagggcaaatgccagctgctgtcacaggacctggccctggttccttagctcctggaggaggaatgcaggctcaggttggaatgccaggaagtggaccagtgtccatggaacgggggcaaggaaccctacagcactcgcccgtgggacccgccgggcctgcatcaattgagcgagttcaagtgccgatgcaagaccccagagcagctatgcagcggggatccttgcctgcgaatgtcccaacccctcgaggcttgttaggagatgctccgaatgatccacggggaggcactttactttctgtaactggagaggtagagcctagaggttacttgggaccacctcatcagggtccacccatgcaccatgtccctggccatgagagccgaggaccacccccacatgaactgaggggagggccattacccgagcccagacctctaatggcagaaccaagaggacccatgctagatcagaggggtccacccttggatggcagaggtggaagggatccccgaggaatagatgcacgagggatggaggcccgagccatggaggcaagagggttagatgccagaggattagaggcccgtgcaatggaggcccgtgcgatggaagctcgtgcaatggaggcccgagcgatggaggcccgtgcaatggaagtccgagggatggaggccagaggcatggataccagaggcccagtgcctggccccagaggacctatacctagtggaatgcagggtcccagtccaattaacatgggggcggttgtcccccagggatccagacaggtcccagtcatgcagggaacaggaatgcaaggagcaagtatacagggtggaagccagcctggcggctttagtcccgggcagaaccaagtcactccacaggatcatgagaaggctgctttgattatgcaggttctacaactgactgcagaccagattgccatgttgcctcctgagcaaaggcagagtatcctgattttaaaggaacaaatacagaaatccactggagcaccttgataggttttcaaaaatacctggcaagaaatctggaaattctataattttgttgaaatattgaaaaaagatgacctgcatcctaacccttgaatgactcaaatcagtgccaggtggaggactcccatcaccttctctcagaacaaaatcacttcattttattgtcttagtttgtatattttctgtgacttgaaataaactttgaacacaattttagtacactgc

SEQ ID NO: 120157 - DNA, 757 bp, Homo sapiens
  Payload ID: 3559
  Gene Symbol: CSTF2
  Gene Name: cleavage stimulation factor, 3' pre-RNA, subunit 2, 64kDa
  ENST ID: ENST00000413437
  CDS Start-End: 83-757
atgaatcgctaccggagccgctgacggttcggacgtgcagttctccctgcttatcctgtagggcgtccaacctggtggactcatgagcaaagagatattcccattctgccgagtggggaacattccttatgaagctactgaagagcagttgaaggacatcttttctgaggttggacctgttgttagtttcagattggtatacgatagagagacaggaaagccaaagggttatggcttctgtgaataccaagaccaagagacagcacttagtgccatgcggaacctgaatgggcgcgaattcagtgggagagcacttcgagtggacaatgctgccagtgaaaagaacaaagaagagctgaagagccttggcactggtgcccctgtcattgagtcaccttatggagagaccatcagtcctgaggatgcccctgagtccattagcaaagcagttgccagccttccaccagagcagatgtttgagctgatgaaacaaatgaagctctgtgtccagaatagtccccaggaggcacggaacatgttacttcagaaccctcaactggcttatgctttgctgcaagcacaggtagtgatgagaattgtggatccggaaattgccctgaaaattctgcatcgccagacaaatatcccaacgctgattgcaggcaaccctcagccagtccatggtgctgggcctggctcaggatccaatgtgtcaatgaaccagcagaatcctcaggcccctcaggcccagtctttg

SEQ ID NO: 120158 - DNA, 1693 bp, Homo sapiens
  Payload ID: 3559
  Gene Symbol: CSTF2
  Gene Name: cleavage stimulation factor, 3' pre-RNA, subunit 2, 64kDa
  ENST ID: ENST00000475126
  CDS Start-End: 1-1317
atggcgggtttgactgtgagagacccagcggtggatcgttctctacgttctgtgttcgtggggaacattccttatgaagctactgaagagcagttgaaggacatcttttctgaggttggacctgttgttagtttcagattggtatacgatagagagacaggaaagccaaagggttatggcttctgtgaataccaagaccaagagacagcacttagtgccatgcggaacctgaatgggcgcgaattcagtgggagagcacttcgagtggacaatgctgccagtgaaaagaacaaagaagagctgaagagccttggcactggtgcccctgtcattgagtcaccttatggagagaccatcagtcctgaggatgcccctgagtccattagcaaagcagttgccagccttccaccagagcagatgtttgagctgatgaaacaaatgaagctctgtgtccagaatagtccccaggaggcacggaacatgttacttcagaaccctcaactggcttatgctttgctgcaagcacaggtagtgatgagaattgtggatccggaaattgccctgaaaattctgcatcgccagacaaatatcccaacgctgattgcaggcaaccctcagccagtccatggtgctgggcctggctcaggatccaatgtgtcaatgaaccagcagaatcctcaggcccctcaggcccagtctttgggtggagttccagcaccagggcaaatgccagctgctgtcacaggacctggccctggttccttagctcctggaggaggaatgcaggctcaggttggaatgccaggaagtggaccagtgtccatggaacgggggcaagtgccgatgcaagaccccagagcagctatgcagcggggatccttgcctgcgaatgtcccaacccctcgaggcttgttaggagatgctccgaatgatccacggggaggcactttactttctgtaactggagaggtagagcctagaggttacttgggaccacctcatcagggtccacccatgcaccatgtccctggccatgagagccgaggaccacccccacatgaactgaggggagggccattacccgagcccagacctctaatggcagaaccaagaggacccatgctagatcagaggggtccacccttggatggcagaggtggaagggatccccgaggaatagatgcacgagggatggaggcccgagccatggaggcaagagggttagatgccagaggattagaggcccgtcccagtcatgcagggaacaggaatgcaaggagcaagtatacagggtggaagccagcctggcggctttagtcccgggcagaaccaagtcactccacaggatcatgagaaggctgctttgattatgcaggttctacaactgactgcagaccagattgccatgttgcctcctgagcaaaggcagagtatcctgattttaaaggaacaaatacagaaatccactggagcaccttgataggttttcaaaaatacctggcaagaaatctggaaattctataattttgttgaaatattgaaaaaagatgacctgcatcctaacccttgaatgactcaaatcagtgccaggtggaggactcccatcaccttctctcagaacaaaatcacttcattttattgtcttagtttgtatattttctgtgacttgaaataaactttgaacacaatttta

SEQ ID NO: 120159 - DNA, 4105 bp, Homo sapiens
  Payload ID: 3560
  Gene Symbol: CSTF2T
  Gene Name: cleavage stimulation factor, 3' pre-RNA, subunit 2, 64kDa, tau variant
  Uniprot ID: Q9H0L4
  ENST ID: ENST00000331173
  CDS Start-End: 43-1893
gcctcgaagaatccgctatcggctgtctgcacaaccggaatcatgtcgagtttggcggtgagagacccggcaatggatcgatcactgcgttccgtgttcgtggggaacattccatatgaggcaactgaggagcagttaaaggacattttctcggaggttggttctgttgtcagtttccggctggtatacgatagagagacgggaaaacccaagggctatggcttctgcgaataccaagaccaggagaccgcgcttagtgccatgcggaacctcaatgggcgggagttcagtgggagagcgcttcgggtggacaatgctgccagtgaaaagaataaggaggagttaaagagccttgggcctgcagcgcccattattgactcaccctatggggatcccatcgatccagaagatgcccctgaatcgattaccagagcagtagccagtctccccccggagcagatgtttgagctgatgaagcagatgaagctctgtgtccaaaacagccaccaggaagctcgaaacatgttacttcaaaatccacaactggcttatgcactgttgcaggcacaagtagtgatgagaatcatggatccagagattgctctgaaaattctgcatcggaagatacatgtcacaccactgatcccaggcaaatctcagtctgtgtctgtctctggccctggccctggccctggccctgggctctgcccaggacctaatgttctgctgaaccagcagaatcctccagctcctcagcctcagcatttggctagaagacctgtgaaggacattcctcctctgatgcagactcctatccagggtggaattccagctccagggccaataccagctgcagttcccggagctggtcctggttccttaactcctggaggagcaatgcagccccaacttggaatgccaggggttggcccagtgcctttagagcggggacaagtgcagatgtcagatcctagagctcctatacctcgcggacccgtgactcctggtggtctgcctcctcgaggactgttaggagatgctccaaatgacccacgtggagggactttgctttcagtcactggagaagtggagcccagaggttatctgggtccaccccatcagggtccccccatgcatcatgcctctggtcatgacactcgtggcccttcctcacatgagatgaggggagggccattaggagatcccagactgctaattggagagcccagaggccccatgatagatcaaaggggtctacctatggatggtagaggtggtagagattctcgagcgatggagactcgtgccatggaaactgaggtcttagagacacgtgtaatggagaggagaggaatggagacctgtgcgatggaaaccagagggatggaagcaaggggcatggatgcaagaggattggagatgaggggccctgtccccagttcaagaggccctatgactggtggaattcagggtcctggtcccattaatataggggcaggtggccctcctcagggacccagacaggtcccaggcatttcaggggtggggaatcctggagctggtatgcagggtacaggcatacaaggaacaggcatgcagggagcaggcatacaaggaggagggatgcagggggcaggcatacaaggagtcagtatacaaggaggaggtatacaaggaggaggtatacagggggcaagcaagcaaggtggaagccagcctagcagttttagtcctgggcagagccaggtcactccacaggatcaggagaaggcagctttgatcatgcaggttcttcaactgactgcagatcagattgccatgctgccccctgagcaaaggcagagtatcctgattttaaaggaacaaatccagaaatccactggagcgtcttgaaaggttttagaaaatatttggctgtagtctcaaattttattctgtagcatggagaatgggtgcaaaaagctgacttctgtatccccacacttggattagggtttccctcctcctagaacctaatcttattttttgttctttttctttctttctgttttccttttttttttaattgagggtggggggaggagggagtgcgtctgttcactttaagttactttaaaataactctgaacatgattatattatgccaaataagattacaaagaataagcagcaatattgaagcatctacagtatgttaactacattttttaaatgtcgagtaaaacttcgtgaaaactgctcataaagactaaaagttgacctgttaaaacgttaatgtactaagatagttttaagatttttggttgtataacaaaataaaagtttacccaaaagtataagatacattttttggtaaaccatttaaaatacaaaatcctattttggaggcaataggataagcattgtcttagtgttttagaattatttttgaaacagagttaacaggataaggttacacttgtattagaattgtttttttctaaagttatgttacctgaaaaatcaaggagtgcacctgatttactgttgcttcatttatcccatccttcagagaccagcaaggttctgccaggccccaagcatctgagcatgatgattttgctgtgacaattctaagatcaaccaggttacttaagtccgctctgatgaaacccagtctctcaataccttcctatttctcaatagtctttaagccctaaatctgagtcagtaattctctaaaaatccttcccaaaaatcagtgtctagggactggttgatctagatgagttataaatggtatttgacttttcataagtagtggaaggtttcactaagtaaagatctgagtttcttggtatctgacgtttgtatacagatggtgtccatttgctcaaccagacaggagttaacttgtattagaattgttttttctaaagttatgttacctgagaaattaaggactgcacctggtttaatgttgcttcacttatcccaccctacagagaccagcaaggttctgccaggcctcgagcatccaagcatgattttgctgtgacaaatctaaaatcaaccaggctacttaagtctgctctgatgaaacccaataatctctcaataccttcctatttctcaatagtctttaaaccctaaatctgagtcagtaattctcttacatccttcccaaaaatcagtgtctagggactagttgatctggatgagttatacatgatatttgacttttcataagtagtggaaggtttcactaagtaaaactctcagtttcttggtatctggctttcttatacagatggtgtccatttgctccaccagacaggagttaaaaacctttaaagagcatttaacatgccttttagttttcttatttcataatctacttttctatcattaatcatcttaccaggaataatcaaggcccaggtaggtagaagtttttatatagcctgaatactcacttgacttactgctcattttactttttgcatggaatacagccatttagtcctaatatacataccaatgagacaattaaaaattggttggaagatggagcttatcacattgtgctactacgactttattttttcttgaaaataaagccttgaggatgtgaacataaatgttggtatcataaaacaagtagtaataaaagcataaattatcaaatatcaggtgatcttactatggagaagaaaaaccaatatctagttacagatgaaaaaatgtttaatacaaagagctgaaaatgtagaaattgagttatcttccctttgcaaaatttttacactttaaattagtaattctttgtttgcaaggttttcatccctatgctgttgttttctactacctgttttactcttgttcatactgctactttcccatgtttcctatatgcctcccctatattggagaggataactcgcgtttacatatgtgatagttatgcttaatactaattcacagagttggctcgatcattttgagattctagttgctttatctcaaagctttcactgaagggctgtaactgaaaattattaaatgttagtctttagtcaaatctctgcattgtttcatgcagaaaataaagatacaattaaggctg

SEQ ID NO: 120160 - DNA, 2797 bp, Homo sapiens
  Payload ID: 3561
  Gene Symbol: CSTF3
  Gene Name: cleavage stimulation factor, 3' pre-RNA, subunit 3, 77kDa
  Uniprot ID: Q12996
  ENST ID: ENST00000323959
  CDS Start-End: 141-2294
gggcggtggcgattggtgttggcggtctggctcagctgggcagggggtaactttactgatttgggggtggtttttagtttaatttttcttttctagcttcccatcgacggtcagtgcgcacgttgtaatcagctgaggccatgtcaggagacggagccacggagcaggcagctgagtatgtcccagagaaggtgaagaaagcggaaaagaaattagaagagaatccatatgaccttgatgcttggagcattctcattcgagaggcacagaatcaacctatagacaaagcacggaagacttatgaacgccttgttgcccagttccccagttctggcagattctggaaactgtacattgaagcagagattaaagctaaaaattatgacaaggttgaaaagctatttcagagatgccttatgaaggttttgcacattgatttatggaagtgttatctttcatatgtccgagaaaccaagggtaaactaccaagttacaaagaaaaaatggctcaagcatatgactttgcactggataaaattggaatggaaattatgtcctatcagatttgggtggattacatcaatttcctaaaaggcgtggaagctgtaggatcttatgcagaaaatcaaagaataacagctgtccgaagagtttatcaacgaggttgtgttaatccgatgatcaacattgaacagctctggagagactataacaagtatgaagagggtatcaatattcatttagctaaaaaaatgattgaagatcggagtagagattatatgaatgctagacgtgtagcaaaggaatatgagacagtaatgaaaggcttggaccgtaatgctccctcggtgcctcctcagaatactcctcaagaagctcaacaagtagatatgtggaagaaatatatacagtgggaaaagagcaaccctcttcgtacagaggatcagacccttataacaaaaagagttatgtttgcttatgaacagtgcctgcttgtgctgggccatcaccctgatatttggtatgaagctgcccagtatcttgagcagtcaagtaaactgctcgcagaaaagggagatatgaataatgccaaattatttagtgatgaagctgctaatatatatgaaagagccataagcactttattgaagaagaatatgcttctttattttgcatatgcagattatgaagagagtcgcatgaagtatgaaaaggttcacagtatatataacagacttctggcaattgaggatattgaccctaccttggtatatatccaatatatgaaatttgcacggagagcagaaggcatcaaatctggaagaatgatatttaaaaaagcaagagaagataccagaacccgccaccatgtctatgttactgcagcactcatggaatattactgtagtaaggacaaatctgttgcctttaagatttttgagctggggctaaaaaaatatggagacattccagagtatgtcctggcctatattgactatctttctcacctcaatgaggacaataatacccgagttttgtttgaacgagttttaacatctggaagccttcctcctgagaagtctggagaaatctgggcccgatttctagcatttgaaagtaatattggtgatctagctagtatactcaaagtggagaaaagacggtttacagcattcaaagaagagtatgaagggaaagaaacggctttactagtagatagatacaagttcatggatttatatccttgctctgcaagtgaattaaaagcacttggttataaggatgtctcccgtgctaagctagcagctataattccggacccagttgtagctccttctatagtgcctgttctgaaagatgaagtggatagaaaaccagaataccctaaaccagacactcagcagatgattccatttcagccacgacatttagcacctccaggtttacaccctgtacctggtggagtgttcccagtccctcctgcagctgttgttttaatgaaacttctccctcctcctatctgtttccagggtccttttgtacaagtggatgaactgatggaaattttccgaagatgcaagataccaaatactgttgaggaagctgtgaggatcattactggtggggccccagagctagctgtagaaggcaacggccccgtggaaagtaatgcagtactcaccaaggccgtcaaaaggcccaacgaggattcagatgaagatgaagaaaagggagccgttgtcccccctgttcatgacatttacagagcacggcagcagaagcggattcggtagggttttaaacgcctctgcagaaaactcctgtccaggattccttttgcctcaagtggtatgtttaaaagagacaacgctttgttacaaggttcttggaaacaaagttgtattgtcattggtgcctctatcacatggttcttgagaaaaaacaaaccaacctgtgtgaattttagaatacggaacagacctatgctctaagcaaaattaggttttcaaaaatgtgagaacagtacaaagtggcagaaccacattttgttccctcttcaagggtgtcttgtatgtgccgcttgaagatttgtgagtttttcaacagttttattttaaaaactggatggcttatgattgtaaagcattttatcacattttctgaaaacaattgttcttggtttgcttatgtagagtcctgccttattgtttgtttttatttatggcagaatgtatgaaatccgttttgtagtttcaaattttaaaagtcctttaaaaaataaaaggattcagaaaca

SEQ ID NO: 120161 - DNA, 1132 bp, Homo sapiens
  Payload ID: 3561
  Gene Symbol: CSTF3
  Gene Name: cleavage stimulation factor, 3' pre-RNA, subunit 3, 77kDa
  Uniprot ID: Q12996
  ENST ID: ENST00000438862
  CDS Start-End: 207-518
aatgcggaagccacacacctcctcctcggccggcaggggcgcagccattttaattcatatttgagtgggcggtggcgattggtgttggcggtctggctcagctgggcagggggtaactttactgatttgggggtggtttttagtttaatttttcttttctagcttcccatcgacggtcagtgcgcacgttgtaatcagctgaggccatgtcaggagacggagccacggagcaggcagctgagtatgtcccagagaaggtgaagaaagcggaaaagaaattagaagagaatccatatgaccttgatgcttggagcattctcattcgagaggcacagaatcaacctatagacaaagcacggaagacttatgaacgccttgttgcccagttccccagttctggcagattctggaaactgtacattgaagcagaggttactattttattttattttttcttatatcagtattgcagcattcactgtagtgatagaaaacaagttaggaacatagccaattaggacaaggaggatttaaatgtgtcttacctttattttgtaaaataggtataaaggagtaattaaaatgaatttttgaaatttgggtcttttacaagctgatgattgttgcattttggagttgcaacaacattaaaacagtttcaatggtattggagtgctttagccttttatttacttgtcatgtgtcaatttattgcctcctgtgtcatttatttagaactcatttttctttttattcctacttacaaactaatatgaatgggagtatatgaaaatacagaaatgttaacttagtttttcatagagtattttgagtgtctggtgaaatgaaacattttaagagaagaattacttcacattttaattttgtgaaaatgcatggtttatcaatgtaagcacttcaataatttaacgatttttctgtaagatagtttatattatgcaagaataagctaatgtgattcaaacctatttaatcctatttaatcataattttacccaatgatactttgatatttttttcttgctttttatatcttgaaatttgaacccaggcatgtatattttaaagagtaaggaccccattcatgattatggttaggaggaaaatgtta

SEQ ID NO: 120162 - DNA, 715 bp, Homo sapiens
  Payload ID: 3561
  Gene Symbol: CSTF3
  Gene Name: cleavage stimulation factor, 3' pre-RNA, subunit 3, 77kDa
  Uniprot ID: Q12996
  ENST ID: ENST00000431742
  CDS Start-End: 167-301
gcagccattttaattcatatttgagtgggcggtggcgattggtgttggcggtctggctcagctgggcagggggtaactttactgatttgggggtggtttttagtttaatttttcttttctagcttcccatcgacggtcagtgcgcacgttgtaatcagctgaggccatgtcaggagacggagccacggagcaggcagctgagtatgtcccagagaaggtgaagaaagcggaaaagaaattagaagagaatccatatgaccttgatgcttggagcattctcattcgagaggcacaggtttagtgatataggattacatttccttctctatgggtccaatcacactacttggttctgcagtgaataatattttcataatcctaacattgtaaatgctgtttattggttttcaattttagaatcaacctatagacaaagcacggaagacttatgaacgccttgttgcccagttccccagttctggcagattctggaaactgtacattgaagcagaggttactattttattttattttttcttatatcagtattgcagcattcactgtagtgatagaaaacaagttaggaacatagccaattaggacaaggaggatttaaatgtgtcttacctttattttgtaaaataggtataaaggagtaattaaaatgaatttttgaaatttgggtcttttacaagctgatgattgttgcattttg

SEQ ID NO: 120163 - DNA, 693 bp, Homo sapiens
  Payload ID: 3561
  Gene Symbol: CSTF3
  Gene Name: cleavage stimulation factor, 3' pre-RNA, subunit 3, 77kDa
  ENST ID: ENST00000524827
  CDS Start-End: 136-693
gtggcgattggtgttggcggtctggctcagctgggcagggggtaactttactgatttgggggtggtttttagtttaatttttcttttctagcttcccatcgacggtcagtgcgcacgttgtaatcagctgaggccatgtcaggagacggagccacggagcaggtagagacgaggtctcactgtgtttcccaggctggtcttgaactcctggacttaagtgatcctcctgcctcagccttccaaactgttggattacaggcagctgagtatgtcccagagaaggtgaagaaagcggaaaagaaattagaagagaatccatatgaccttgatgcttggagcattctcattcgagaggcacagaatcaacctatagacaaagcacggaagacttatgaacgccttgttgcccagttccccagttctggcagattctggaaactgtacattgaagcagagattaaagctaaaaattatgacaaggttgaaaagctatttcagagatgccttatgaaggttttgcacattgatttatggaagtgttatctttcatatgtccgagaaaccaagggtaaactaccaagttacaaagaaaaaatggctcaagcatatgactttgcactggataaaattggaatggaaattatgtcctatcagatttgggtggattacatcaatttcctaaaaggcgtgtaa

SEQ ID NO: 120164 - DNA, 434 bp, Homo sapiens
  Payload ID: 3561
  Gene Symbol: CSTF3
  Gene Name: cleavage stimulation factor, 3' pre-RNA, subunit 3, 77kDa
  ENST ID: ENST00000524775
  CDS Start-End: 251-434
accgtattagccaggatggtctcatctcctgaccttgtgatccgcccgcctcagcctcccaaagtgctgcgattacaggcgtgagccaccgcacctggcctagaactcctgactttaaatgatccatccgttttggcctcccaaactgctgggattacaggcgtgggccaccgcgcccagtcaatctcatttaatcttaatgccagcttcccatcgacggtcagtgcgcacgttgtaatcagctgaggccatgtcaggagacggagccacggagcaggcagctgagtatgtcccagagaaggtgaagaaagcggaaaagaaattagaagagaatccatatgaccttgatgcttggagcattctcattcgagaggcacagaatcaacctatagacaaagcacggaagacttatgaacgccttgttgcccagttcc

SEQ ID NO: 120165 - DNA, 558 bp, Homo sapiens
  Payload ID: 3561
  Gene Symbol: CSTF3
  Gene Name: cleavage stimulation factor, 3' pre-RNA, subunit 3, 77kDa
  ENST ID: ENST00000524556
  CDS Start-End: 171-329
gggcgcagccattttaattcatatttgagtgggcggtggcgattggtgttggcggtctggctcagctgggcagggggtaactttactgatttgggggtggtttttagtttaatttttcttttctagcttcccatcgacggtcagtgcgcacgttgtaatcagctgaggccatgtcaggagacggagccacggagcagacagggtctggctctgtcacccaggcccgagtgcagtggcggcaatctcagttccctgcaacttctccctcccgggctcaagcgatcccaccgcagcttcccaagcagctgagtatgtcccagagaaggtgaagaaagcggaaaagaaattagaagagaatccatatgaccttgatgcttggagcattctcattcgagaggcacagaatcaacctatagacaaagcacggaagacttatgaacgccttgttgcccagttccccagttctggcagattctggaaactgtacattgaagcagaggttactattttattttattttttcttatatcagtattgcagcattcactgtagtgatag

SEQ ID NO: 120166 - DNA, 592 bp, Homo sapiens
  Payload ID: 3561
  Gene Symbol: CSTF3
  Gene Name: cleavage stimulation factor, 3' pre-RNA, subunit 3, 77kDa
  ENST ID: ENST00000528865
  CDS Start-End: 1-274
ctgtttccagggtccttttgtacaagtggatgaactgatggaaattttccgaagatgcaagataccaaatactgttgaggaagctgtgaggatcattactggtggggccccagagctagctgtagaaggcaacggccccgtggaaagtaatgcagtactcaccaaggccgtcaaaaggcccaacgaggattcagatgaagatgaagaaaagggagccgttgtcccccctgttcatgacatttacagagcacggcagcagaagcggattcggtagggttttaaacgcctctgcagaaaactcctgtccaggattccttttgcctcaagtgttgcagaactccaccagtggacaccgaggtagtgggcggccaagagtctgtgaagccagttattcatgcatcaagatttcaaacggtccaaatggaactctggcaatgtaagaactcaggaggggaaaaatatcttgcaagaatctactcttacaaaagaagagtttttgagatttaggaagaatgactgcaggaagtggtgatcagcgctgtgcagttggggttaagctcctctccttcagccttggagcggcaggaaaagg

SEQ ID NO: 120167 - DNA, 2604 bp, Homo sapiens
  Payload ID: 3562
  Gene Symbol: CLPTM1
  Gene Name: cleft lip and palate associated transmembrane protein 1
  Uniprot ID: O96005
  ENST ID: ENST00000337392
  CDS Start-End: 151-2160
aagtggccttcctgagaggcgtggctgcggcactcttgccggatagggtggcccggcggggctaggaaagcgtgaaatctcgcgcgattgcgctgcgaagtcggggacggggcggggctggcggcgggggcggggacccggagcgggaagatggcggcggcgcaggaggcggacggggcccgcagcgccgtggtggcggccgggggaggcagctccggtcaggtgaccagcaatggcagcatcgggagggacccgccagcggagacccagcctcagaacccaccggcccagccggcacccaatgcctggcaggtcatcaaaggtgtgctgtttaggatcttcatcatctgggccatcagcagttggttccgccgagggccggcccctcaggaccaggcgggccccggaggagctccacgcgtcgccagccgcaacctgttccccaaagacactttaatgaacctgcatgtgtacatctcagagcacgagcactttacagacttcaacgccacgtcggcactcttctgggaacagcacgatcttgtgtatggcgactggactagcggcgagaactcagacggctgctacgagcactttgctgagctcgatatcccacagagcgtccagcagaacggctccatctacatccacgtttacttcaccaagagtggcttccacccagacccccggcagaaggccctgtaccgccggcttgccacagtccacatgtcccggatgatcaacaaatacaagcgcagacgatttcagaaaaccaagaacctgctgacaggagagacagaagcggacccagaaatgatcaagagggctgaggactatgggcctgtggaggtgatctcccattggcaccccaacatcaccatcaacatcgtggacgaccacacgccgtgggtgaagggcagtgtgccccctcccctggatcaatatgtgaagttcgacgccgtgagcggtgactactatcccatcatctacttcaatgactactggaacctgcagaaggactactaccccatcaacgagagcctggccagcctgccgctccgcgtctccttctgcccactctcgctttggcgctggcagctctatgctgcccagagcaccaagtcgccctggaacttcctgggtgatgagttgtacgagcagtcagatgaggagcaggactcggtgaaggtggccctgctggagaccaacccctacctgctggcgctcaccatcatcgtgtctatcgttcacagtgtcttcgagttcctggccttcaagaatgatatccagttctggaacagccggcagtccctggagggcctgtccgtgcgctccgtcttcttcggcgttttccagtcattcgtggtcctcctctacatcctggacaacgagaccaacttcgtggtccaggtcagcgtcttcattggggtcctcatcgacctctggaagatcaccaaggtcatggacgtccggctggaccgagagcacagggtggcaggaatcttcccccgcctatccttcaaggacaagtccacgtatatcgagtcctcgaccaaagtgtatgatgatatggcattccggtacctgtcctggatcctcttcccgctcctgggctgctatgccgtctacagtcttctgtacctggagcacaagggctggtactcctgggtgctcagcatgctctacggcttcctgctgaccttcggcttcatcaccatgacgccccagctcttcatcaactacaagctcaagtctgtggcccaccttccctggcgcatgctcacctacaaggccctcaacacattcatcgacgacctgttcgcctttgtcatcaagatgcccgttatgtaccggatcggctgcctgcgggacgatgtggttttcttcatctacctctaccaacggtggatctaccgcgtcgaccccacccgagtcaacgagtttggcatgagtggagaagaccccacagctgccgcccccgtggccgaggttcccacagcagcaggggccctcacgcccacacctgcacccaccacgaccaccgccaccagggaggaggcctccacgtccctgcccaccaagcccacccagggggccagctctgccagcgagccccaggaagcccctccaaagccagcagaggacaagaaaaaggattagtcgagactggtcctcacctgctccggctcctggcgaccactacccctgcgtcccggccccctcgcctcccctccctgtcgccctttccctggacagatcaggccggggcggtgggaggcccgcctcaggtcagggcccagcgtgtgatgtaggggccggggcaggccagggtttgtttgtggaggcgctgtctgtccctctgtccctctgtgtttccagccatctcgccctgccagcccagcaccactgggaatcatggtgaagctgatgcagcgttgccgagggggtgggttgggcgggggtggggccgggcccccctacgggatgcccacggccgttcatcatcttgtccctcgtccccctaccacactccccctcctagaccgccgccctttaacacagtctggatttaataaattcatatgggtgtttaacttaaactca

SEQ ID NO: 120168 - DNA, 2732 bp, Homo sapiens
  Payload ID: 3562
  Gene Symbol: CLPTM1
  Gene Name: cleft lip and palate associated transmembrane protein 1
  Uniprot ID: O96005
  ENST ID: ENST00000541297
  CDS Start-End: 466-2433
aaactaagggtctctcagcagatggccgggtttagagctgtacgaagacacacagctaatgaaaaattgtggaattctcagagcccgtgaagcctagcccacggatgcgaggtttggaccactgagggaacgcgcatgcgtgctaggcagggcagtccgaaggcttgggggtgtatcatagggtctcatcggaggtttgttggccgtaagacccctggaattggaactctaaaaacacagaaaggatatgagctcaggagacttgaacgaaagagttgtcttaggaagaggggtcagaagacaagggtgctgggcaaaaggctagttcttcgaatcagaatacggtggccagaaaggttcctctgacgaaagaggggcgtggttcgaagccgtacagtggccggtaaagctcaagaaacatggaacgaaaaggacgcgaagaatcggcagggagaagcggacaggatgtcccgaaaggctcatataaccgaaaaggtgaccagcaatggcagcatcgggagggacccgccagcggagacccagcctcagaacccaccggcccagccggcacccaatgcctggcaggtcatcaaaggtgtgctgtttaggatcttcatcatctgggccatcagcagttggttccgccgagggccggcccctcaggaccaggcgggccccggaggagctccacgcgtcgccagccgcaacctgttccccaaagacactttaatgaacctgcatgtgtacatctcagagcacgagcactttacagacttcaacgccacgtcggcactcttctgggaacagcacgatcttgtgtatggcgactggactagcggcgagaactcagacggctgctacgagcactttgctgagctcgatatcccacagagcgtccagcagaacggctccatctacatccacgtttacttcaccaagagtggcttccacccagacccccggcagaaggccctgtaccgccggcttgccacagtccacatgtcccggatgatcaacaaatacaagcgcagacgatttcagaaaaccaagaacctgctgacaggagagacagaagcggacccagaaatgatcaagagggctgaggactatgggcctgtggaggtgatctcccattggcaccccaacatcaccatcaacatcgtggacgaccacacgccgtgggtgaagggcagtgtgccccctcccctggatcaatatgtgaagttcgacgccgtgagcggtgactactatcccatcatctacttcaatgactactggaacctgcagaaggactactaccccatcaacgagagcctggccagcctgccgctccgcgtctccttctgcccactctcgctttggcgctggcagctctatgctgcccagagcaccaagtcgccctggaacttcctgggtgatgagttgtacgagcagtcagatgaggagcaggactcggtgaaggtggccctgctggagaccaacccctacctgctggcgctcaccatcatcgtgtctatcgttcacagtgtcttcgagttcctggccttcaagaatgatatccagttctggaacagccggcagtccctggagggcctgtccgtgcgctccgtcttcttcggcgttttccagtcattcgtggtcctcctctacatcctggacaacgagaccaacttcgtggtccaggtcagcgtcttcattggggtcctcatcgacctctggaagatcaccaaggtcatggacgtccggctggaccgagagcacagggtggcaggaatcttcccccgcctatccttcaaggacaagtccacgtatatcgagtcctcgaccaaagtgtatgatgatatggcattccggtacctgtcctggatcctcttcccgctcctgggctgctatgccgtctacagtcttctgtacctggagcacaagggctggtactcctgggtgctcagcatgctctacggcttcctgctgaccttcggcttcatcaccatgacgccccagctcttcatcaactacaagctcaagtctgtggcccaccttccctggcgcatgctcacctacaaggccctcaacacattcatcgacgacctgttcgcctttgtcatcaagatgcccgttatgtaccggatcggctgcctgcgggacgatgtggttttcttcatctacctctaccaacggtggatctaccgcgtcgaccccacccgagtcaacgagtttggcatgagtggagaagaccccacagctgccgcccccgtggccgaggttcccacagcagcaggggccctcacgcccacacctgcacccaccacgaccaccgccaccagggaggaggcctccacgtccctgcccaccaagcccacccagggggccagctctgccagcgagccccaggaagcccctccaaagccagcagaggacaagaaaaaggattagtcgagactggtcctcacctgctccggctcctggcgaccactacccctgcgtcccggccccctcgcctcccctccctgtcgccctttccctggacagatcaggccggggcggtgggaggcccgcctcaggtcagggcccagcgtgtgatgtaggggccggggcaggccagggtttgtttgtggaggcgctgtctgtccctctgtccctctgtgtttccagccatctcgccctgccagcccagcaccactgggaatcatggtgaagctgatgcagcgttgccgagggggtgggttgggcgg

SEQ ID NO: 120169 - DNA, 2342 bp, Homo sapiens
  Payload ID: 3562
  Gene Symbol: CLPTM1
  Gene Name: cleft lip and palate associated transmembrane protein 1
  Uniprot ID: O96005
  ENST ID: ENST00000546079
  CDS Start-End: 346-2049
aaactaagggtctctcagcagatggccgggtttagagctgtacgaagacacacagctaatgaaaaattgtggaattctcagagcccgtgaagcctagcccacggatgcgaggtgaccagcaatggcagcatcgggagggacccgccagcggagacccagcctcagaacccaccggcccagccggcacccaatgcctggcaggtcatcaaaggtgtgctgtttaggatcttcatcatctgggccatcagcagttggttccgccgagggccggcccctcaggaccaggcgggccccggaggagctccacgcgtcgccagccgcaacctgttccccaaagacactttaatgaacctgcatgtgtacatctcagagcacgagcactttacagacttcaacgccacgtcggcactcttctgggaacagcacgatcttgtgtatggcgactggactagcggcgagaactcagacggctgctacgagcactttgctgagctcgatatcccacagagcgtccagcagaacggctccatctacatccacgtttacttcaccaagagtggcttccacccagacccccggcagaaggccctgtaccgccggcttgccacagtccacatgtcccggatgatcaacaaatacaagcgcagacgatttcagaaaaccaagaacctgctgacaggagagacagaagcggacccagaaatgatcaagagggctgaggactatgggcctgtggaggtgatctcccattggcaccccaacatcaccatcaacatcgtggacgaccacacgccgtgggtgaagggcagtgtgccccctcccctggatcaatatgtgaagttcgacgccgtgagcggtgactactatcccatcatctacttcaatgactactggaacctgcagaaggactactaccccatcaacgagagcctggccagcctgccgctccgcgtctccttctgcccactctcgctttggcgctggcagctctatgctgcccagagcaccaagtcgccctggaacttcctgggtgatgagttgtacgagcagtcagatgaggagcaggactcggtgaaggtggccctgctggagaccaacccctacctgctggcgctcaccatcatcgtgtctatcgttcacagtgtcttcgagttcctggccttcaagaatgatatccagttctggaacagccggcagtccctggagggcctgtccgtgcgctccgtcttcttcggcgttttccagtcattcgtggtcctcctctacatcctggacaacgagaccaacttcgtggtccaggtcagcgtcttcattggggtcctcatcgacctctggaagatcaccaaggtcatggacgtccggctggaccgagagcacagggtggcaggaatcttcccccgcctatccttcaaggacaagtccacgtatatcgagtcctcgaccaaagtgtatgatgatatggcattccggtacctgtcctggatcctcttcccgctcctgggctgctatgccgtctacagtcttctgtacctggagcacaagggctggtactcctgggtgctcagcatgctctacggcttcctgctgaccttcggcttcatcaccatgacgccccagctcttcatcaactacaagctcaagtctgtggcccaccttccctggcgcatgctcacctacaaggccctcaacacattcatcgacgacctgttcgcctttgtcatcaagatgcccgttatgtaccggatcggctgcctgcgggacgatgtggttttcttcatctacctctaccaacggtggatctaccgcgtcgaccccacccgagtcaacgagtttggcatgagtggagaagaccccacagctgccgcccccgtggccgaggttcccacagcagcaggggccctcacgcccacacctgcacccaccacgaccaccgccaccagggaggaggcctccacgtccctgcccaccaagcccacccagggggccagctctgccagcgagccccaggaagcccctccaaagccagcagaggacaagaaaaaggattagtcgagactggtcctcacctgctccggctcctggcgaccactacccctgcgtcccggccccctcgcctcccctccctgtcgccctttccctggacagatcaggccggggcggtgggaggcccgcctcaggtcagggcccagcgtgtgatgtaggggccggggcaggccagggtttgtttgtggaggcgctgtctgtccctctgtccctctgtgtttccagccatctcgccctgccagcccagcaccactgggaatcatggtgaagctgatgcagcgttgccgagggggtgggtt

SEQ ID NO: 120170 - DNA, 638 bp, Homo sapiens
  Payload ID: 3562
  Gene Symbol: CLPTM1
  Gene Name: cleft lip and palate associated transmembrane protein 1
  ENST ID: ENST00000589347
  CDS Start-End: 1-459
ccctggaacttcctgggtgatgagttgtacgagcagtcagatgaggagcaggactcggtgaaggtggccctgctggagaccaacccctacctgctggcgctcaccatcatcgtgtctatcgttcacagtgtcttcgagttcctggccttcaagaatgatatccagttctggaacagccggcagtccctggagggcctgtccgtgcgctccgtcttcttcggcgttttccagtcattcgtggtcctcctctacatcctggacaacgagaccaacttcgtggtccaggtcagcgtcttcattggggtcctcatcgacctctggaagatcaccaaggtcatggacgtccggctggaccgagagcacagggtggcaggaatcttcccccgcctatccttcaaggacaagtccacgtatatcgagtcctcgaccaaagtgtatgatgatgcttcatcaccatgacgccccagctcttcatcaactacaagctcaagtctgtggcccaccttccctggcgcatgctcacctacaaggccctcaacacattcatcgacgacctgttcgcctttgtcatcaagatgcccgttatgtaccggatcggctgcctgcgggacgatgtggttttcttcatctacctctac

SEQ ID NO: 120171 - DNA, 572 bp, Homo sapiens
  Payload ID: 3562
  Gene Symbol: CLPTM1
  Gene Name: cleft lip and palate associated transmembrane protein 1
  ENST ID: ENST00000585961
  CDS Start-End: 518-572
gcactgggggctccttggccagagggaccttgaatacccggcccaggcagggccggaccgcccgggaggccggacggtgccgggaacagggccctgttgcgggtcggttcccctgcacgctcgagccgggcggccaccaggctcattgctcgatccggggagacagtggctcggaggggcgcaggcttgtaccttggcgcgctgggttctcaactccgcgattccatgctctgaggccgttcctagagtggtctggcgttcaggtctcgttgtagtgtttgaggtgaccagcaatggcagcatcgggagggacccgccagcggagacccagcctcagaacccaccggcccagccggcacccaatgcctggcaggtcatcaaaggtgtgctgtttaggatcttcatcatctgggccatcagcagttggttccgccgagggccggcccctcaggaccaggcgggccccggaggagctccacgcgtcgccagccgcaacctgttccccaaagacactttaatgaacctgcatgtgtacatctcagagcacgagcactttacagacttcaacgcca

SEQ ID NO: 120172 - DNA, 528 bp, Homo sapiens
  Payload ID: 3562
  Gene Symbol: CLPTM1
  Gene Name: cleft lip and palate associated transmembrane protein 1
  ENST ID: ENST00000591304
  CDS Start-End: 16-528
acccggagcgggaagatggcggcggcgcaggaggcggacggggcccgcagcgccgtggtggcggccgggggaggcagctccggtcaggtgaccagcaatggcagcatcgggagggacccgccagcggagacccagcctcagaacccaccggcccagccggcacccaatgcctggcaggtcatcaaaggtgtgctgtttaggatcttcatcatctgggccatcagcagttggttccgccgagggccggcccctcaggaccaggcgggccccggaggagctccacgcgtcgccagccgcaacctgttccccaaagacactttaatgagcgtccagcagaacggctccatctacatccacgtttacttcaccaagagtggcttccacccagacccccggcagaaggccctgtaccgccggcttgccacagtccacatgtcccggatgatcaacaaatacaagcgcagacgatttcagaaaaccaagaacctgctgacaggagagacagaagcggacccagaaatgatcaag

SEQ ID NO: 120173 - DNA, 775 bp, Homo sapiens
  Payload ID: 3562
  Gene Symbol: CLPTM1
  Gene Name: cleft lip and palate associated transmembrane protein 1
  ENST ID: ENST00000586915
  CDS Start-End: 1-630
tacaagctcaagtctgtggcccaccttccctggcgcatgctcacctacaaggccctcaacacattcatcgacgacctgttcgcctttgtcatcaagatgcccgttatgtaccggatcggctgcctgcgggacggcccacctggctgtggacgggccagcccgacctcacactgcctcccacccctctccagatgtggttttcttcatctacctctaccaacggtggatctaccgcgtcgaccccacccgagtcaacgagtttggcatgagtggagaagaccccacagctgccgcccccgtggccgaggttcccacagcagcaggggccctcacgcccacacctgcacccaccacgaccaccgccaccagggaggaggcctccacgtccctgcccaccaagcccacccagggggccagctctgccagcgagccccaggaagcccctccaaagccagcagaggacaagaaaaaggattagtcgagactggtcctcacctgctccggctcctggcgaccactacccctgcgtcccggccccctcgcctcccctccctgtcgccctttccctggacagatcaggccggggcggtgggaggcccgcctcaggtcagggcccagcgtgtgatgtaggggccggggcaggccagggtttgtttgtggaggcgctgtctgtccctctgtccctctgtgtttccagccatctcgccctgccagcccagcaccactgggaatcatggtgaagctgatgcagcgttgccgagggggtgggttgggc

SEQ ID NO: 120174 - DNA, 2234 bp, Homo sapiens
  Payload ID: 3563
  Gene Symbol: CLASRP
  Gene Name: CLK4-associating serine/arginine rich protein
  ENST ID: ENST00000221455
  CDS Start-End: 99-2123
gcggcctttcatttccgcttccggtgcgggccgcgcgcgagcgcagcggtgggaggcggcgaccagccggttgaggccccaggcttggcctcaccacaatgtggcacgaggctcggaagcatgagcggaagcttcgaggcatgatggtcgactacaagaagagggcggagcggagacgggagtattatgaaaagatcaagaaggacccagcccagttcctgcaggtacatggccgagcttgcaaggtgcacctggattctgcagtcgccctggccgctgagagccctgttaatatgatgccctggcagggggacaccaacaacatgattgaccgattcgatgtccgtgcccacctggaccacatccccgactacaccccccctctgctcaccaccatctccccagaacaggagtcggacgaacggaagtgtaactacgagcgctacagaggcctggtgcagaacgactttgccggcatctcagaggagcagtgcctgtaccagatctacattgatgagttgtacggaggcctccagagacccagcgaagatgagaagaagaagctggcagagaagaaggcttccatcggttatacctacgaggacagcacggtggccgaggtagagaaggcggcagaaaagccagaggaggaggagtcagcggccgaggaggagagcaactcggacgaagatgaggtcatccccgacatcgacgtggaggtggacgtggatgaattgaaccaggagcaggtggcagatctcaacaaacaggccacgacttatggcatggccgacggtgacttcgtcaggatgctccggaaagacaaggaggaggcagaggccatcaagcatgccaaggctcttgaggaggagaaggccatgtactcgggacgccgctctcgacgccagcggagagagtttcgggagaagcggctgaggggtcgcaagatcagcccacccagctatgcccgccgagacagccccacctatgacccctataagcggtcaccctcggagtccagctcagagtcccgctcccgctcccgctccccgaccccgggccgcgaggagaagatcacgttcatcaccagttttgggggcagcgatgaggaggcagccgcagccgctgctgccgcagcagcatcaggagtcaccacagggaagccccccgcacctccccagcctggcggccccgccccgggacgtaatgccagcgcccgccgccgctcctcctcctcctcctcctcctcttctgcctcgaggacctccagctcccgctccagctctcgctccagctcccgctctcgccgtggtgggggctactaccgttccggccgccacgcccgctcccggtcccgctcctggtcccgctcccgctcccgctcccggcgctattcccggtcccgtagccgtggccggcggcactcaggtgggggctcccgagacggacaccggtactcccgctcgcccgcccggcgtggtggttacgggccccggcgcagaagcaggagccgctcccactcaggggaccgctacaggcggggcggccggggcctcaggcaccacagcagtagccgcagccgcagcagctggtccctcagcccgtcccgcagtcgcagcctgactcgcagccgcagccatagccccagccccagccagagccgcagccgcagccgcagccgcagccagagcccctcgccatcacccgcaagagagaagctgaccaggccggccgcgtcccctgctgtgggcgagaagctgaaaaagaccgaacctgccgctggtaaagagacaggagctgccaaacccaagctgacgcctcaggagaagctgaaactgaggatgcagaaggcgctgaacaggcagttcaaggcggataagaaggcggcacaagaaaagatgatccagcaggagcatgagcggcaggagcgggaagacgagcttcgagccatggcccgcaagatccgcatgaaggagcgggaacgccgagagaaggagagagaagagtgggaacgccagtacagccggcagagccgctcaccctccccccgatacagtcgagaatacagctcttctcgaaggcgctcaaggtcccgatcccgaagcccccattaccgacattaggcagaagagtggggggtggggaggacaagggggtgggtaaggggctcaagctgtgatgctgctggttttatctctagtgaaataaagtcaaaagttatttaattcccgtca

SEQ ID NO: 120175 - DNA, 2213 bp, Homo sapiens
  Payload ID: 3563
  Gene Symbol: CLASRP
  Gene Name: CLK4-associating serine/arginine rich protein
  Uniprot ID: Q8N2M8
  ENST ID: ENST00000391952
  CDS Start-End: 74-1858
gcgggccgcgcgcgagcgcagcggtgggaggcggcgaccagccggttgaggccccaggcttggcctcaccacaatgtggcacgaggctcggaagcatgagcggaagcttcgaggcatgatggtcgactacaagaagagggcggagcggagacgggagtattatgaaaagatcaagaaggacccagcccagttcctgcaggtacatggccgagcttgcaaggtgcacctggattctgcagtcgccctggccgctgagagccctgttaatatgatgccctggcagggggacaccaacaacatgattgaccgattcgatgtccgtgcccacctggaccacatccccgactacaccccccctctgctcaccaccatctccccagaacaggagtcggacgaacggaagtgtaactacgagcgctacagaggcctggtgcagaacgactttgccggcatctcagaggagcagtgcctgtaccagatctacattgatgagttgtacggaggcctccagagacccagcgaagatgagaagaagaagctggcagagaagaaggcttccatcggttatacctacgaggacagcacggtggccgaggtagagaaggcggcagaaaagccagaggaggaggagtcagcggccgaggaggagagcaactcggacgaagatgaggtcatccccgacatcgacgtggaggtggacgtggatgaattgaaccaggagcaggtggcagatctcaacaaacaggccacgacttatggcatggccgacggtgacttcgtcaggatgctccggaaagacaaggaggaggcagaggccatcaagcatgccaaggctcttgaggaggagaaggccatgtactcgggacgccgctctcgacgccagcggagagagtttcgggagaagcggctgaggggtcgcaagatcagcccacccagctatgcccgccgagacagccccacctatgacccctataagcggtcaccctcggagtccagctcagagtcccgctcccgctcccgctccccgaccccgggccgcgaggagaagatcacgttcatcaccagttttgggggcagcgatgaggaggcagccgcagccgctgctgccgcagcagcatcaggagtcaccacagggaagccccccgcacctccccagcctggcggccccgccccgggacgtaatgccagcgcccgccgccgctcctcctcctcctcctcctcctcttctgcctcgaggacctccagctcccgctccagctctcgctccagctcccgctctcgccgtggtgggggctactaccgttccggccgccacgcccgctcccggtcccgctcctggtcccgctcccgctcccgctcccggcgctattcccggtcccgtagccgtggccggcggcactcaggtgggggctcccgagacggacaccggtactcccgctcgcccgcccggcgtggtggttacgggccccggcgcagaagcaggagccgctcccactcaggggaccgctacaggcggggcggccggggcctcaggcaccacagcagtagccgcagccgcagcagctggtccctcagcccgtcccgcagtcgcagcctgactcgcagccgcagccatagccccagccccagccagagccgcagccgcagccgcagccgcagccagagcccctcgccatcacccgcaagagagaagctgaccaggccggccgcgtcccctgctgtgggcgagaagctgaaaaagaccgaacctgccgctggtaaagagacaggagctgccaaagtcacccaagctgacgcctcaggagaagctgaaactgaggatgcagaaggcgctgaacaggcagttcaaggcggataagaaggcggcacaagaaaagatgatccagcaggagcatgagcggcaggagcgggaagacgagcttcgagccatggcccgcaagatccgcatgaaggagcgggaacgccgagagaaggagagagaagagtgggaacgccagtacagccggcagagccgctcaccctccccccgatacagtcgagaatacagctcttctcgaaggcgctcaaggtcccgatcccgaagcccccattaccgacattaggcagaagagtggggggtggggaggacaagggggtgggtaaggggctcaagctgtgatgctgctggttttatctctagtgaaataaagtcaaaagttatttaattcccgtca

SEQ ID NO: 120176 - DNA, 1941 bp, Homo sapiens
  Payload ID: 3563
  Gene Symbol: CLASRP
  Gene Name: CLK4-associating serine/arginine rich protein
  Uniprot ID: Q8N2M8
  ENST ID: ENST00000391953
  CDS Start-End: 93-1931
tttcatttccgcttccggtgcgggccgcgcgcgagcgcagcggtgggaggcggcgaccagccggttgaggccccaggcttggcctcaccacaatgtggcacgaggctcggaagcatgagcggaagcttcgaggcatgatggtcgactacaagaagagggcggagcggagacgggagtattatgaaaagatcaagaaggacccagcccagttcctgcaggagtcggacgaacggaagtgtaactacgagcgctacagaggcctggtgcagaacgactttgccggcatctcagaggagcagtgcctgtaccagatctacattgatgagttgtacggaggcctccagagacccagcgaagatgagaagaagaagctggcagagaagaaggcttccatcggttatacctacgaggacagcacggtggccgaggtagagaaggcggcagaaaagccagaggaggaggagtcagcggccgaggaggagagcaactcggacgaagatgaggtcatccccgacatcgacgtggaggtggacgtggatgaattgaaccaggagcaggtggcagatctcaacaaacaggccacgacttatggcatggccgacggtgacttcgtcaggatgctccggaaagacaaggaggaggcagaggccatcaagcatgccaaggctcttgaggaggagaaggccatgtactcgggacgccgctctcgacgccagcggagagagtttcgggagaagcggctgaggggtcgcaagatcagcccacccagctatgcccgccgagacagccccacctatgacccctataagcggtcaccctcggagtccagctcagagtcccgctcccgctcccgctccccgaccccgggccgcgaggagaagatcacgttcatcaccagttttgggggcagcgatgaggaggcagccgcagccgctgctgccgcagcagcatcaggagtcaccacagggaagccccccgcacctccccagcctggcggccccgccccgggacgtaatgccagcgcccgccgccgctcctcctcctcctcctcctcctcttctgcctcgaggacctccagctcccgctccagctctcgctccagctcccgctctcgccgtggtgggggctactaccgttccggccgccacgcccgctcccggtcccgctcctggtcccgctcccgctcccgctcccggcgctattcccggtcccgtagccgtggccggcggcactcaggtgggggctcccgagacggacaccggtactcccgctcgcccgcccggcgtggtggttacgggccccggcgcagaagcaggagccgctcccactcaggggaccgctacaggcggggcggccggggcctcaggcaccacagcagtagccgcagccgcagcagctggtccctcagcccgtcccgcagtcgcagcctgactcgcagccgcagccatagccccagccccagccagagccgcagccgcagccgcagccgcagccagagcccctcgccatcacccgcaagagagaagctgaccaggccggccgcgtcccctgctgtgggcgagaagctgaaaaagaccgaacctgccgctggtaaagagacaggagctgccaaacccaagctgacgcctcaggagaagctgaaactgaggatgcagaaggcgctgaacaggcagttcaaggcggataagaaggcggcacaagaaaagatgatccagcaggagcatgagcggcaggagcgggaagacgagcttcgagccatggcccgcaagatccgcatgaaggagcgggaacgccgagagaaggagagagaagagtgggaacgccagtacagccggcagagccgctcaccctccccccgatacagtcgagaatacagctcttctcgaaggcgctcaaggtcccgatcccgaagcccccattaccgacattaggcagaagagt

SEQ ID NO: 120177 - DNA, 2769 bp, Homo sapiens
  Payload ID: 3563
  Gene Symbol: CLASRP
  Gene Name: CLK4-associating serine/arginine rich protein
  ENST ID: ENST00000544944
  CDS Start-End: 693-2660
ctctttttctttggatgctctccccaccccgccatctagatcccatctttagacctcagcttcactctggtctccttgcaacactccctccccgtgttcccactccctctagcatcttcatcttccgccacgcccttcacctgtcctcgacctccaccttcatacaactgcactgttcccttaaaagctttctccgatttcctccacctgccttcatccttattctccttatccctctaccacccagactcatacccaaccccacgcatggcccctagtgggagccttttcagttcttctctttctcttgagctccagccttaagtgctcagggtttgccttctgaccctacttcaaacactgctgatgtttcaaaacctttcattcccgactccagcgcgtggaatctaggacacccctttcccagtgatgctcacctcagaatcacctgagggtttttcagaatgcccaagcttctagatcgaagttgttagggatggacttgaacatctggcatactgttctgcagcttcacttctgctccctgaagctaagagatgtgttgtttgggatcgactctgccaccaacttgttagatgactttgattctgcccatacgggtttcacagaccatctgactttcctggtcccttcatccctcaggttgaggccccaggcttggcctcaccacaatgtggcacgaggctcggaagcatgagcggaagcttcgaggcatgatggtcgactacaagaagagggcggagcggagacgggagtattatgaaaagatcaagaaggacccagcccagttcctgcaggtacatggccgagcttgcaaggtgcacctggattctgcagtcgccctggccgctgagagccctgttaatatgatgccctggcagggggacaccaacaacatgattgaccgattcgatgtccgtgcccacctggaccacatccccgactacaccccccctctgctcaccaccatctccccagaacaggagtcggacgaacggaagtgtaactacgagcgctacagaggcctggtgcagaacgactttgccggcatctcagaggagcagtgcctgtaccagatctacattgatgagttgtacggaggcctccagagacccagcgaagatgagaagaagaagctggcagagaagaaggcttccatcggttatacctacgaggacagcacggtggccgaggtagagaaggcggcagaaaagccagaggaggaggagtcagcggccgaggaggagagcaactcggacgaagatgaggtcatccccgacatcgacgtggaggtggacgtggatgaattgaaccaggagcaggtggcagatctcaacaaacaggccacgacttatggcatggccgacggtgacttcgtcaggatgctccggaaagacaaggaggaggcagaggccatcaagcatgccaaggctcttgaggaggagaaggccatgtactcgggacgccgctctcgacgccagcggagagagtttcgggagaagcggctgaggggtcgcaagatcagcccacccagctatgcccgccgagacagccccacctatgacccctataagcggtcaccctcggagtccagctcagagtcccgctcccgctcccgctccccgaccccgggccgcgaggagaagatcacgttcatcaccagttttgggggcagcgatgaggaggcagccgcagccgctgctgccgcagcagcatcaggagtcaccacagggaagccccccgcacctccccagcctggcggccccgccccgggacgtaatgccagcgcccgccgccgctcctcctcctcctcctcctcctcttctgcctcgaggacctccagctcccgctccagctctcgctccagctcccgctctcgccgtggtgggggctactaccgttccggccgccacgcccgctcccggtcccgctcctggtcccgctcccgctcccgctcccggcgctattcccggtcccgtagccgtggccggcggcactcaggtgggggctcccgagacggacaccggtactcccgctcgcccgcccggcgtggtggttacgggccccggcgcagaagcaggagccgctcccactcaggggaccgctacaggcggggcggccggggcctcaggcaccacagcagtagccgcagccgcagcagctggtccctcagcccgtcccgcagtcgcagcctgactcgcagccgcagccatagccccagccccagccagagccgcagccgcagccgcagccgcagccagagcccctcgccatcacccgcaagagagaagctgaccaggccggccgcgtcccctgctgtgggcgagaagctgaaaaagaccgaacctgccgctggtaaagagacaggagctgccaaagtcatcaaggcggataagaaggcggcacaagaaaagatgatccagcaggagcatgagcggcaggagcgggaagacgagcttcgagccatggcccgcaagatccgcatgaaggagcgggaacgccgagagaaggagagagaagagtgggaacgccagtacagccggcagagccgctcaccctccccccgatacagtcgagaatacagctcttctcgaaggcgctcaaggtcccgatcccgaagcccccattaccgacattaggcagaagagtggggggtggggaggacaagggggtgggtaaggggctcaagctgtgatgctgctggttttatctctagtgaaataaagtcaaaagttatttaattcccgt

SEQ ID NO: 120178 - DNA, 590 bp, Homo sapiens
  Payload ID: 3563
  Gene Symbol: CLASRP
  Gene Name: CLK4-associating serine/arginine rich protein
  ENST ID: ENST00000588936
  CDS Start-End: 331-590
gcgcgagcgcagcggtgggaggcggcgaccagccgcgcgtggaatctaggacacccctttcccagtgatgctcacctcagaatcacctgagggtttttcagaatgcccaagcttctagatcgaagttgttagggatggacttgaacatctggcatactgttctgcagcttcacttctgctccctgaagctaagagatgtgttgtttgggatcgactctgccaccaacttgttagatgactttgattctgcccatacgggtttcacagaccatctgactttcctggtcccttcatccctcaggttgaggccccaggcttggcctcaccacaatgtggcacgaggctcggaagcatgagcggaagcttcgaggcatgatggtcgactacaagaagagggcggagcggagacgggagtattatgaaaagatcaagaaggacccagcccagttcctgcaggtacatggccgagcttgcaaggtgcacctggattctgcagtcgccctggccgctgagagccctgttaatatgatgccctggcagggggacaccaacaacatgattgaccgattcgatgtccgtgcccacctgga

SEQ ID NO: 120179 - DNA, 572 bp, Homo sapiens
  Payload ID: 3563
  Gene Symbol: CLASRP
  Gene Name: CLK4-associating serine/arginine rich protein
  ENST ID: ENST00000591410
  CDS Start-End: 89-334
atttccgcttccggtgcgggccgcgcgcgagcgcagcggtgggaggcggcgaccagccggttgaggccccaggcttggcctcaccacaatgtggcacgaggctcggaagcatgagcggaagcttcgaggcatgatggtcgactacaagaagagggcggagcggagacgggagtattatgaaaagatctctcagaggagcagtgcctgtaccagatctacattgatgagttgtacggaggcctccagagacccagcgaagatgagaagaagaagctggcagagaagaaggcttccatcggttatacctacgaggacagcacggtggccgaggtagagaaggcggcagaaaagccagaggaggaggagtcagcggccgaggaggagagcaactcggacgaagatgaggtcatccccgacatcgacgtggaggtggacgtggatgaattgaaccaggagcaggtggcagatctcaacaaacaggccacgacttatggcatggccgacggtgacttcgtcaggatgctccggaaagacaaggaggaggcagaggccatcaagcatgccaaggctct

SEQ ID NO: 120180 - DNA, 867 bp, Homo sapiens
  Payload ID: 3563
  Gene Symbol: CLASRP
  Gene Name: CLK4-associating serine/arginine rich protein
  ENST ID: ENST00000587112
  CDS Start-End: 1-567
aagaagagggcggagcggagacgggagtattatgaaaagatcaagaaggacccagcccagttcctgcaggtacatggccgagcttgcaaggtgcacctggattctgcagtcgccctggccgctgagagccctgttaatatgatgccctggcagggggacaccaacaacatgattgaccgattcgatgtccgtgcccacctggaccacatccccgactacaccccccctctgctcaccaccatctccccagaacaggagtcggacgaacggaagtgtaactacgagcgctacagaggcctggtgcagaacgactttgccggcatctcagaggagcagtgcctgtaccagatctacattgatgagttgtacggaggcctccagagacccagcgaagatgagaagaagaagctggcagagaagaaggcttccatcggttatacctacgaggacagcacggtggccgaggtagagaaggcggcagaaaagccagaggaggaggagtcagcggccgaggaggagagcaactcggacgaagatgagacgtggaggtggacgtggatgaattgaaccaggagcaggtggcagatctcaacaaacaggccacgacttatggcatggccgacggtgacttcgtcaggatgctccggaaagacaaggaggaggcagaggccatcaagcatgccaaggctcttgaggaggagaaggccatgtactcgggacgccgctctcgacgccagcggagagagtttcgggagaagcggctgaggggtcgcaagatcagcccacccagctatgcccgccgagacagccccacctatgacccctataagcggtcaccctcggagtccagctcagagtcccgctccc

SEQ ID NO: 120181 - DNA, 506 bp, Homo sapiens
  Payload ID: 3563
  Gene Symbol: CLASRP
  Gene Name: CLK4-associating serine/arginine rich protein
  ENST ID: ENST00000591904
  CDS Start-End: 1-396
cccaagctgacgcctcaggagaagctgaaactgaggatgcagaaggcgctgaacaggcagttcaaggcggataagaaggcggcacaagaaaagatgatccagcaggagcatgagcggcaggagcgggaagacgagcttcgagccatggcccgcaagatccgcatgaaggtgttggaagcacctgccctccctgagttcagtgtgtccagtgttcccggccagatgctcatgccatgccttcgcagggagcgggaacgccgagagaaggagagagaagagtgggaacgccagtacagccggcagagccgctcaccctccccccgatacagtcgagaatacagctcttctcgaaggcgctcaaggtcccgatcccgaagcccccattaccgacattaggcagaagagtggggggtggggaggacaagggggtgggtaaggggctcaagctgtgatgctgctggttttatctctagtgaaataaagtcaaaagttatttaattcccgtc

SEQ ID NO: 120182 - DNA, 10304 bp, Homo sapiens
  Payload ID: 3564
  Gene Symbol: CLOCK
  Gene Name: clock circadian regulator
  Uniprot ID: O15516
  ENST ID: ENST00000309964
  CDS Start-End: 252-2792
agctgattctatcacattgtaagatgcctttggataattctacagtcctcttaaatgaatctttagaacttggcaagtctcactagataccttcaatcatcattttgagctcaaagaattctgagacttatggttggtcatatagaagagtaccttgaacctatagtttcctgaagaatcagtttaaaagatccaaggagtacaaaaggagaagtacaaatgtctactacaagacgaaaacgtagtatgttatgttgtttaccgtaagctgtagtaaaatgagctcgattgttgacagagatgacagtagtatttttgatgggttggtggaagaagatgacaaggacaaagcgaaaagagtatctagaaacaaatctgaaaagaaacgtagagatcaatttaatgttctcattaaagaactgggatccatgcttcctggtaatgctagaaagatggacaaatctactgttctgcagaaaagcattgattttttacgaaaacataaagaaatcactgcacagtcagatgctagtgaaattcgacaggactggaaacctacattccttagtaatgaagagtttacacaattaatgttagaggctcttgatggtttttttttagcaatcatgacagatggaagcataatatatgtgtctgagagtgtaacttcattacttgaacatttaccatctgatcttgtggatcaaagtatatttaattttatcccagaaggggaacattcagaggtttataaaatactctctactcatctgctggaaagtgattcattaaccccagaatatttaaaatcaaaaaatcagttagaattctgttgtcacatgctgcgaggaacaatagacccaaaggagccatctacctatgaatatgtaaaatttataggaaatttcaaatctttaaacagtgtatcctcttcagcacacaatggttttgaaggaactatacaacgcacacataggccatcttatgaagatagagtttgttttgtagctactgtcaggttagctacacctcagttcatcaaggaaatgtgcactgttgaagaacccaatgaagagtttacatctagacatagtttagaatggaagtttctgtttctagatcacagggcaccacccataatagggtatttgccatttgaagttctgggaacatcaggctatgattactatcatgtggatgacctagaaaatttggcaaaatgtcatgagcacttaatgcaatatgggaaaggcaaatcatgttattataggttcctgactaaggggcaacagtggatttggcttcagactcattattatatcacttaccatcagtggaattcaaggccagagtttattgtttgtactcacactgtagtaagttatgcagaagttagggctgaaagacgacgagaacttggcattgaagagtctcttcctgagacagctgctgacaaaagccaagattctgggtcagataatcgtataaacacagtcagtctcaaggaagcattggaaaggtttgatcacagcccaaccccttctgcctcttctcggagttcaagaaaatcatctcacacggccgtctcagacccttcctcaacaccaaccaagatcccgacggatacgagcactccacccaggcagcatttaccagctcatgagaagatggtgcaaagaaggtcatcatttagtagtcagtccataaattcccagtctgttggttcatcattaacacagccagtgatgtctcaagctacaaatttaccaattccacaaggcatgtcccagtttcagttttcagctcaattaggagccatgcaacatctgaaagaccaattggaacaacggacacgcatgatagaagcaaatattcatcggcaacaagaagaactaagaaaaattcaagaacaacttcagatggtccatggtcaggggctgcagatgtttttgcaacaatcaaatcctgggttgaattttggttccgttcaactttcttctggaaattcatctaatatccagcaacttgcacctataaatatgcaaggccaagttgttcctactaaccagattcaaagtggaatgaatactggacacattggcacaactcagcacatgatacaacaacagactttacagagtacatcaactcagagtcaacaaaatgtactgagtgggcacagtcagcaaacatctctacccagtcagacacagagcactcttacagccccactgtataacactatggtgatttctcagcctgcagccggaagcatggtccagattccatctagtatgccacaaaacagcacccagagtgctgcagtaactacattcactcaggacaggcagataagattttctcaaggtcaacaacttgtgaccaaattagtgactgctcctgtagcttgtggggcagtcatggtacctagtactatgcttatgggccaggtggtgactgcatatcctacttttgctacacaacagcaacagtcacagacattgtcagtaacgcagcagcagcagcagcagagctcccaggagcagcagctcacttcagttcagcaaccatctcaggctcagctgacccagccaccgcaacaatttttacagacttctaggttgctccatgggaatccctcaactcaactcattctctctgctgcatttcctctacaacagagcaccttccctcagtcacatcaccagcaacatcagtctcagcaacagcagcaactcagccggcacaggactgacagcttgcccgacccttccaaggttcaaccacagtagcacacgtgcttcctctcttgacatcaagggaggaaggggatggcccattaagagttactcagatgacctgaggaaaggagggaaagttccagcagtttcatgagatgcagtattgagtgttctagttcctggaattagttggcagagaaaatgctgcctagtgctacagatgtacattaaataccagccagcaggaggtgatcataggggcatagccagttctgacagtgttttaggtgcctggatattttttgatggaaaaagaatatattgccaaatattaagaagctcagctatgaaatgacctccagggaatcagaaaggcactaatgatgttagtaacttttagtggttctgtgcctcttatcaagtgttacagaggacataccactgccatgtcaggggtttgcttacagtgatgccatgaagacagtccagtagacttggtagcgaccccctcccccaacccctctcccttttcagataatgatggaacagtaattactttcagaatgttgtgtgggttcaaattctctatgtacagatgatgtaaaaatatgtatatgtctagataaaaggagagaaagcaaaacattttgtatgctgcatgaaagcgttatctcttccttacaggtgtgagcacctttcctgaaattctgacaccatgtgcaaactgatccatcctgtttttccttttgtttacaacacagtagtgttctgttcacttttccggggcacaagtttttttgttcatactttggctgtgatgtcacagtttgttcagtgaggtatgatgtgctgctgggaatggattttttttttcaggttaaattattgatacaacaggattttcaagttattcagaaatatccctcatttcattatttttcaattatgtttgaaaataggatttgcactgctttattttaggtggctgggagttttgattgcatattttgttatagttcatagttggaaatatttgcgtaaatggttttcaacaagcctgaaagtaatttcaagaatgtttcagttatagaggtaaaatttgcacacaaaacatcttaggcactttttaacattctcaatcatgggaattttaacttttgggatttgttgaaatcttttttattatccttcacaatttcaatgcttcttttagtcagaaatgattcagggttatttgaggggaaaaaaccccatagtgccttgattttaattcaggtgataactcaccatcttgaagtcattgtccggtttccgtagcagttttgaaaccttagtacctttttaacagcatgtgggtgtcagtgtcattattagtctcctaataagttcctctgaagactgctatcagtctcttggactggaggtacaaataatttagaaataaaagatgataacctaacactatcatagttattaatgtgatcctaaaattgtttcctaaatcagcatttttctttagtcatttaagaatttaccagaaatatttgctcaatatgatcttgatattcctacaaagaaaaaagaaggggtagggatttggctatgccttcactacaacattagaatattgtaactcacatgccttctaaacgtgaactaagatttcctttggcaatatcatattctaaaagtaataaattccaatacaagttacatacatttaaaaaacattttacagattttatggtactaatgaaatttacagtgatagaacaaaagaggattagtagaaaatacattattagaatataaaaaatgttattactgaggaaagggaggagaggacaagtgtaataaatcaaaattgacctcaaaagaaaatgtgtaacagagttgaggttgttaaaacagaaaaggttctgaataatgaagattaacctaatgcagaattgctaggtaaagaggtcaggggaatgctaagccagttcttaagacttctctgtcctctgctttgctgttatccttaaggcatatactttgtctttctgcagaaaattctacctggctacaattactttgaacattaatgttgaaaaagaaaacaaccaaagaaaattggtacttacccttctacaaaagaagtgtgactagatatcaatcagtaattaacatatcaaggagctcttctagctaaatgaccatccagtagagatttcccacattcccatgaatatcaagaatagttgtcagaatatgtatgtacctgagcatatgtacacagacaagggggatgttgtggaatatggcaatagcattgttcttctcccctttcaaattgcctttcttgaccttatgccattccatatatatctgagttgtgcctcatttatttattggcaatacctagtgatacggatttagctaacaaaagatatgaagaactattatattgaggcctgtcctctacataccacacttaaaagatggtgaactgtgagtactacttaggttgacagcaacaaagcataagacaagccccaggtaaacgtctaaactgtttactcacattgtcctactccagccccttcaattatttcccatctccacaaatagtcgggggaaaaaattaaaattttcctttatgattcttactgttcttcgcagctcatcttttcctgcttagaattaaccattgctaatttaaaggagcagctagctgcttttctgtcagtctgaagcgtagtagtggaagaggtagtaagcaccagctgcctctttgctgctttgttttcctcctgattctcttaaatttgggttgcaaagctatcccgccccccaccctgccccatgaaacttgagcattcaaatgaagattcagcagtgtctgttcttcatttctatagccaaagctgttagttaaaatcccaaatctatagcatttaaagataccaaatagaaacaccttccagctttaaaaaaaaaaaaaaaaaagtcttccctctgctttattctcactttcttaaaaacacttattctgggtggtactttttaggtaagaaactactgagtttcaggaaaaatgctagctactctgcagttaccgtgctttggacttgcagttatcatagttttgggagagtcagtattgtttaacaaatgcaagtgagaactagaagggttaataaagttgctccttagagtggtgtcaaaccagaaccgagacacttaaaaagtacttcattttttgaatggaaaatattggagaaaagtatgggagatgcaggtagcatgtgagtaaatactacggtctagccttcgagcatcccaaattccgggggtaacttgacagtgctgtgctctcctttgtcatttatatctggcttaggaatggaatagtaataacaagatgccagtgatttggaatagtttgttatagaacattcagtgcaaaatagtgaaaatgtttggtcttcagaagtgctgtagttgttggtcattgccttaaagcagtctgcttgacgctaggagcactgaagcagtccagctccatcaagagcactgttgaagggagaagaacccttgttcaggaagccttagaaagggatccttaaaatagtactctacgcagacaagtgaaaattcttttaaactggatattactcaacatgttttcagatgtttccactacattgaggcaaactttttaaaagtggaatgcaaatagcattttactttagtatttctgcttttttctttctgtttctttggtaattgaaagtttgttgatgaatatttgtgtaaaacgcattcaagtctataacctttccaattacctgtggcccttagtcccacaggagtccctgttggaagggggtaaacactggatattaatgttgctgagtgagtctttctagccaggacaagctgattggaatttttgaatggtagagaagaaacagcacaaaggcacttgccattttaagtgtttggagaaagagaaccttttaagtttggattgggtgagctttcttctaaaaggagcttctgaagtaattgcaaaggaatagaatcgactatttttatagtatatttaatatatttgtatataactataataggaaccctctacatgcctcccacttttctaatttacttccccttttgccatagcactagtatagcctcatccgcatgggtaatgtgcctattgtcagcctaccaaaagatagtgctgctgctttatgagacaggtgagaagacccaactctcatgcctggggatcctttacggaaggaatagcacacacttttaaaacaacataccacagtctaaaagcatcattttgaaatgtaacaagcactttattgcaattactcattttgataaagtttattcttaggcgttaaccatttctaaaggatccccaaatcatcacttacttaggtgaaattatataaaatgacacatttctgagaaatgtttaggtccagtgaaccgtagttggtttatgggagtgatttcaagatagccaaatgaactttgatttttgttttgaatgtggtggagtcaagagattgtagatgcctagtttgatttaaacactattgtaaacctatcttgcctattgtgtggacaccaaaagagaccaatgagcctgtttatttttcagaggtctaggaaaattgcatccgtgtgagtagatgtacagaactaatctaaaagtgattgctagtaacattttagaatataataatttcaagaattattctgagtgttttaaatgtgccctgaaatgttggcatgtcatttcagcatttccatttgaattgctcttgtaatatttttgcacaaaaaggactgagaaaaagaatactttggttaaaggaaaaaaatagtataatttggtctttaattttaatgtctcctgtggaaacactggggatgaattttgttggcacagttattcaggatatttaaaacagtgttgaacagttcacaagaaattaagcaaacttggattttaaaaattaaaatactttctttccatgtgactgttttgcatagttttttccccctatgtcataacactacattccttgtttttcttaaataaaatactctgcaggttttgttgtgagtgtttataacagtattttgtaagctgcctgggtttcctcagggaaacattatttagtggaataggatatagtttatggagagacaactaagtgaaattccatcaccaccaccagcaaacactgaggtgctgcattaagtgacaatcaaactagtaagtatttatgaaagaatttagaaaggggttcaaagaagcaattgcttttaaagcagttctctggggttcttgaataaaaatggctaaatgtatttatttatattttaaaatacctgtgtgttctgttttctcatcaaagtgatttcggtgtcatgtatttaatgtgtggtttgttttgttttgcaccatattcttcttagggaactggctctgatttggggtgcagtcaccaactctcatgataatctttacggacagtctgaatctactttacttcaggacggcagtggaggggccaactccagatgcccctgcacttccctcctcaagtcatctaagaaagaattttagaaataactcctttcaaatctgattcatacagttccaacctttttctagtttcacttgctgccttctttgttttatgggcactttttgtgtgattacttccccaacacagtcaaaggccagtatgacagaaccaatggcacatgatgcctctattttgcccatttggggaaatgttagtaaaagaaatagcatcttttaatggctgtcattatcatatccatattaaaatccatttaaagttcttaaatttggcggaataatgtatacaggctgtaaacttctacaaaaaatgtttgctgtctttaatatggtgtcaagttacttggtcctttgaaaacaaaacaaaacttccatacacagcactgcccagtaaagcagtgttggaatattggaaacctagacatttgaggatccttcttgctcacaagcattggaacagaatcctccactttaggactcagagaagctatggagtcccacaggctaggtatagcacacaacttagagaacggtagttaaagcacgtcaaccacaattgaatttaatgatctaaaaaatatttcttaactctgagggttaaactgaagatacgttttcaaataaaagcttttaaatttcttaggaaacaaactgtgacatcgcttttaaaaatgacattcaaatgtttataatgtgtgtttttgagttggcttggactagtgcaagttcactgctggcaatggttatgccagtagttaagttaaaataagttgttaccttcagattgatgtcttgtataaccagacaatcatcttcaagcaaaaaaattggccaggaaatgtctttttaaaaaaaaaaaaaaaaaaaaagatgtgtcagccagaacagttaccattcagaccatactggaatgattttgaaatctttactatggtttaagttggggaaggcctcagtatggcattttcatattcactctatgtaaagattgaagcccaaagatgagttaaattcagtgctgtattgaaaccagtcagtgcaaaaaaaaaaaaaaagttttacctttgtaaatttttcattgttaacatcagttggtagttgttaaaacatgcaccaaattctttataatgttctgtgtggttctcaatgtgatattcttgacattgctgtccttactgcttggttcttggttttaaattaaaaagtagatgtagctcatcatttttacttccaaaacggtggagctaaaaacggctaattgatcttgagataagaataccctttactaaggcaaagatttaattgaaatccaaaatgatttatagaaacgaaaggcattttccatttgttgtcttctgccgaaattctgaattgcatacacacatgaaggataatgaatggtttcaacggtgctatattaggttctctgattttcatgacctatgtatgtttggaaatacaatattgtataaaatgtggatcgttttgttaccgatttaatattgccattttaatttggtgtaacaattggttacacttgtttttcaaagctatcctttgaggagaaagtcaaaatgtgttgttagcctacctccactcaggcctcttgctgtgtaatcattattccaggttatgatgtgcatagcttttaaaactgcgtgtactattattctgctctttcccatactcttgtcatgtattcagaacctaaacttatagcaaaagagccaagcagtagcagtttttgtaaatgtaaaaataattagatccagactttgtttccttcaattttaaaaataaaaaatacctcagtgctatgtttttcagttatcacctgcatttctcaaaaaataacacctgcttcatgtggcacataacttgtaagaatcacattttggattttaaagaaagactattaaatattttaagatcactatcaa

SEQ ID NO: 120183 - DNA, 4059 bp, Homo sapiens
  Payload ID: 3564
  Gene Symbol: CLOCK
  Gene Name: clock circadian regulator
  Uniprot ID: O15516
  ENST ID: ENST00000381322
  CDS Start-End: 927-3467
gtctgactccagcgaccgcgcgcgggttcgagggttggcggcgaggcgctcggtttctcttcttccgtccacccgcgcttcccgttccccgtcaccgccgctggcgtttgtagatttctttccgccagtgaagctgggttttctggagttggctctggcgctctggcccctggagtgtaatttcctacacgcagcgccgcagagtttatattctttgaaagtgtttgtagctttgtagaggtcctcttgttgatggtaggtgagcctaattctgcaagataaaagcctagtctctgacctggcagatgaaagatcaaatcagattgtggtttcctgctattagaatgccgtgctattagactttaaggctttttagccttctttaaaaaataaaaaaatttttacagtggaagaaaagcacaagaagtaaacttttacagtcgttgatttgactataacgctgatccccccaaatcaaagaatttttacttgttcctgcaaagctgctggagctcagaagctgattctatcacattgtaagatgcctttggataattctacagtcctcttaaatgaatctttagaacttggcaagtctcactagataccttcaatcatcattttgagctcaaagaattctgagacttatggttggtcatatagaagagtaccttgaacctatagtttcctgaagaatcagtttaaaagatccaaggagtacaaaaggcagttattggaggaattactcaacaaaaataaagaagtaaactaaaaaagatgaaggcataggatacaagtaacagggaatatgacctaactagagacccagggaatcaccaggatgatgatgaataatgatcacaagaagacagcttgtcctcaggagaagtacaaatgtctactacaagacgaaaacgtagtatgttatgttgtttaccgtaagctgtagtaaaatgagctcgattgttgacagagatgacagtagtatttttgatgggttggtggaagaagatgacaaggacaaagcgaaaagagtatctagaaacaaatctgaaaagaaacgtagagatcaatttaatgttctcattaaagaactgggatccatgcttcctggtaatgctagaaagatggacaaatctactgttctgcagaaaagcattgattttttacgaaaacataaagaaatcactgcacagtcagatgctagtgaaattcgacaggactggaaacctacattccttagtaatgaagagtttacacaattaatgttagaggctcttgatggtttttttttagcaatcatgacagatggaagcataatatatgtgtctgagagtgtaacttcattacttgaacatttaccatctgatcttgtggatcaaagtatatttaattttatcccagaaggggaacattcagaggtttataaaatactctctactcatctgctggaaagtgattcattaaccccagaatatttaaaatcaaaaaatcagttagaattctgttgtcacatgctgcgaggaacaatagacccaaaggagccatctacctatgaatatgtaaaatttataggaaatttcaaatctttaaacagtgtatcctcttcagcacacaatggttttgaaggaactatacaacgcacacataggccatcttatgaagatagagtttgttttgtagctactgtcaggttagctacacctcagttcatcaaggaaatgtgcactgttgaagaacccaatgaagagtttacatctagacatagtttagaatggaagtttctgtttctagatcacagggcaccacccataatagggtatttgccatttgaagttctgggaacatcaggctatgattactatcatgtggatgacctagaaaatttggcaaaatgtcatgagcacttaatgcaatatgggaaaggcaaatcatgttattataggttcctgactaaggggcaacagtggatttggcttcagactcattattatatcacttaccatcagtggaattcaaggccagagtttattgtttgtactcacactgtagtaagttatgcagaagttagggctgaaagacgacgagaacttggcattgaagagtctcttcctgagacagctgctgacaaaagccaagattctgggtcagataatcgtataaacacagtcagtctcaaggaagcattggaaaggtttgatcacagcccaaccccttctgcctcttctcggagttcaagaaaatcatctcacacggccgtctcagacccttcctcaacaccaaccaagatcccgacggatacgagcactccacccaggcagcatttaccagctcatgagaagatggtgcaaagaaggtcatcatttagtagtcagtccataaattcccagtctgttggttcatcattaacacagccagtgatgtctcaagctacaaatttaccaattccacaaggcatgtcccagtttcagttttcagctcaattaggagccatgcaacatctgaaagaccaattggaacaacggacacgcatgatagaagcaaatattcatcggcaacaagaagaactaagaaaaattcaagaacaacttcagatggtccatggtcaggggctgcagatgtttttgcaacaatcaaatcctgggttgaattttggttccgttcaactttcttctggaaattcatctaatatccagcaacttgcacctataaatatgcaaggccaagttgttcctactaaccagattcaaagtggaatgaatactggacacattggcacaactcagcacatgatacaacaacagactttacagagtacatcaactcagagtcaacaaaatgtactgagtgggcacagtcagcaaacatctctacccagtcagacacagagcactcttacagccccactgtataacactatggtgatttctcagcctgcagccggaagcatggtccagattccatctagtatgccacaaaacagcacccagagtgctgcagtaactacattcactcaggacaggcagataagattttctcaaggtcaacaacttgtgaccaaattagtgactgctcctgtagcttgtggggcagtcatggtacctagtactatgcttatgggccaggtggtgactgcatatcctacttttgctacacaacagcaacagtcacagacattgtcagtaacgcagcagcagcagcagcagagctcccaggagcagcagctcacttcagttcagcaaccatctcaggctcagctgacccagccaccgcaacaatttttacagacttctaggttgctccatgggaatccctcaactcaactcattctctctgctgcatttcctctacaacagagcaccttccctcagtcacatcaccagcaacatcagtctcagcaacagcagcaactcagccggcacaggactgacagcttgcccgacccttccaaggttcaaccacagtagcacacgtgcttcctctcttgacatcaagggaggaaggggatggcccattaagagttactcagatgacctgaggaaaggagggaaagttccagcagtttcatgagatgcagtattgagtgttctagttcctggaattagttggcagagaaaatgctgcctagtgctacagatgtacattaaataccagccagcaggaggtgatcataggggcatagccagttctgacagtgttttaggtgcctggatattttttgatggaaaaagaatatattgccaaatattaagaagctcagctatgaaatgacctccagggaatcagaaaggcactaatgatgttagtaacttttagtggttctgtgcctcttatcaagtgttacagaggacataccactgccatgtcaggggtttgcttacagtgatgccatgaagacagtccagtagacttggtagcgaccccctcccccaacccctctcccttttcagataatgatggaacagtaattactttcagaatgttgtgtgggttcaaattctctatgtacagatgatgtaaaaatatgtatatgtctagataaaaggagagaaagcaaaa

SEQ ID NO: 120184 - DNA, 746 bp, Homo sapiens
  Payload ID: 3564
  Gene Symbol: CLOCK
  Gene Name: clock circadian regulator
  ENST ID: ENST00000435527
  CDS Start-End: 201-746
cgagtcaccgcagcgggagacctgggtgggggagggaagaagccggagccgccgcaagccacacgaattctgagacttatggttggtcatatagaagagtaccttgaacctatagtttcctgaagaatcagtttaaaagatccaaggagtacaaaaggagaagtacaaatgtctactacaagacgaaaacgtagtatgttatgttgtttaccgtaagctgtagtaaaatgagctcgattgttgacagagatgacagtagtatttttgatgggttggtggaagaagatgacaaggacaaagcgaaaagagtatctagaaacaaatctgaaaagaaacgtagagatcaatttaatgttctcattaaagaactgggatccatgcttcctggtaatgctagaaagatggacaaatctactgttctgcagaaaagcattgattttttacgaaaacataaagaaatcactgcacagtcagatgctagtgaaattcgacaggactggaaacctacattccttagtaatgaagagtttacacaattaatgttagaggctcttgatggtttttttttagcaatcatgacagatggaagcataatatatgtgtctgagagtgtaacttcattacttgaacatttaccatctgatcttgtggatcaaagtatatttaattttatcccagaaggggaacattcagaggtttataaaatactctctactcatctgctggaaagtgattcattaacccca

SEQ ID NO: 120185 - DNA, 3580 bp, Homo sapiens
  Payload ID: 3564
  Gene Symbol: CLOCK
  Gene Name: clock circadian regulator
  Uniprot ID: O15516
  ENST ID: ENST00000513440
  CDS Start-End: 647-3187
tttctagtaaccggcgccgttcccggccggggcagggaacggtgcgcctgcagagccagatttcggcccaaggggcgcgggagtctcttcgggcgtccgggatcccctggcgcggctccgtgctgcctaacggggcaagtcgcatgcgcaccgagccgcgctggggaaagggagagtgaggggaggggcgagcgcagagcctccgccggccgtctgagcccgcggggtcgctgacgacgcatgcgccgggagggggcgcaatcacggactcggcttgcggctgccggtttaaaaaaggaaaccccggagagcgagagcgcgaaggaaatctggccgccgccgccgcgagcgctcccgaatttttacttgttcctgcaaagctgctggagctcagaagctgattctatcacattgtaagatgcctttggataattctacagtcctcttaaatgaatctttagaacttggcaagtctcactagataccttcaatcatcattttgagctcaaagaattctgagacttatggttggtcatatagaagagtaccttgaacctatagtttcctgaagaatcagtttaaaagatccaaggagtacaaaaggagaagtacaaatgtctactacaagacgaaaacgtagtatgttatgttgtttaccgtaagctgtagtaaaatgagctcgattgttgacagagatgacagtagtatttttgatgggttggtggaagaagatgacaaggacaaagcgaaaagagtatctagaaacaaatctgaaaagaaacgtagagatcaatttaatgttctcattaaagaactgggatccatgcttcctggtaatgctagaaagatggacaaatctactgttctgcagaaaagcattgattttttacgaaaacataaagaaatcactgcacagtcagatgctagtgaaattcgacaggactggaaacctacattccttagtaatgaagagtttacacaattaatgttagaggctcttgatggtttttttttagcaatcatgacagatggaagcataatatatgtgtctgagagtgtaacttcattacttgaacatttaccatctgatcttgtggatcaaagtatatttaattttatcccagaaggggaacattcagaggtttataaaatactctctactcatctgctggaaagtgattcattaaccccagaatatttaaaatcaaaaaatcagttagaattctgttgtcacatgctgcgaggaacaatagacccaaaggagccatctacctatgaatatgtaaaatttataggaaatttcaaatctttaaacagtgtatcctcttcagcacacaatggttttgaaggaactatacaacgcacacataggccatcttatgaagatagagtttgttttgtagctactgtcaggttagctacacctcagttcatcaaggaaatgtgcactgttgaagaacccaatgaagagtttacatctagacatagtttagaatggaagtttctgtttctagatcacagggcaccacccataatagggtatttgccatttgaagttctgggaacatcaggctatgattactatcatgtggatgacctagaaaatttggcaaaatgtcatgagcacttaatgcaatatgggaaaggcaaatcatgttattataggttcctgactaaggggcaacagtggatttggcttcagactcattattatatcacttaccatcagtggaattcaaggccagagtttattgtttgtactcacactgtagtaagttatgcagaagttagggctgaaagacgacgagaacttggcattgaagagtctcttcctgagacagctgctgacaaaagccaagattctgggtcagataatcgtataaacacagtcagtctcaaggaagcattggaaaggtttgatcacagcccaaccccttctgcctcttctcggagttcaagaaaatcatctcacacggccgtctcagacccttcctcaacaccaaccaagatcccgacggatacgagcactccacccaggcagcatttaccagctcatgagaagatggtgcaaagaaggtcatcatttagtagtcagtccataaattcccagtctgttggttcatcattaacacagccagtgatgtctcaagctacaaatttaccaattccacaaggcatgtcccagtttcagttttcagctcaattaggagccatgcaacatctgaaagaccaattggaacaacggacacgcatgatagaagcaaatattcatcggcaacaagaagaactaagaaaaattcaagaacaacttcagatggtccatggtcaggggctgcagatgtttttgcaacaatcaaatcctgggttgaattttggttccgttcaactttcttctggaaattcatctaatatccagcaacttgcacctataaatatgcaaggccaagttgttcctactaaccagattcaaagtggaatgaatactggacacattggcacaactcagcacatgatacaacaacagactttacagagtacatcaactcagagtcaacaaaatgtactgagtgggcacagtcagcaaacatctctacccagtcagacacagagcactcttacagccccactgtataacactatggtgatttctcagcctgcagccggaagcatggtccagattccatctagtatgccacaaaacagcacccagagtgctgcagtaactacattcactcaggacaggcagataagattttctcaaggtcaacaacttgtgaccaaattagtgactgctcctgtagcttgtggggcagtcatggtacctagtactatgcttatgggccaggtggtgactgcatatcctacttttgctacacaacagcaacagtcacagacattgtcagtaacgcagcagcagcagcagcagagctcccaggagcagcagctcacttcagttcagcaaccatctcaggctcagctgacccagccaccgcaacaatttttacagacttctaggttgctccatgggaatccctcaactcaactcattctctctgctgcatttcctctacaacagagcaccttccctcagtcacatcaccagcaacatcagtctcagcaacagcagcaactcagccggcacaggactgacagcttgcccgacccttccaaggttcaaccacagtagcacacgtgcttcctctcttgacatcaagggaggaaggggatggcccattaagagttactcagatgacctgaggaaaggagggaaagttccagcagtttcatgagatgcagtattgagtgttctagttcctggaattagttggcagagaaaatgctgcctagtgctacagatgtacattaaataccagccagcaggaggtgatcataggggcatagccagttctgacagtgttttaggtgcctggatattttttgatggaaaaagaatatattgccaaatattaagaagctcagctatgaaatgacctccagggaatcagaaaggcactaatgatgttagtaacttttagtggttctgtgcctcttatcaagtgttacagaggacataccactg

SEQ ID NO: 120186 - DNA, 4486 bp, Homo sapiens
  Payload ID: 3565
  Gene Symbol: CIPC
  Gene Name: CLOCK-interacting pacemaker
  Uniprot ID: Q9C0C6
  ENST ID: ENST00000361786
  CDS Start-End: 318-1517
cttccggcgggggcggggaaagggcgcatttccaagggcccttctaggagaacagcgtgcggtctccatggtgccgggtcatccgagtcgggtcacgtggctggcgaaagccgtcgcggaggcgtggggaggagaaatgggcgggaggctgtggggatagcgagacacccagcgacgacgaggttgtcatggtgccgcggggccgtgctcgcgcatgcgccacctgacccacaggccggtcgtggagctgcgaccccggccctagggcagtccagatgaaaagagtaccaatgaatctgcctccagctgaataaaccatggagaggaaaaacccatccagagagagccccagaagactctctgccaaagtaggcaaaggcacagagatgaagaaagtggctcgtcagcttgggatggctgctgctgagtcagacaaggactctggcttttcagatgggagctcggaatgtctgagctctgcagagcagatggagtccgaggacatgctgagcgccttaggctggagcagagaagacaggccgaggcagaactccaaaactgcaaagaatgccttccctaccctgtctcccatggtcgtcatgaagaatgtgcttgtcaaacagggcagcagctcatcccagctccagtcgtggactgtccagccctcctttgaagtgatctcagcacagccacagctcttattccttcatccacctgtaccatctcctgtcagtccatgtcacactggtgagaaaaagtccgactccaggaactacttgcccattctgaattcttacaccaaaatagccccacatccaggcaaaaggggcctttcccttggcccagaagaaaaaggaacaagtggagtgcagaagaaaatctgtactgagagacttgggcctagcttgtcttccagtgagccaaccaaggctggtgctgtcccatccagtccctcgacgccagcaccacccagcgccaaacttgccgaggactcagctctgcagggtgtgccctctctggtggcaggtggaagtccacagactcttcagccggtatccagcagtcacgtggctaaagctcccagtctgaccttcgcttcccccgccagtcctgtctgcgcatcagacagcactctccatgggttagagagcaactctcccctttcaccactgtccgctaattatagctcacctttatgggctgcagagcacctctgccgcagcccagatatcttttcagagcagcggcagagcaaacataggcgctttcagaataccctagtagtcctacataaatctggtttgctggagatcactttgaaaaccaaggagttgattcgtcagaatcaggcaactcaggtagaactagaccagctaaaggagcaaacccagctgtttatagaagccaccaagagcagggcccctcaggcttgggccaagctgcaggcatctttaacacctgggtccagtaatacaggcagtgacctagaagcattctctgatcacccagccatatagcacagaggcatattttcctgttacttgagtggttcttttagctcatttgctgttacctactcctgtttcccaaagcttatgtaagagcttttccttctaaacttaaactgtgttgtggttcacttaggaagccacgtgccaatacctggctgctgtcttaactcgtagtctgggcacaggatacatatgtccccgtcccactgaggacctcagtttgggagtgcccttgagccccttttccttagcctgcaggtgcttcaatggatcatggggcaaagcaggagatgattgtgtggggctcttcctgctgtcacctcccatcatcccactctctcaccaggatcaagggtacagtaacacgaatgagcatacagagcaacacctgttgagccagggagtaggtgacacaaggaaaccttcatggatcttcccttgcctgtcttagtcacagagagaaataagaggaggttgtttgcatcccacaaggcatcgtactagttgggcgagacctaaaattccctgggcacaggttgcacctgggtgtgagcacttaatcactcaacgctttgttttcttacacttgaaaatcaagggaaagagtagtaccatctgactcctacactttcattacaagtcagatttttcttaaactagcaggcaaaaacagtacttccaaattttaaggtatggaatgaatgcagtacatctggaattgtagtcgatgaattgcttttttgacttagaagctgaagaaaatagacatagccggcatatctcatggtcaggagctggacgattctggtaacttaggctttttttctctcttcttttgaaacagtgtaacctgttttatgtctaaaaatcttaaggatagtttcagtggttcctgggatgtagtataagttaactctgctgccatcttgttttttttttttttcctttattttgataagtgattattatgcttgataaactttgaattaaatacagttgtcttgagggtatgataagtccacaaaaaattggaaagcatcttacccattttcttcacatcccaaatttttatttgttccatgtcatagtgatgggaagcagttacagagcagcgtcttctgtgtttccttcatgtgttagatattggcaacaaagccagaggtgtaatgttggttatatgaagttcatctcaaaatggagaccatgaccagagtttccagatgatacacgttcttttcagcttcattaaataggcaactatgtttctaaatagtaaagtttcaaaatattctctcaatttaaaatttcatcctcttgaaaatctttgttctttacaaaattatcttaataagttctatatggtcagcttcatcttccttttttttttttttgagatggagtttcgctcttgttgcccaggcggagtacaatggtgggatctcggctcactgcaacctccgcctcctgggttcaagtgattctcctgccacagcctcccaagtagctgggattacaggtgcctgccaccatgcccagctaatttttgtatttttagtagaaatggggttttaccgtgttggccaggctggtctcgaactcctgacctcagttgatccgcctgcctcagcctcccaaagtgctgggcttacaggcctgagccaccacgctcagctcagcttcaccctgtctgcaaagaaaagttttaccaagaccagaagttaaatatgacatttcctaggtagttgtaactctaacatagtttaaaaagtatgtggcttcagattgcctatactttgttcacaaacgtgtgatttagatatgactgatgtagaagtgaacaacttggtaacatccctagactccactcatgaacgcagaattattacctgctgtttgctttctgaaagaatttcagaaatcagagcaaatgtgtctttaggcagattcagctccttttaatatttttctcttggcccactctctttgcttcccctgaatctgtgtggtactatagcagctctactctgtgcaccatgctaggaagcttcctttttggcagaatatgtttggcagcaaagctatagagacaggtgcattcagaacatcctgggcaccagtcatgagtcttactgtgtcaaaaatctgaaaacacttgctgagaaccaaatttattccattggaaaaaccctctgtggagctataagcctcttggactcttcttcctagattaaggcttgcatttccctccctgtttcagtaaaagatgatgaaagccactatcaatcctcactgctgagtggcagggagaagcagcaccactctcagctcttttctaatcttgtaacttagtgctagaagtctctccaggctattaccatgggcatttgttctctgttggagctgtaagcagatgaacccaagtagagaagatagatcttggaaggagagatccattgagtccagaagccagatcagcaaatggaggaacctcggaggtgaccagaaagatctccatcggttgcccaaggctgtaagtagtgatggttttagcgatgaataacgtaattggctatgaagtactgtggcagagctgctgttttctgaaggtgagaagccatttttagctcagagcaacccttaagagaacttttggcagattttgttggcattattgaaatatatatagaaaagttgctgattgcaatggttatgggaatggaatttaatgacatttgtaatttattacactcattggtttttattgattatagtattgtctgactttttattttctactatggttcctttagcagaaaagtaacttttgtgcatatattgaagtggtttttcagctatgaattctttagggtagaaatttatttagcaaatgtgaattcttttgagaaagtatgaagttttgcagaaattgactgtgaaatgtcagagaaaaataaaagtcacttacttgaaaccta

SEQ ID NO: 120187 - DNA, 599 bp, Homo sapiens
  Payload ID: 3565
  Gene Symbol: CIPC
  Gene Name: CLOCK-interacting pacemaker
  ENST ID: ENST00000555611
  CDS Start-End: 133-444
gtcatggtgccgcggggccgtgctcgcgcatgcgccacctgacccacaggccggtcgtggagctgcgaccccggccctagggcagtccagatgaaaagagtaccaatgaatctgcctccagctgaataaaccatggagaggaaaaacccatccagagagagccccagaagactctctgccaaagtaggcaaaggcacagagatgaagaaagtggctcgtcagcttgggatggctgctgctgagtcagacaaggactctggcttttcagatgggagctcggaatgtctgagctctgcagagcagatggagtccgaggacatgctgagcgccttaggctggagcagagaagacaggccgaggcagaactccaaaactgcaaagaatgccttccctaccctgtctcccatggtcgtcatgaagaatgtgcttgtcaaacagcagtaatgagtagtgtgctgctctcctcctttgtcttcagggcagcagctcatcccagctccagtcgtggactgtccagccctcctttgaagtgatctcagcacagccacagctcttattccttcatccacctgtaccatctcctgtcagtccatgtcaca

SEQ ID NO: 120188 - DNA, 581 bp, Homo sapiens
  Payload ID: 3565
  Gene Symbol: CIPC
  Gene Name: CLOCK-interacting pacemaker
  ENST ID: ENST00000555200
  CDS Start-End: 158-581
agatgcaacgtgggctggtgcgaatgggggaccagacgtggaggttagatcttaaggtgaccgtggtgtttggaaatgcagaatcttgaccttcaagctgttcagggcagtccagatgaaaagagtaccaatgaatctgcctccagctgaataaaccatggagaggaaaaacccatccagagagagccccagaagactctctgccaaagtaggcaaaggcacagagatgaagaaagtggctcgtcagcttgggatggctgctgctgagtcagacaaggactctggcttttcagatgggagctcggaatgtctgagctctgcagagcagatggagtccgaggacatgctgagcgccttaggctggagcagagaagacaggccgaggcagaactccaaaactgcaaagaatgccttccctaccctgtctcccatggtcgtcatgaagaatgtgcttgtcaaacagggcagcagctcatcccagctccagtcgtggactgtccagccctcctttgaagtgatctcagcacagccacagctcttattccttcatccacctgtaccatctcctgtcagtccatgtc

SEQ ID NO: 120189 - DNA, 584 bp, Homo sapiens
  Payload ID: 3565
  Gene Symbol: CIPC
  Gene Name: CLOCK-interacting pacemaker
  ENST ID: ENST00000554658
  CDS Start-End: 181-584
tgcgccacctgacccacaggccggtcgtggagctgcgaccccggccctaggggaccagacgtggaggttagatcttaaggtgaccgtggtgtttggaaatgcagaatcttgaccttcaagctgttcagggcagtccagatgaaaagagtaccaatgaatctgcctccagctgaataaaccatggagaggaaaaacccatccagagagagccccagaagactctctgccaaagtaggcaaaggcacagagatgaagaaagtggctcgtcagcttgggatggctgctgctgagtcagacaaggactctggcttttcagatgggagctcggaatgtctgagctctgcagagcagatggagtccgaggacatgctgagcgccttaggctggagcagagaagacaggccgaggcagaactccaaaactgcaaagaatgccttccctaccctgtctcccatggtcgtcatgaagaatgtgcttgtcaaacagggcagcagctcatcccagctccagtcgtggactgtccagccctcctttgaagtgatctcagcacagccacagctcttattccttcatccacctgtacc

SEQ ID NO: 120190 - DNA, 566 bp, Homo sapiens
  Payload ID: 3565
  Gene Symbol: CIPC
  Gene Name: CLOCK-interacting pacemaker
  ENST ID: ENST00000555437
  CDS Start-End: 289-474
ttccaagggcccttctaggagaacagcgtgcggtctccatggtgccgggtcatccgagtcgggtcacgtggctggcgaaagccgtcgcggaggcgtggggaggagaaatgggcgggaggctgtggggatagcgagacacccagcgacgacgaggttgtcatggtgccgcggggccgtgctcgcgcatgcgccacctgacccacaggccggtcgtggagctgcgaccccggccctagggcagtccagatgaaaagagtaccaatgaatctgcctccagctgaataaaccatggagaggaaaaacccatccagagagagccccagaagactctctgccaaagtaggcaaaggcacagagatgaagaaagtggctcgtcagcttgggatggctgctgctgagtcagacaaggactctggcttttcagggcagcagctcatcccagctccagtcgtggactgtccagccctcctttgaagtgatctcagcacagccacagctcttattccttcatccacctgtaccatctcctgtcagtccatgtcacactggtgagaaaaagtccgact

SEQ ID NO: 120191 - DNA, 596 bp, Homo sapiens
  Payload ID: 3565
  Gene Symbol: CIPC
  Gene Name: CLOCK-interacting pacemaker
  ENST ID: ENST00000554447
  CDS Start-End: 143-596
agttttgccctgctgagctggcaggctggtggatgcctggagggtgcacatgctgcctggcacagatgcaacgtgggctggtgcgaatggggcagtccagatgaaaagagtaccaatgaatctgcctccagctgaataaaccatggagaggaaaaacccatccagagagagccccagaagactctctgccaaagtaggcaaaggcacagagatgaagaaagtggctcgtcagcttgggatggctgctgctgagtcagacaaggactctggcttttcagatgggagctcggaatgtctgagctctgcagagcagatggagtccgaggacatgctgagcgccttaggctggagcagagaagacaggccgaggcagaactccaaaactgcaaagaatgccttccctaccctgtctcccatggtcgtcatgaagaatgtgcttgtcaaacagggcagcagctcatcccagctccagtcgtggactgtccagccctcctttgaagtgatctcagcacagccacagctcttattccttcatccacctgtaccatctcctgtcagtccatgtcacactggtgagaaaaagtccgactccagga

SEQ ID NO: 120192 - DNA, 882 bp, Homo sapiens
  Payload ID: 3565
  Gene Symbol: CIPC
  Gene Name: CLOCK-interacting pacemaker
  ENST ID: ENST00000557115
  CDS Start-End: 413-882
gaaagggagggctcggtccgggaggaggggagcagggatgacggcgggagagggattgggcgaggagcgtggggaaaggaggtggaagtaggggagagaggaagaggagcgagtaggcaagaggggcaaaccgggactttcggaggacggagagccaaatggtgggagcagggctttggtttgctgtgaggggcgtgggagagggaatcgcgggtgaggagggggctgcgtgtggggaggaggcttgtgtgaggggcaggtgggccctggtctagccctgggcgcaaccgccagccggctgggcggggagagagcttggagtccagcccggctgggagctgagggccaagcaatgggcagggcagtccagatgaaaagagtaccaatgaatctgcctccagctgaataaaccatggagaggaaaaacccatccagagagagccccagaagactctctgccaaagtaggcaaaggcacagagatgaagaaagtggctcgtcagcttgggatggctgctgctgagtcagacaaggactctggcttttcagatgggagctcggaatgtctgagctctgcagagcagatggagtccgaggacatgctgagcgccttaggctggagcagagaagacaggccgaggcagaactccaaaactgcaaagaatgccttccctaccctgtctcccatggtcgtcatgaagaatgtgcttgtcaaacagggcagcagctcatcccagctccagtcgtggactgtccagccctcctttgaagtgatctcagcacagccacagctcttattccttcatccacctgtaccatctcctgtcagtccatgtcacactggtgagaaaaagtccgactccaggaactacttgcccattct

SEQ ID NO: 120193 - DNA, 3240 bp, Homo sapiens
  Payload ID: 3566
  Gene Symbol: CLPB
  Gene Name: ClpB homolog, mitochondrial AAA ATPase chaperonin
  Uniprot ID: Q9H078
  ENST ID: ENST00000294053
  CDS Start-End: 175-2298
cgtagtttatttattctccagctggggaaaggcttagggctgtggactacctctcccgtgaggtagtgcgcaactccaccctgttcgcggcgtcttcgaacgcgccgcggcagccatgttggacgtggtcagcacaggggccggcaccacggggttatcgaagcagctgtcaagatgctggggtccctggtgttgaggagaaaagcactggcgccacggctactcctccggctgctcaggtccccaacgctccggggccatggaggtgcttccggccggaatgtgactactgggagtctcggggagccgcagtggctgagggtagccaccggggggcgccctggaacatcgccggccttgttctccggacgtggggcagccaccggggggcgccagggaggacgcttcgataccaaatgcctcgcggctgccacttggggacgccttcctggtcccgaagaaacactcccaggacaggacagctggaacggggtccccagcagggccggactgggcatgtgcgccctggccgcagcgctggtggttcattgctacagcaagagtccgtccaacaaggatgcagccctgttggaagctgcccgtgccaacaatatgcaagaagtcagcaggctgttgtcagaaggtgcagatgtcaatgcaaagcacagacttggctggacagcactcatggtggcagccatcaaccgaaacaacagtgtggtacaggtcctgcttgctgctggggctgatccaaaccttggagatgatttcagcagtgtttacaagactgccaaggaacagggaatccattctttggaagatgggggacaggacggtgcaagccggcacatcacaaaccagtggacaagtgccctggagttcaggagatggctaggactccccgctggcgtcctgatcacccgagaggatgacttcaacaacaggctgaacaaccgcgccagtttcaagggctgcacggccttgcactatgctgttcttgctgatgactaccgcactgtcaaggagctgcttgatggaggagccaaccccctgcagaggaatgaaatgggacacacacccttggattatgcccgagaaggggaagtgatgaagcttctgaggacttctgaagccaagtaccaagagaagcagcggaagcgtgaggctgaggagcggcgccgcttccccctggagcagcgactaaaggagcacatcattggccaggagagcgccatcgccacagtgggtgctgcgatccggaggaaggagaatggctggtacgatgaagaacaccctctggtcttcctcttcttgggatcatctggaataggaaaaacagagctggccaagcagacagccaaatatatgcacaaagatgctaaaaagggcttcatcaggctggacatgtccgagttccaggagcgacacgaggtggccaagtttattgggtctccaccaggctacgttggccatgaggagggtggccagctgaccaagaagttgaagcagtgccccaatgctgtggtgctctttgatgaagtagacaaggcccatccagatgtgctcaccatcatgctgcagctgtttgatgagggccggctgacagatggaaaagggaagaccattgattgcaaggacgccatcttcatcatgacctccaatgtggccagcgacgagatcgcacagcacgcgctgcagctgaggcaggaagctttggagatgagccgtaaccgtattgccgaaaacctgggggatgtccagataagtgacaagatcaccatctcaaagaacttcaaggagaatgtgattcgccctatcctgaaagctcacttccggagggatgagtttctgggacggatcaatgagatcgtctacttcctccccttctgccactcggagctcatccaactcgtcaacaaggaactaaacttctgggccaagagagccaagcaaaggcacaacatcacgctgctctgggaccgcgaggtggcagatgtgctggtcgacggctacaatgtgcactatggcgcccgctccatcaaacatgaggtagaacgccgtgtggtgaaccagctggcagcagcctatgagcaggacctgctgccagggggctgtactttgcgcatcacggtggaggactcagacaagcagctactcaaaagcccagaactgccctcaccccaggctgagaagcgcctccccaagctgcgtctggagatcatcgacaaggacagcaagactcgcagactggacatccgggcaccactgcaccctgagaaggtgtgcaacaccatctagcagccacctgcctgctcctatgtgccctcaccatccaataaaggccccttggctgtggcatggcaactgacttaccttcccctcatgccgctcccatctctacccagtctcaggcctgcttacctcctcacagcccatgaagaccccttctcagccccaaaacctgaaggaggaatttcgccctactctggcccctttgttgtgggcccataacctgctaacaagccttcaggagaggagctgcctttccacccccttcaaggcaaggagggatggaggtcccttatttccttcagaatgatccccatcccccatagtcgccagactttctcatgttcccaggaagctcagaagtatggcagctaagaacacagctggctggaagaagacagggaccagactgaactgccaccctctgctagtcctcatgcaactcagtccccagaatggctccactgggagtggaggaagagctcagaggcccaggtgcagatagttctgcaatttagtctgtagcctcctcgttccctaccctaaaattctaaggggaagggacccatagaggcttgcctgtttccgctactatattatgcccagtgttcctcctcaccccacgtcctggggtcaggccagaccatgtttcgtcagccttggggactaggccagtgttgggcacctccaggaggaggcctgactggttcattaccctcccctactcagactgagcagcagtcccagataaccaagcaagctcagctctgtgggggcctccttcaaaagaccaacatcgcagacattaggaagctgtaggaagagagatcatgggtttgacctctgcccacatggccatggagtcagcctcagccctgtctgtactgctcgtccagctaaacgagcctggaataaacatgcagtttattcagtctgcatgttagtcacaaa

SEQ ID NO: 120194 - DNA, 2071 bp, Homo sapiens
  Payload ID: 3566
  Gene Symbol: CLPB
  Gene Name: ClpB homolog, mitochondrial AAA ATPase chaperonin
  Uniprot ID: Q9H078
  ENST ID: ENST00000340729
  CDS Start-End: 61-2007
catgttggacgtggtcagcacaggggccggcaccacggggttatcgaagcagctgtcaagatgctggggtccctggtgttgaggagaaaagcactggcgccacggctactcctccggctgctcaggtccccaacgctccggggccatggaggtgcttccggccggaatgtgactactgggagtctcggggagccgcagtggctgagggtagccaccggggggcgccctggaacatcgccggccttgttctccggacgtggggcagccaccggggggcgccagggaggacgcttcgataccaaatgcctcgcggctgccacttggggacgccttcctggtcccgaagaaacactcccaggacaggacagctggaacggggtccccagcagggccggactgggcatgtgcgccctggccgcagcgctggtggttcattgctacagcaagagtccgtccaacaaggatgcagccctgttggaagctgcccgtgccaacaatatgcaagaagtcagcagtgtggtacaggtcctgcttgctgctggggctgatccaaaccttggagatgatttcagcagtgtttacaagactgccaaggaacagggaatccattctttggaagtcctgatcacccgagaggatgacttcaacaacaggctgaacaaccgcgccagtttcaagggctgcacggccttgcactatgctgttcttgctgatgactaccgcactgtcaaggagctgcttgatggaggagccaaccccctgcagaggaatgaaatgggacacacacccttggattatgcccgagaaggggaagtgatgaagcttctgaggacttctgaagccaagtaccaagagaagcagcggaagcgtgaggctgaggagcggcgccgcttccccctggagcagcgactaaaggagcacatcattggccaggagagcgccatcgccacagtgggtgctgcgatccggaggaaggagaatggctggtacgatgaagaacaccctctggtcttcctcttcttgggatcatctggaataggaaaaacagagctggccaagcagacagccaaatatatgcacaaagatgctaaaaagggcttcatcaggctggacatgtccgagttccaggagcgacacgaggtggccaagtttattgggtctccaccaggctacgttggccatgaggagggtggccagctgaccaagaagttgaagcagtgccccaatgctgtggtgctctttgatgaagtagacaaggcccatccagatgtgctcaccatcatgctgcagctgtttgatgagggccggctgacagatggaaaagggaagaccattgattgcaaggacgccatcttcatcatgacctccaatgtggccagcgacgagatcgcacagcacgcgctgcagctgaggcaggaagctttggagatgagccgtaaccgtattgccgaaaacctgggggatgtccagataagtgacaagatcaccatctcaaagaacttcaaggagaatgtgattcgccctatcctgaaagctcacttccggagggatgagtttctgggacggatcaatgagatcgtctacttcctccccttctgccactcggagctcatccaactcgtcaacaaggaactaaacttctgggccaagagagccaagcaaaggcacaacatcacgctgctctgggaccgcgaggtggcagatgtgctggtcgacggctacaatgtgcactatggcgcccgctccatcaaacatgaggtagaacgccgtgtggtgaaccagctggcagcagcctatgagcaggacctgctgccagggggctgtactttgcgcatcacggtggaggactcagacaagcagctactcaaaagcccagaactgccctcaccccaggctgagaagcgcctccccaagctgcgtctggagatcatcgacaaggacagcaagactcgcagactggacatccgggcaccactgcaccctgagaaggtgtgcaacaccatctagcagccacctgcctgctcctatgtgccctcaccatccaataaaggccccttggctgtggcatggc

SEQ ID NO: 120195 - DNA, 3379 bp, Homo sapiens
  Payload ID: 3566
  Gene Symbol: CLPB
  Gene Name: ClpB homolog, mitochondrial AAA ATPase chaperonin
  Uniprot ID: Q9H078
  ENST ID: ENST00000437826
  CDS Start-End: 449-2437
attgtgacgcaatcccacagccttctgggaaacgtagtttatttattctccagctggggaaaggcttagggctgtggactacctctcccgtgaggtagtgcgcaactccaccctgttcgcggcgtcttcgaacgcgccgcggcagccatgttggacgtggtcagcacaggggccggcaccacggggttatcgaagcagctgtcaagatgctggggtccctggtgttgaggagaaaagcactggcgccacggctactcctccggctgctcaggtccccaacgctccggggccatggaggtgcttccggccggaatgtgactactgggagtctcggggagccgcagtggctgagggtagccaccggggggcgccctggaacatcgccggccttgttctccggacgtggggcagccaccggggggcgccagggaggacgcttcgataccaaatgcctcgcggctgccacttggggacgccttcctggtcccgaagaaacactcccaggacaggacagctggaacggggtccccagcagggccggactgggcatgtgcgccctggccgcagcgctggtggttcattgctacagcaagagtccgtccaacaaggatgcagccctgttggaagctgcccgtgccaacaatatgcaagaagtcagcagccccaagagactgcaaagaatgatgctcagtcaagaagctgggcagggctgaatgctggagtctcactgaagaacaccaagatttcctcctctgaatggcccctcaggctgttgtcagaaggtgcagatgtcaatgcaaagcacagacttggctggacagcactcatggtggcagccatcaaccgaaacaacagtgtggtacaggtcctgcttgctgctggggctgatccaaaccttggagatgatttcagcagtgtttacaagactgccaaggaacagggaatccattctttggaagatgggggacaggacggtgcaagccggcacatcacaaaccagtggacaagtgccctggagttcaggagatggctaggactccccgctggcgtcctgatcacccgagaggatgacttcaacaacaggctgaacaaccgcgccagtttcaagggctgcacggccttgcactatgctgttcttgctgatgactaccgcactgtcaaggagctgcttgatggaggagccaaccccctgcagaggaatgaaatgggacacacacccttggattatgcccgagaaggggaagtgatgaagcttctgaggacttctgaagccaagtaccaagagaagcagcggaagcgtgaggctgaggagcggcgccgcttccccctggagcagcgactaaaggagcacatcattggccaggagagcgccatcgccacagtgggtgctgcgatccggaggaaggagaatggctggtacgatgaagaacaccctctggtcttcctcttcttgggatcatctggaataggaaaaacagagctggccaagcagacagccaaatatatgcacaaagatgctaaaaagggcttcatcaggctggacatgtccgagttccaggagcgacacgaggtggccaagtttattgggtctccaccaggctacgttggccatgaggagggtggccagctgaccaagaagttgaagcagtgccccaatgctgtggtgctctttgatgaagtagacaaggcccatccagatgtgctcaccatcatgctgcagctgtttgatgagggccggctgacagatggaaaagggaagaccattgattgcaaggacgccatcttcatcatgacctccaatgtggccagcgacgagatcgcacagcacgcgctgcagctgaggcaggaagctttggagatgagccgtaaccgtattgccgaaaacctgggggatgtccagataagtgacaagatcaccatctcaaagaacttcaaggagaatgtgattcgccctatcctgaaagctcacttccggagggatgagtttctgggacggatcaatgagatcgtctacttcctccccttctgccactcggagctcatccaactcgtcaacaaggaactaaacttctgggccaagagagccaagcaaaggcacaacatcacgctgctctgggaccgcgaggtggcagatgtgctggtcgacggctacaatgtgcactatggcgcccgctccatcaaacatgaggtagaacgccgtgtggtgaaccagctggcagcagcctatgagcaggacctgctgccagggggctgtactttgcgcatcacggtggaggactcagacaagcagctactcaaaagcccagaactgccctcaccccaggctgagaagcgcctccccaagctgcgtctggagatcatcgacaaggacagcaagactcgcagactggacatccgggcaccactgcaccctgagaaggtgtgcaacaccatctagcagccacctgcctgctcctatgtgccctcaccatccaataaaggccccttggctgtggcatggcaactgacttaccttcccctcatgccgctcccatctctacccagtctcaggcctgcttacctcctcacagcccatgaagaccccttctcagccccaaaacctgaaggaggaatttcgccctactctggcccctttgttgtgggcccataacctgctaacaagccttcaggagaggagctgcctttccacccccttcaaggcaaggagggatggaggtcccttatttccttcagaatgatccccatcccccatagtcgccagactttctcatgttcccaggaagctcagaagtatggcagctaagaacacagctggctggaagaagacagggaccagactgaactgccaccctctgctagtcctcatgcaactcagtccccagaatggctccactgggagtggaggaagagctcagaggcccaggtgcagatagttctgcaatttagtctgtagcctcctcgttccctaccctaaaattctaaggggaagggacccatagaggcttgcctgtttccgctactatattatgcccagtgttcctcctcaccccacgtcctggggtcaggccagaccatgtttcgtcagccttggggactaggccagtgttgggcacctccaggaggaggcctgactggttcattaccctcccctactcagactgagcagcagtcccagataaccaagcaagctcagctctgtgggggcctccttcaaaagaccaacatcgcagacattaggaagctgtaggaagagagatcatgggtttgacctctgcccacatggccatggagtcagcctcagccctgtctgtactgctcgtccagctaaacgagcctggaataaacatgcagtttattcagtctgcatgttagtcacaaa

SEQ ID NO: 120196 - DNA, 2133 bp, Homo sapiens
  Payload ID: 3566
  Gene Symbol: CLPB
  Gene Name: ClpB homolog, mitochondrial AAA ATPase chaperonin
  Uniprot ID: Q9H078
  ENST ID: ENST00000543042
  CDS Start-End: 555-2075
atttattctccagctggggaaaggcttagggctgtggactacctctcccgtgaggtagtgcgcaactccaccctgttcgcggcgtcttcgaacgcgccgcggcagccatgttggacgtggtcagcacaggggccggcaccacggggttatcgaagcagctgtcaagatgctggggtccctggtgttgaggagaaaagcactggcgccacggctactcctccggctgctcaggtccccaacgctccggggccatggaggtgcttccggccggaatgtgactactgggagtctcggggagccgcagtggctgagggtagccaccggggggcgccctggaacatcgccggccttgttctccggacgtggggcagccaccggggggcgccagggaggacgcttcgataccaaatgcctcgcggctgccacttggggacgccttcctggtcccgaagaaacactcccaggacaggacagctggaacggggtccccagcagggccggactgggcatgtgcagatgtcaatgcaaagcacagacttggctggacagcactcatggtggcagccatcaaccgaaacaacagtgtggtacaggtcctgcttgctgctggggctgatccaaaccttggagatgatttcagcagtgtttacaagactgccaaggaacagggaatccattctttggaagtcctgatcacccgagaggatgacttcaacaacaggctgaacaaccgcgccagtttcaagggctgcacggccttgcactatgctgttcttgctgatgactaccgcactgtcaaggagctgcttgatggaggagccaaccccctgcagaggaatgaaatgggacacacacccttggattatgcccgagaaggggaagtgatgaagcttctgaggacttctgaagccaagtaccaagagaagcagcggaagcgtgaggctgaggagcggcgccgcttccccctggagcagcgactaaaggagcacatcattggccaggagagcgccatcgccacagtgggtgctgcgatccggaggaaggagaatggctggtacgatgaagaacaccctctggtcttcctcttcttgggatcatctggaataggaaaaacagagctggccaagcagacagccaaatatatgcacaaagatgctaaaaagggcttcatcaggctggacatgtccgagttccaggagcgacacgaggtggccaagtttattgggtctccaccaggctacgttggccatgaggagggtggccagctgaccaagaagttgaagcagtgccccaatgctgtggtgctctttgatgaagtagacaaggcccatccagatgtgctcaccatcatgctgcagctgtttgatgagggccggctgacagatggaaaagggaagaccattgattgcaaggacgccatcttcatcatgacctccaatgtggccagcgacgagatcgcacagcacgcgctgcagctgaggcaggaagctttggagatgagccgtaaccgtattgccgaaaacctgggggatgtccagataagtgacaagatcaccatctcaaagaacttcaaggagaatgtgattcgccctatcctgaaagctcacttccggagggatgagtttctgggacggatcaatgagatcgtctacttcctccccttctgccactcggagctcatccaactcgtcaacaaggaactaaacttctgggccaagagagccaagcaaaggcacaacatcacgctgctctgggaccgcgaggtggcagatgtgctggtcgacggctacaatgtgcactatggcgcccgctccatcaaacatgaggtagaacgccgtgtggtgaaccagctggcagcagcctatgagcaggacctgctgccagggggctgtactttgcgcatcacggtggaggactcagacaagcagctactcaaaagcccagaactgccctcaccccaggctgagaagcgcctccccaagctgcgtctggagatcatcgacaaggacagcaagactcgcagactggacatccgggcaccactgcaccctgagaaggtgtgcaacaccatctagcagccacctgcctgctcctatgtgccctcaccatccaataaaggccccttggctgtgg

SEQ ID NO: 120197 - DNA, 2047 bp, Homo sapiens
  Payload ID: 3566
  Gene Symbol: CLPB
  Gene Name: ClpB homolog, mitochondrial AAA ATPase chaperonin
  ENST ID: ENST00000535477
  CDS Start-End: 37-1542
ggccggcaccacggggttatcgaagcagctgtcaagatgctggggtccctggtgttgaggagaaaagcactggcgccacggctactcctccggctgctcaggtccccaacgctccggggccatggaggtgcttccggccggaatgtgactactgggagtctcggggagccgcagtggctgagggtagccaccggggggcgccctggaacatcgccggccttgttctccggacgtggggcagccaccggggggcgccagggaggacgcttcgataccaaatgcctcgcggctgccacttggggacgccttcctggtcccgaagaaacactcccaggacaggacagctggaacggggtccccagcagggccggactgggcatgtgcgccctggccgcagcgctggtggttcattgctacagcaagagtccgtccaacaaggatgcagccctgttggaagctgcccgtgccaacaatatgcaagaagtcagcaggctgttgtcagaaggtgcagatgtcaatgcaaagcacagacttggctggacagcactcatggtggcagccatcaaccgaaacaacagtgtggtacaggtcctgcttgctgctggggctgatccaaaccttggagatgatttcagcagtgtttacaagactgccaaggaacagggaatccattctttggaagtcctgatcacccgagaggatgacttcaacaacaggctgaacaaccgcgccagtttcaagggctgcacggccttgcactatgctgttcttgctgatgactaccgcactgtcaaggagctgcttgatggaggagccaaccccctgcagaggaatgaaatgggacacacacccttggattatgcccgagaaggggaagtgatgaagcttctgaggacttctgaagccaagtaccaagagaagcagcggaagcgtgaggctgaggagcggcgccgcttccccctggagcagcgactaaaggagcacatcattggccaggagagcgccatcgccacagtgggtgctgcgatccggaggaaggagaatggctggtacgatgaagaacaccctctggtcttcctcttcttgggatcatctggaataggaaaaacagagctggccaagcagacagccaaatatatgcacaaagatgctaaaaagggcttcatcaggctggacatgtccgagttccaggagcgacacgaggtggccaagtttattgggtctccaccaggctacgttggccatgaggagggtggccagctgaccaagaagttgaagcagtgccccaatgctgtggtgctctttgatgaagtagacaaggcccatccagatgtgctcaccatcatgctgcagctgtttgatgagggccggctgacagatggaaaagggaagaccattgattgcaaggacgccatcttcatcatgacctccaatgtggccagcgacgagatcgcacagcacgcgctgcagctgaggcaggaagctttggagatgagccgtaaccgtattgccgaaaacctgggctcacttccggagggatgagtttctgggacggatcaatgagatcgtctacttcctccccttctgccactcggagctcatccaactcgtcaacaaggaactaaacttctgggccaagagagccaagcaaaggcacaacatcacgctgctctgggaccgcgaggtggcagatgtgctggtcgacggctacaatgtgcactatggcgcccgctccatcaaacatgaggtagaacgccgtgtggtgaaccagctggcagcagcctatgagcaggacctgctgccagggggctgtactttgcgcatcacggtggaggactcagacaagcagctactcaaaagcccagaactgccctcaccccaggctgagaagcgcctccccaagctgcgtctggagatcatcgacaaggacagcaagactcgcagactggacatccgggcaccactgcaccctgagaaggtgtgcaacaccatctagcagccacctgcctgctcctatgtgccctcaccatccaataaaggccccttg

SEQ ID NO: 120198 - DNA, 3078 bp, Homo sapiens
  Payload ID: 3566
  Gene Symbol: CLPB
  Gene Name: ClpB homolog, mitochondrial AAA ATPase chaperonin
  Uniprot ID: Q9H078
  ENST ID: ENST00000538039
  CDS Start-End: 124-2157
tctcccgtgaggtagtgcgcaactccaccctgttcgcggcgtcttcgaacgcgccgcggcagccatgttggacgtggtcagcacaggggccggcaccacggggttatcgaagcagctgtcaagatgctggggtccctggtgttgaggagaaaagcactggcgccacggctactcctccggctgctcaggtccccaacgctccggggccatggaggtgcttccggccggaatgtgactactgggagtctcggggagccgcagtggctgagggtagccaccggggggcgccctggaacatcgccggccttgttctccggacgtggggcagccaccggggggcgccagggaggacgcttcgataccaaatgcctcgcggctgccacttggggacgccttcctggtcccgaagaaacactcccaggacaggacagctggaacggggtccccagcagggccggactgggcatgtgcgccctggccgcagcgctggtggttcattgctacagcaagagtccgtccaacaaggatgcagccctgttggaagctgcccgtgccaacaatatgcaagaagtcagcaggctgttgtcagaaggtgcagatgtcaatgcaaagcacagacttggctggacagcactcatggtggcagccatcaaccgaaacaacagtgtggtacaggtcctgcttgctgctggggctgatccaaaccttggagatgatttcagcagtgtttacaagactgccaaggaacagggaatccattctttggaagtcctgatcacccgagaggatgacttcaacaacaggctgaacaaccgcgccagtttcaagggctgcacggccttgcactatgctgttcttgctgatgactaccgcactgtcaaggagctgcttgatggaggagccaaccccctgcagaggaatgaaatgggacacacacccttggattatgcccgagaaggggaagtgatgaagcttctgaggacttctgaagccaagtaccaagagaagcagcggaagcgtgaggctgaggagcggcgccgcttccccctggagcagcgactaaaggagcacatcattggccaggagagcgccatcgccacagtgggtgctgcgatccggaggaaggagaatggctggtacgatgaagaacaccctctggtcttcctcttcttgggatcatctggaataggaaaaacagagctggccaagcagacagccaaatatatgcacaaagatgctaaaaagggcttcatcaggctggacatgtccgagttccaggagcgacacgaggtggccaagtttattgggtctccaccaggctacgttggccatgaggagggtggccagctgaccaagaagttgaagcagtgccccaatgctgtggtgctctttgatgaagtagacaaggcccatccagatgtgctcaccatcatgctgcagctgtttgatgagggccggctgacagatggaaaagggaagaccattgattgcaaggacgccatcttcatcatgacctccaatgtggccagcgacgagatcgcacagcacgcgctgcagctgaggcaggaagctttggagatgagccgtaaccgtattgccgaaaacctgggggatgtccagataagtgacaagatcaccatctcaaagaacttcaaggagaatgtgattcgccctatcctgaaagctcacttccggagggatgagtttctgggacggatcaatgagatcgtctacttcctccccttctgccactcggagctcatccaactcgtcaacaaggaactaaacttctgggccaagagagccaagcaaaggcacaacatcacgctgctctgggaccgcgaggtggcagatgtgctggtcgacggctacaatgtgcactatggcgcccgctccatcaaacatgaggtagaacgccgtgtggtgaaccagctggcagcagcctatgagcaggacctgctgccagggggctgtactttgcgcatcacggtggaggactcagacaagcagctactcaaaagcccagaactgccctcaccccaggctgagaagcgcctccccaagctgcgtctggagatcatcgacaaggacagcaagactcgcagactggacatccgggcaccactgcaccctgagaaggtgtgcaacaccatctagcagccacctgcctgctcctatgtgccctcaccatccaataaaggccccttggctgtggcatggcaactgacttaccttcccctcatgccgctcccatctctacccagtctcaggcctgcttacctcctcacagcccatgaagaccccttctcagccccaaaacctgaaggaggaatttcgccctactctggcccctttgttgtgggcccataacctgctaacaagccttcaggagaggagctgcctttccacccccttcaaggcaaggagggatggaggtcccttatttccttcagaatgatccccatcccccatagtcgccagactttctcatgttcccaggaagctcagaagtatggcagctaagaacacagctggctggaagaagacagggaccagactgaactgccaccctctgctagtcctcatgcaactcagtccccagaatggctccactgggagtggaggaagagctcagaggcccaggtgcagatagttctgcaatttagtctgtagcctcctcgttccctaccctaaaattctaaggggaagggacccatagaggcttgcctgtttccgctactatattatgcccagtgttcctcctcaccccacgtcctggggtcaggccagaccatgtttcgtcagccttggggactaggccagtgttgggcacctccaggaggaggcctgactggttcattaccctcccctactcagactgagcagcagtcccagataaccaagcaagctcagctctgtgggggcctccttcaaaagaccaacatcgcagacattaggaagctgtaggaagagagatcatgggtttgacctctgcccacatggccatggagtcagcctcagccctgtctgtactgctcgtccagctaaacgagcctggaataaacatgcagtttattc

SEQ ID NO: 120199 - DNA, 479 bp, Homo sapiens
  Payload ID: 3566
  Gene Symbol: CLPB
  Gene Name: ClpB homolog, mitochondrial AAA ATPase chaperonin
  ENST ID: ENST00000536297
  CDS Start-End: 1-134
cagggaatccattctttggaagatgggggacaggacggtgcaagccggcacatcacaaaccagtggacaagtgccctggagttcaggagatggctaggactccccgctggcgtcctgatcacccgagaggatgacttcaacaacaggctgaacaaccgcgccagtttcaagggctgcacggccttgcactatgctgttcttgctgatgactaccgcactgtcaaggagctgcttgatggagggcacagccactgaagggcaggactacttgtggatgtggcagcagttcttgggatgactgatgcttctggagcgagaacttgctgttctcagaagcagagacttagaaaacatccccaagcagaaagcttcttcctttgtccgttggaaaactctgtggcaagacatttgtagctaagaattggagtgttcaccaaggacattatctctgccgtgccttaaaatcaatcaatactccc

SEQ ID NO: 120200 - DNA, 624 bp, Homo sapiens
  Payload ID: 3566
  Gene Symbol: CLPB
  Gene Name: ClpB homolog, mitochondrial AAA ATPase chaperonin
  ENST ID: ENST00000544683
  CDS Start-End: 167-624
attgtgacatcagtttgcttgtcaaagtccacgtttctaaagtactgccactgtcttagtgggccctccacgcagtcctgagatgggtatgtcctggccgcggatctgaccagtgccccctttctcttcagatgcagccctgttggaagctgcccgtgccaacaatatgcaagaagtcagcaggctgttgtcagaaggtgcagatgtcaatgcaaagcacagacttggctggacagcactcatggtggcagccatcaaccgaaacaacagtgtggtacaggtcctgcttgctgctggggctgatccaaaccttggagatgatttcagcagtgtttacaagactgccaaggaacagggaatccattctttggaagtcctgatcacccgagaggatgacttcaacaacaggctgaacaaccgcgccagtttcaagggctgcacggccttgcactatgctgttcttgctgatgactaccgcactgtcaaggagctgcttgatggaggagccaaccccctgcagaggaatgaaatgggacacacacccttggattatgcccgagaaggggaagtgatgaagcttctgaggacttctgaagccaagtaccaagagaagcagcggaagcg

SEQ ID NO: 120201 - DNA, 2203 bp, Homo sapiens
  Payload ID: 3566
  Gene Symbol: CLPB
  Gene Name: ClpB homolog, mitochondrial AAA ATPase chaperonin
  ENST ID: ENST00000535990
  CDS Start-End: 1-2139
tgcttccggccggaatgtgactactgggagtctcggggagccgcagtggctgagggtagccaccggggggcgccctggaacatcgccggccttgttctccggacgtggggcagccaccggggggcgccagggaggacgcttcgataccaaatgcctcgcggctgccacttggggacgccttcctggtcccgaagaaacactcccaggacaggacagctggaacggggtccccagcagggccggactgggcatgtgcgccctggccgcagcgctggtggttcattgctacagcaagagtccgtccaacaaggatgcagccctgttggaagctgcccgtgccaacaatatgcaagaagtcagcagccccaagagactgcaaagaatgatgctcagtcaagaagctgggcagggctgaatgctggagtctcactgaagaacaccaagatttcctcctctgaatggcccctcaggctgttgtcagaaggtgcagatgtcaatgcaaagcacagacttggctggacagcactcatggtggcagccatcaaccgaaacaacagtgtggtacaggtcctgcttgctgctggggctgatccaaaccttggagatgatttcagcagtgtttacaagactgccaaggaacagggaatccattctttggaagatgggggacaggacggtgcaagccggcacatcacaaaccagtggacaagtgccctggagttcaggagatggctaggactccccgctggcgtcctgatcacccgagaggatgacttcaacaacaggctgaacaaccgcgccagtttcaagggctgcacggccttgcactatgctgttcttgctgatgactaccgcactgtcaaggagctgcttgatggaggagccaaccccctgcagaggaatgaaatgggacacacacccttggattatgcccgagaaggggaagtgatgaagcttctgaggacttctgaagccaagtaccaagagaagcagcggaagcgtgaggctgaggagcggcgccgcttccccctggagcagcgactaaaggagcacatcattggccaggagagcgccatcgccacagtgggtgctgcgatccggaggaaggagaatggctggtacgatgaagaacaccctctggtcttcctcttcttgggatcatctggaataggaaaaacagagctggccaagcagacagccaaatatatgcacaaagatgctaaaaagggcttcatcaggctggacatgtccgagttccaggagcgacacgaggtggccaagtttattgggtctccaccaggctacgttggccatgaggagggtggccagctgaccaagaagttgaagcagtgccccaatgctgtggtgctctttgatgaagtagacaaggcccatccagatgtgctcaccatcatgctgcagctgtttgatgagggccggctgacagatggaaaagggaagaccattgattgcaaggacgccatcttcatcatgacctccaatgtggccagcgacgagatcgcacagcacgcgctgcagctgaggcaggaagctttggagatgagccgtaaccgtattgccgaaaacctgggggatgtccagataagtgacaagatcaccatctcaaagaacttcaaggagaatgtgattcgccctatcctgaaagctcacttccggagggatgagtttctgggacggatcaatgagatcgtctacttcctccccttctgccactcggagctcatccaactcgtcaacaaggaactaaacttctgggccaagagagccaagcaaaggcacaacatcacgctgctctgggaccgcgaggtggcagatgtgctggtcgacggctacaatgtgcactatggcgcccgctccatcaaacatgaggtagaacgccgtgtggtgaaccagctggcagcagcctatgagcaggacctgctgccagggggctgtactttgcgcatcacggtggaggactcagacaagcagctactcaaaagcccagaactgccctcaccccaggctgagaagcgcctccccaagctgcgtctggagatcatcgacaaggacagcaagactcgcagactggacatccgggcaccactgcaccctgagaaggtgtgcaacaccatctagcagccacctgcctgctcctatgtgccctcaccatccaataaaggccccttggctgtggcatggc

SEQ ID NO: 120202 - DNA, 1108 bp, Homo sapiens
  Payload ID: 3566
  Gene Symbol: CLPB
  Gene Name: ClpB homolog, mitochondrial AAA ATPase chaperonin
  ENST ID: ENST00000538021
  CDS Start-End: 1-228
ggctggtacgatgaagaacaccctctggtcttcctcttcttgggatcatctggaataggaaaaacagagctggccaagcagacagccaaatatatgcacaaagatgctaaaaagttggtacttgcttgtttccacacagggcttcatcaggctggacatgtccgagttccaggagcgacacgaggtggccaagtttattgggtctccaccaggctacgttggccatgaggagggtggccagctgaccaagaagttgaagcagtgccccaatgctgtggtgctctttgatgaagtagacaaggcccatccagatgtgctcaccatcatgctgcagctgtttgatgagggccggctgacagatggaaaagggaagaccattgattgcaaggacgccatcttcatcatgacctccaatgtggccagcgacgagatcgcacagcacgcgctgcagctgaggcaggaagctttggagatgagccgtaaccgtattgccgaaaacctgggggatgtccagataagtgacaagatcaccatctcaaagaacttcaaggagaatgtgattcgccctatcctgaaagctcacttccggagggatgagtttctgggacggatcaatgagatcgtctacttcctccccttctgccactcggagctcatccaactcgtcaacaaggaactaaacttctgggccaagagagccaagcaaaggcacaacatcacgctgctctgggaccgcgaggtggcagatgtgctggtcgacggctacaatgtgcactatggcgcccgctccatcaaacatgaggtagaacgccgtgtggtgaaccagctggcagcagcctatgagcaggacctgctgccagggggctgtactttgcgcatcacggtggaggactcagacaagcagctactcaaaagcccagaactgccctcaccccaggctgagaagcgcctccccaagctgcgtctggagatcatcgacaaggacagcaagactcgcagactggacatccgggcaccactgcaccctgagaaggtgtgcaacaccatctagcagccacctgcctgctcctatgtgccctcaccatccaataaaggccccttggctgtg

SEQ ID NO: 120203 - DNA, 564 bp, Homo sapiens
  Payload ID: 3566
  Gene Symbol: CLPB
  Gene Name: ClpB homolog, mitochondrial AAA ATPase chaperonin
  ENST ID: ENST00000539148
  CDS Start-End: 118-564
actgtcttagtgggccctccacgcagtcctgagatgggtatgtcctggccgcggatctgaccagtgccccctttctcttcagatgcagccctgttggaagctgcccgtgccaacaatatgcaagaagtcagcaggctgttgtcagaaggtgcagatgtcaatgcaaagcacagacttggctggacagcactcatggtggcagccatcaaccgaaacaacagtgtggtacaggtcctgcttgctgctggggctgatccaaaccttggagatgatttcagcagtgtttacaagactgccaaggaacagggaatccattctttggaagatgggggacaggacggtgcaagccggcacatcacaaaccagtggacaagtgccctggagttcaggagatggctaggactccccgctggcgtcctgatcacccgagaggatgacttcaacaacaggctgaacaaccgcgccagtttcaagggctgcacggccttgcactatgctgttcttgctgatgactaccgcactgtcaaggagctgcttgatggaggagccaaccccctgcagagg

SEQ ID NO: 120204 - DNA, 2500 bp, Homo sapiens
  Payload ID: 3567
  Gene Symbol: CLPTM1L
  Gene Name: CLPTM1-like
  Uniprot ID: Q96KA5
  ENST ID: ENST00000320895
  CDS Start-End: 259-1875
acttccggcaggcggcggggcccggaagcggcgcgcggggccggcgaatcccgcggcgccaggtgggagcggggccggagcatgcggggcggccggcggtctgcggcgcgcggcgcattcgttcccccgcggcggtggcggtggcgcgcggcggctctccagtgagcggcggagcccggagcggcgggctgggcgccgggcgggcggggctcgcggctgagaggcgggcgggccgggggcgccgggcgcggggccgccatgtggagcggccgcagctccttcaccagcttggtggtgggcgtgttcgtggtctacgtggtgcacacctgctgggtcatgtacggcatcgtctacacccgcccgtgctccggcgacgccaactgcatccagccctacctggcgcggcggcccaagctgcagctgagcgtgtacaccacgacgaggtcccacctgggtgctgagaacaacatcgacctggtcttgaatgtggaagactttgatgtggagtccaaatttgaaaggacagttaatgtttctgtaccaaagaaaacgagaaacaatgggacgctgtatgcctacatcttcctccatcacgctggggtcctgccgtggcacgacgggaagcaggtgcacctggtcagtcctctgaccacctacatggtccccaagccagaagaaatcaacctgctcaccggggagtctgatacacagcagatcgaggcggagaagaagccgacgagtgccctggatgagccagtgtcccactggcgaccgcggctggcgctgaacgtgatggcggacaactttgtctttgacgggtcctccctgcctgccgatgtgcatcggtacatgaagatgatccagctggggaaaaccgtgcattacctgcccatcctgttcatcgaccagctcagcaaccgcgtgaaggacctgatggtcataaaccgctccaccaccgagctgcccctcaccgtgtcctacgacaaggtctcactggggcggctgcgcttctggatccacatgcaggacgccgtgtactccctgcagcagttcgggttttcagagaaagatgctgatgaggtgaaaggaatttttgtagataccaacttatacttcctggcgctgaccttctttgtcgcagcgttccatcttctctttgatttcctggcctttaaaaatgacatcagtttctggaagaagaagaagagcatgatcggcatgtccaccaaggcagtgctctggcgctgcttcagcaccgtggtcatctttctgttcctgctggacgagcagacgagcctgctggtgctggtcccggcgggtgttggagccgccattgagctgtggaaagtgaagaaggcattgaagatgactattttttggagaggcctgatgcccgaatttcagtttggcacttacagcgaatctgagaggaaaaccgaggagtacgatactcaggccatgaagtacttgtcatacctgctgtaccctctctgtgtcgggggtgctgtctattcactcctgaatatcaaatataagagctggtactcctggttaatcaacagcttcgtcaacggggtctatgcctttggtttcctcttcatgctgccccagctctttgtgaactacaagttgaagtcagtggcacatctgccctggaaggccttcacctacaaggctttcaacaccttcattgatgacgtctttgccttcatcatcaccatgcccacgtctcaccggctggcctgcttccgggacgacgtggtgtttctggtctacctgtaccagcggtggctttatcctgtggataaacgcagagtgaacgagtttggggagtcctacgaggagaaggccacgcgggcgccccacacggactgaaggccgcccgggctgccgccagccaagtgcaacttgaattgtcaatgagtatttttggaagcatttggaggaattcctagacattgcgttttctgtgttgccaaaatcccttcggacatttctcagacatctcccaagttcccatcacgtcagatttggagctggtagcgcttacgatgcccccacgtgtgaacatctgtcttggtcacagagctgggtgctgccggtcaccttgagctgtggtggctcccggcacacgagtgtccggggttcggccatgtcctcacgcgggcaggggtgggagccctcacaggcaagggggctgttggatttccatttcaggtggttttctaagtgctccttatgtgaatttcaaacacgtatggaattcattccgcatggactctgggatcaaaggctctttcctcttttgtttgagagttggttgttttaaagcttaatgtatgtttctattttaaaataaatttttctggctgtggcatttttcttgacctggtataatgaaagtatttcggatatttgagtttaacccttttccagaaagtaatacatgatatggatttatttatgcattaaaagagcaaatttaaagagccctttgcaa

SEQ ID NO: 120205 - DNA, 1740 bp, Homo sapiens
  Payload ID: 3567
  Gene Symbol: CLPTM1L
  Gene Name: CLPTM1-like
  ENST ID: ENST00000507807
  CDS Start-End: 15-1124
ctctgaccacctacatggtccccaagccagaagaaatcaacctgctcaccggggagtctgatacacagcagatcgaggcggagaagaagccgacgagtgccctggatgagccagtgtcccactggcgaccgcggctggcgctgaacgtgatggcggacaactttgtctttgacgggtcctccctgcctgccgatgtgcatcggtacatgaagatgatccagctggggaaaaccgtgcattacctgcccatcctgttcatcgaccagctcagcaaccgcgtgaaggacctgatggtcataaaccgctccaccaccgagctgcccctcaccgtgtcctacgacaaggtctcactggggcggctgcgcttctggatccacatgcaggacgccgtgtactccctgcagcagttcgggttttcagagaaagatgctgatgaggtgaaaggaatttttgtagataccaacttatacttcctggcgctgaccttctttgtcgcagcgttccatcttctctttgatttcctggcctttaaaaatgacatcagtttctggaagaagaagaagagcatgatcggcatgtccaccaagctgtggaaagtgaagaaggcattgaagatgactattttttggagaggcctgatgcccgaatttcagtttggcacttacagcgaatctgagaggaaaaccgaggagtacgatactcaggccatgaagtacttgtcatacctgctgtaccctctctgtgtcgggggtgctgtctattcactcctgaatatcaaatataagagctggtactcctggttaatcaacagcttcgtcaacggggtctatgcctttggtttcctcttcatgctgccccagctctttgtgaactacaagttgaagtcagtggcacatctgccctggaaggccttcacctacaaggctttcaacaccttcattgatgacgtctttgccttcatcatcaccatgcccacgtctcaccggctggcctgcttccgggacgacgtggtgtttctggtctacctgtaccagcggtggctttatcctgtggataaacgcagagtgaacgagtttggggagtcctacgaggagaaggccacgcgggcgccccacacggactgaaggccgcccgggctgccgccagccaagtgcaacttgaattgtcaatgagtatttttggaagcatttggaggaattcctagacattgcgttttctgtgttgccaaaatcccttcggacatttctcagacatctcccaagttcccatcacgtcagatttggagctggtagcgcttacgatgcccccacgtgtgaacatctgtcttggtcacagagctgggtgctgccggtcaccttgagctgtggtggctcccggcacacgagtgtccggggttcggccatgtcctcacgcgggcaggggtgggagccctcacaggcaagggggctgttggatttccatttcaggtggttttctaagtgctccttatgtgaatttcaaacacgtatggaattcattccgcatggactctgggatcaaaggctctttcctcttttgtttgagagttggttgttttaaagcttaatgtatgtttctattttaaaataaatttttctggctgtggcatttttcttgacctggtataatgaaagtatttcggatatttgagtttaacccttttccagaaagtaatacatgatatggatttatttatgcattaaaagagcaaatttaaagagc

SEQ ID NO: 120206 - DNA, 1945 bp, Homo sapiens
  Payload ID: 3567
  Gene Symbol: CLPTM1L
  Gene Name: CLPTM1-like
  Uniprot ID: Q96KA5
  ENST ID: ENST00000620010
  CDS Start-End: 259-1875
acttccggcaggcggcggggcccggaagcggcgcgcggggccggcgaatcccgcggcgccaggtgggagcggggccggagcatgcggggcggccggcggtctgcggcgcgcggcgcattcgttcccccgcggcggtggcggtggcgcgcggcggctctccagtgagcggcggagcccggagcggcgggctgggcgccgggcgggcggggctcgcggctgagaggcgggcgggccgggggcgccgggcgcggggccgccatgtggagcggccgcagctccttcaccagcttggtggtgggcgtgttcgtggtctacgtggtgcacacctgctgggtcatgtacggcatcgtctacacccgcccgtgctccggcgacgccaactgcatccagccctacctggcgcggcggcccaagctgcagctgagcgtgtacaccacgacgaggtcccacctgggtgctgagaacaacatcgacctggtcttgaatgtggaagactttgatgtggagtccaaatttgaaaggacagttaatgtttctgtaccaaagaaaacgagaaacaatgggacgctgtatgcctacatcttcctccatcacgctggggtcctgccgtggcacgacgggaagcaggtgcacctggtcagtcctctgaccacctacatggtccccaagccagaagaaatcaacctgctcaccggggagtctgatacacagcagatcgaggcggagaagaagccgacgagtgccctggatgagccagtgtcccactggcgaccgcggctggcgctgaacgtgatggcggacaactttgtctttgacgggtcctccctgcctgccgatgtgcatcggtacatgaagatgatccagctggggaaaaccgtgcattacctgcccatcctgttcatcgaccagctcagcaaccgcgtgaaggacctgatggtcataaaccgctccaccaccgagctgcccctcaccgtgtcctacgacaaggtctcactggggcggctgcgcttctggatccacatgcaggacgccgtgtactccctgcagcagttcgggttttcagagaaagatgctgatgaggtgaaaggaatttttgtagataccaacttatacttcctggcgctgaccttctttgtcgcagcgttccatcttctctttgatttcctggcctttaaaaatgacatcagtttctggaagaagaagaagagcatgatcggcatgtccaccaaggcagtgctctggcgctgcttcagcaccgtggtcatctttctgttcctgctggacgagcagacgagcctgctggtgctggtcccggcgggtgttggagccgccattgagctgtggaaagtgaagaaggcattgaagatgactattttttggagaggcctgatgcccgaatttcagtttggcacttacagcgaatctgagaggaaaaccgaggagtacgatactcaggccatgaagtacttgtcatacctgctgtaccctctctgtgtcgggggtgctgtctattcactcctgaatatcaaatataagagctggtactcctggttaatcaacagcttcgtcaacggggtctatgcctttggtttcctcttcatgctgccccagctctttgtgaactacaagttgaagtcagtggcacatctgccctggaaggccttcacctacaaggctttcaacaccttcattgatgacgtctttgccttcatcatcaccatgcccacgtctcaccggctggcctgcttccgggacgacgtggtgtttctggtctacctgtaccagcggtggctttatcctgtggataaacgcagagtgaacgagtttggggagtcctacgaggagaaggccacgcgggcgccccacacggactgaaggccgcccgggctgccgccagccaagtgcaacttgaattgtcaatgagtatttttggaagcatttggag

SEQ ID NO: 120207 - DNA, 2032 bp, Homo sapiens
  Payload ID: 3567
  Gene Symbol: CLPTM1L
  Gene Name: CLPTM1-like
  ENST ID: ENST00000630539
  CDS Start-End: 446-1555
gcggctgagaggcgggcgggccgggggcgccgggcgcggggccgccatgtggagcggccgcagctccttcaccagcttggtggtgggcgtgttcgtggtctacgtggtgcacacctgctgggtcatgtacggcatcgtctacacccgcccgtgctccggcgacgccaactgcatccagccctacctggcgcggcggcccaagctgcagctgagcgtgtacaccacgacgaggtcccacctgggtgctgagaacaacatcgacctggtcttgaatgtggaagactttgatgtggagtccaaatttgaaaggacagttaatgtttctgtaccaaagaaaacgagaaacaatgggacgctgtatgcctacatcttcctccatcacgctggggtcctgccgtggcacgacgggaagcaggtgcacctggtcagtcctctgaccacctacatggtccccaagccagaagaaatcaacctgctcaccggggagtctgatacacagcagatcgaggcggagaagaagccgacgagtgccctggatgagccagtgtcccactggcgaccgcggctggcgctgaacgtgatggcggacaactttgtctttgacgggtcctccctgcctgccgatgtgcatcggtacatgaagatgatccagctggggaaaaccgtgcattacctgcccatcctgttcatcgaccagctcagcaaccgcgtgaaggacctgatggtcataaaccgctccaccaccgagctgcccctcaccgtgtcctacgacaaggtctcactggggcggctgcgcttctggatccacatgcaggacgccgtgtactccctgcagcagttcgggttttcagagaaagatgctgatgaggtgaaaggaatttttgtagataccaacttatacttcctggcgctgaccttctttgtcgcagcgttccatcttctctttgatttcctggcctttaaaaatgacatcagtttctggaagaagaagaagagcatgatcggcatgtccaccaagctgtggaaagtgaagaaggcattgaagatgactattttttggagaggcctgatgcccgaatttcagtttggcacttacagcgaatctgagaggaaaaccgaggagtacgatactcaggccatgaagtacttgtcatacctgctgtaccctctctgtgtcgggggtgctgtctattcactcctgaatatcaaatataagagctggtactcctggttaatcaacagcttcgtcaacggggtctatgcctttggtttcctcttcatgctgccccagctctttgtgaactacaagttgaagtcagtggcacatctgccctggaaggccttcacctacaaggctttcaacaccttcattgatgacgtctttgccttcatcatcaccatgcccacgtctcaccggctggcctgcttccgggacgacgtggtgtttctggtctacctgtaccagcggtggctttatcctgtggataaacgcagagtgaacgagtttggggagtcctacgaggagaaggccacgcgggcgccccacacggactgaaggccgcccgggctgccgccagccaagtgcaacttgaattgtcaatgagtatttttggaagcatttggaggaattcctagacattgcgttttctgtgttgccaaaatcccttcggacatttctcagacatctcccaagttcccatcacgtcagatttggagctggtagcgcttacgatgcccccacgtgtgaacatctgtcttggtcacagagctgggtgctgccggtcaccttgagctgtggtggctcccggcacacgagtgtccggggttcggccatgtcctcacgcgggcaggggtgggagccctcacaggcaagggggctgttggatttccatttcaggtggttttctaagtgctccttatgtgaatttcaaacacgtatggaattcattccgcatggactctgggatcaaaggctctttcctcttttgtttgagagttggttgttttaaagcttaatgtatgtttctatttt

SEQ ID NO: 120208 - DNA, 1194 bp, Homo sapiens
  Payload ID: 3567
  Gene Symbol: CLPTM1L
  Gene Name: CLPTM1-like
  ENST ID: ENST00000627897
  CDS Start-End: 15-1124
ctctgaccacctacatggtccccaagccagaagaaatcaacctgctcaccggggagtctgatacacagcagatcgaggcggagaagaagccgacgagtgccctggatgagccagtgtcccactggcgaccgcggctggcgctgaacgtgatggcggacaactttgtctttgacgggtcctccctgcctgccgatgtgcatcggtacatgaagatgatccagctggggaaaaccgtgcattacctgcccatcctgttcatcgaccagctcagcaaccgcgtgaaggacctgatggtcataaaccgctccaccaccgagctgcccctcaccgtgtcctacgacaaggtctcactggggcggctgcgcttctggatccacatgcaggacgccgtgtactccctgcagcagttcgggttttcagagaaagatgctgatgaggtgaaaggaatttttgtagataccaacttatacttcctggcgctgaccttctttgtcgcagcgttccatcttctctttgatttcctggcctttaaaaatgacatcagtttctggaagaagaagaagagcatgatcggcatgtccaccaagctgtggaaagtgaagaaggcattgaagatgactattttttggagaggcctgatgcccgaatttcagtttggcacttacagcgaatctgagaggaaaaccgaggagtacgatactcaggccatgaagtacttgtcatacctgctgtaccctctctgtgtcgggggtgctgtctattcactcctgaatatcaaatataagagctggtactcctggttaatcaacagcttcgtcaacggggtctatgcctttggtttcctcttcatgctgccccagctctttgtgaactacaagttgaagtcagtggcacatctgccctggaaggccttcacctacaaggctttcaacaccttcattgatgacgtctttgccttcatcatcaccatgcccacgtctcaccggctggcctgcttccgggacgacgtggtgtttctggtctacctgtaccagcggtggctttatcctgtggataaacgcagagtgaacgagtttggggagtcctacgaggagaaggccacgcgggcgccccacacggactgaaggccgcccgggctgccgccagccaagtgcaacttgaattgtcaatgagtatttttggaagcatttggag

SEQ ID NO: 120209 - DNA, 5224 bp, Homo sapiens
  Payload ID: 3568
  Gene Symbol: CLUH
  Gene Name: clustered mitochondria (cluA/CLU1) homolog
  Uniprot ID: O75153
  ENST ID: ENST00000435359
  CDS Start-End: 87-4016
cggccgccccggccgacagcgcccgggaacacggctcgcaggccgggggcaaggggcggccgggcgcggccgagctgccatcagtcatgctcttaaacggggactgcccagagagcctgaagaaggaggcggcggcggccgagccacccagggaaaatgggcttgacgaggccggcccgggagatgagaccaccggccaggaagtcattgtcattcaggacacgggcttttctgtgaagatcctcgcccctgggatcgagcccttctccctgcaggtgtccccccaggagatggtgcaggagattcaccaggtgctcatggaccgggaggacacgtgtcaccgcacctgcttctcactgcacctggatggcaacgtgctggaccacttctcggagctgcgcagcgtcgaggggctgcaggagggctctgtgctgcgtgtggtggaagagccgtacacggtgcgtgaggcccgcatccacgtgcgccatgtccgagacctgctcaagagcctggacccatccgatgccttcaacggggttgactgcaactccttgtccttcctgagtgtcttcaccgacggcgacctgggagacagcgggaagcggaagaagggcttggagatggaccccatcgactgcacaccacccgagtacatcctgccagggagccgggagcggccactgtgtcccctgcagccccaaaaccgtgactggaagcccttgcagtgcctgaaagtactcaccatgagcggatggaacccgcccccggggaaccggaagatgcacggggacctcatgtacctgtttgtgatcacagccgaggaccggcaagtcagcatcaccgcgtccacacggggcttttacctgaatcagtccacagcttatcacttcaaccccaagcccgccagcccccgcttcctaagccattccctagtggagctgctcaaccagatcagcccgaccttcaagaagaacttcgctgtgctgcagaagaaaagggtccagcgccacccgttcgagaggatcgccaccccattccaggtgtacagctggacagccccccaggcggagcatgccatggattgcgtgcgtgcagaggacgcctacacctcgaggctgggctatgaggagcacattcctggacagacccgagactggaatgaggagctgcagacgacgagggagctgcctcgcaagaacctgcctgagcggctgctccgagaaagggccatattcaaggtgcacagcgacttcaccgcggcagccaccaggggcgccatggccgtcattgacggcaacgtgatggccatcaaccccagcgaggagaccaagatgcagatgttcatctggaacaacatcttcttcagcctgggcttcgacgtccgagaccactacaaggacttcgggggggacgtggcggcctacgtggcgcccaccaacgacctgaatggcgtccgcacgtacaacgcggtggacgtggaggggctgtacacgctgggcacggtggtggtggattaccgcggctaccgggtcacggcccagtccatcatccccggcatcctggagcgggaccaggagcagagcgtcatctacggctccatcgacttcggcaagaccgtggtgtcacacccgcggtacctggagctgctggagcgcacgagtcggcccctcaagatcctgcggcaccaggtgctcaacgaccgtgacgaggaggtggagctctgctcctcggtcgagtgcaagggcatcattggcaacgacgggcgccactacatcctcgacctgctgcgcaccttccccccggacctcaacttcctgcccgtgcctggcgaggagctgcctgaggaatgcgcccgcgccggcttcccccgcgcccaccggcacaagctctgctgcctgcgccaggagctggtggacgccttcgtggagcacaggtacctcctctttatgaagctggccgccttgcagctgatgcagcagaacgccagccagctggagaccccctcctccctggaaaatggtggtccttcctccttggagtccaagtctgaggatcctccaggacaggaggcgggaagtgaggaggagggtagcagcgccagcggcctggccaaggtgaaggagctggcagagaccatcgccgcagacgacggcacagaccctcggagccgggaggtgatccgcaacgcgtgcaaggcggtcggctccatcagcagcaccgccttcgacattcgcttcaatcctgacatcttctcaccaggggttcgtttccctgagtcctgccaggatgaagttcgggaccagaagcagctgctgaaggacgcggctgccttcctgctctcctgccagatccctggcttggtgaaggactgcatggagcacgcggtcctgcccgtggacggggcaacgctggcagaggtgatgcgccagcggggcatcaacatgcgctacctgggcaaggtgctggagctggtgctgcggagcccggcccgccaccagctggaccacgtctttaaaatcggcattggagaactcatcacccgctcggccaagcacatcttcaagacgtacttacagggagtcgagctctccggcctctcagccgccatcagccacttcctgaactgcttcctgagctcctacccaaaccccgtggcccacctgcccgccgacgagctggtctccaagaagcggaataagaggaggaaaaaccggcccccgggggctgcagataacacagcctgggctgtcatgaccccccaggagctctggaagaacatctgccaggaggccaagaactactttgacttcgacctcgagtgtgagaccgtggaccaggctgtggagacctacggcctgcagaagataacgctcctgcgggagatctcgctgaaaacagggatccaggtcctgctgaaggagtacagcttcgacagtcgccacaagcccgcgttcaccgaggaggacgtgctcaacatcttccccgtggtcaagcacgtcaaccccaaggcctcggatgccttccatttcttccagagcgggcaggccaaagtgcagcagggcttcctgaaggagggctgtgagctcatcaatgaggccctgaacctgtttaacaacgtctacggagccatgcacgtggagacctgcgcctgcctgcgcctcctcgcccgcctccactacatcatgggcgactacgcagaggccctgagtaaccagcagaaggcggtgctgatgagcgagcgggtgatgggcaccgagcaccccaacaccatccaggaatacatgcacctggccctgtactgcttcgccagcagccagctgtccaccgccctgagcctgctgtaccgcgcccgctacctcatgctgctggtgttcggggaagaccaccccgagatggcgctgctggacaacaacatcgggctggtgctgcacggggtgatggagtacgacctgtcgctgcgcttcctggagaacgcgctggccgtcagcaccaagtaccacgggcccaaggccctcaaggtggccctcagccaccaccttgtcgcccgagtctacgagagcaaagctgagttccggtcggccctgcagcacgagaaggagggttacaccatctacaagacgcagctgggcgaggaccatgagaagaccaaggaaagctccgagtacctcaagtgcctgacccagcaggccgtggccctgcagcgcaccatgaacgagatctaccgcaacggctccagcgccaacatcccgcccctcaagttcacggcccccagcatggccagcgtcttggagcagctgaacgtcattaacggcatcctcttcattcctctcagccaaaaagacctggagaatctgaaagccgaggtggcgcggcggcaccagctccaggaggccagcagaaacagggatagagccgaggagcccatggctaccgagcccgcgccagcgggggccccaggagacctgggctcccagcccccggctgccaaggacccttctccgagcgtgcagggatagagagggagccagacggacagccagccagcggccccgtcaccagggagcccgactgcgggagaagggggcgagcctgcgggcggaagaggaagcaaggccctcttcctccacgtctcaccccaccccacccccgtgtcctcctgggagcctggcctgcctgccccgcagaaggtgtttttgcgctggttcaatgaatagatgatgcagaggccccattggagacacgtgaatggcgtgtgcggccatcagttcccggctggggggcaggtgttgcttcggcccccgccgtccggccggcgtgtgcgagtgcgcccctggctgtgagtgttgaccgttcctctcccctgtacatagcccgagccagtcctgagtgggtgactcctgagtgggtgacgcgcagacgggatttctcaggtcatttgtatggtcgacatgatggctgctgctttggctgccaccacccccgggcccagcctgtctgaaagttcagggtttaggccgaaaaacccggtggggaggggtggggagccggagctctgtggcggggctggagggctggggtgcactttagtttggggcgggacgggagccgccgttgtgactggcgtggtctggctgctgctcccgaacggaggggtcggggttggcttgctgggccctcagagcccagtgggtggctctgactcggctccctactccctgcacccagctgggcgcagccttggggcctgcggtctgaatgtatccctcccctcagttttaacctgagctgccgaacgcacagtgggccgggggcgaggctgggggaagcggggcccaattacggatcccgggagttacaggtgccgacgtgatgtcgcttctctggtgcccagctcccttcctggtctgagactagctctgggggtggcgggggcccccacacgctgctcccgctccaccctgcccgtgctgctgctctgtgcctgctgtcagagccctggtgggggaggatgtggccaccctgagacccggaggagacgggcgtctgcctgggtttgcggagagccgcttatgggtgtggtccgtccagacaccttgtttcaagggggatgggcgtgagcgggcaagcagagcatccccaccgctgagcaagaactttttcttgtttttaaaccatcacgtcctcatttcacattggaataaagtgagtttttgaaacctgcggc

SEQ ID NO: 120210 - DNA, 5244 bp, Homo sapiens
  Payload ID: 3568
  Gene Symbol: CLUH
  Gene Name: clustered mitochondria (cluA/CLU1) homolog
  Uniprot ID: O75153
  ENST ID: ENST00000570628
  CDS Start-End: 107-4036
acagtgcccgcccgacgggcagcgagcagcagggagtctccccgaggccccgccccgcgagggcgcccagcctccctgggccttgagtcagaagctgccatcagtcatgctcttaaacggggactgcccagagagcctgaagaaggaggcggcggcggccgagccacccagggaaaatgggcttgacgaggccggcccgggagatgagaccaccggccaggaagtcattgtcattcaggacacgggcttttctgtgaagatcctcgcccctgggatcgagcccttctccctgcaggtgtccccccaggagatggtgcaggagattcaccaggtgctcatggaccgggaggacacgtgtcaccgcacctgcttctcactgcacctggatggcaacgtgctggaccacttctcggagctgcgcagcgtcgaggggctgcaggagggctctgtgctgcgtgtggtggaagagccgtacacggtgcgtgaggcccgcatccacgtgcgccatgtccgagacctgctcaagagcctggacccatccgatgccttcaacggggttgactgcaactccttgtccttcctgagtgtcttcaccgacggcgacctgggagacagcgggaagcggaagaagggcttggagatggaccccatcgactgcacaccacccgagtacatcctgccagggagccgggagcggccactgtgtcccctgcagccccaaaaccgtgactggaagcccttgcagtgcctgaaagtactcaccatgagcggatggaacccgcccccggggaaccggaagatgcacggggacctcatgtacctgtttgtgatcacagccgaggaccggcaagtcagcatcaccgcgtccacacggggcttttacctgaatcagtccacagcttatcacttcaaccccaagcccgccagcccccgcttcctaagccattccctagtggagctgctcaaccagatcagcccgaccttcaagaagaacttcgctgtgctgcagaagaaaagggtccagcgccacccgttcgagaggatcgccaccccattccaggtgtacagctggacagccccccaggcggagcatgccatggattgcgtgcgtgcagaggacgcctacacctcgaggctgggctatgaggagcacattcctggacagacccgagactggaatgaggagctgcagacgacgagggagctgcctcgcaagaacctgcctgagcggctgctccgagaaagggccatattcaaggtgcacagcgacttcaccgcggcagccaccaggggcgccatggccgtcattgacggcaacgtgatggccatcaaccccagcgaggagaccaagatgcagatgttcatctggaacaacatcttcttcagcctgggcttcgacgtccgagaccactacaaggacttcgggggggacgtggcggcctacgtggcgcccaccaacgacctgaatggcgtccgcacgtacaacgcggtggacgtggaggggctgtacacgctgggcacggtggtggtggattaccgcggctaccgggtcacggcccagtccatcatccccggcatcctggagcgggaccaggagcagagcgtcatctacggctccatcgacttcggcaagaccgtggtgtcacacccgcggtacctggagctgctggagcgcacgagtcggcccctcaagatcctgcggcaccaggtgctcaacgaccgtgacgaggaggtggagctctgctcctcggtcgagtgcaagggcatcattggcaacgacgggcgccactacatcctcgacctgctgcgcaccttccccccggacctcaacttcctgcccgtgcctggcgaggagctgcctgaggaatgcgcccgcgccggcttcccccgcgcccaccggcacaagctctgctgcctgcgccaggagctggtggacgccttcgtggagcacaggtacctcctctttatgaagctggccgccttgcagctgatgcagcagaacgccagccagctggagaccccctcctccctggaaaatggtggtccttcctccttggagtccaagtctgaggatcctccaggacaggaggcgggaagtgaggaggagggtagcagcgccagcggcctggccaaggtgaaggagctggcagagaccatcgccgcagacgacggcacagaccctcggagccgggaggtgatccgcaacgcgtgcaaggcggtcggctccatcagcagcaccgccttcgacattcgcttcaatcctgacatcttctcaccaggggttcgtttccctgagtcctgccaggatgaagttcgggaccagaagcagctgctgaaggacgcggctgccttcctgctctcctgccagatccctggcttggtgaaggactgcatggagcacgcggtcctgcccgtggacggggcaacgctggcagaggtgatgcgccagcggggcatcaacatgcgctacctgggcaaggtgctggagctggtgctgcggagcccggcccgccaccagctggaccacgtctttaaaatcggcattggagaactcatcacccgctcggccaagcacatcttcaagacgtacttacagggagtcgagctctccggcctctcagccgccatcagccacttcctgaactgcttcctgagctcctacccaaaccccgtggcccacctgcccgccgacgagctggtctccaagaagcggaataagaggaggaaaaaccggcccccgggggctgcagataacacagcctgggctgtcatgaccccccaggagctctggaagaacatctgccaggaggccaagaactactttgacttcgacctcgagtgtgagaccgtggaccaggctgtggagacctacggcctgcagaagataacgctcctgcgggagatctcgctgaaaacagggatccaggtcctgctgaaggagtacagcttcgacagtcgccacaagcccgcgttcaccgaggaggacgtgctcaacatcttccccgtggtcaagcacgtcaaccccaaggcctcggatgccttccatttcttccagagcgggcaggccaaagtgcagcagggcttcctgaaggagggctgtgagctcatcaatgaggccctgaacctgtttaacaacgtctacggagccatgcacgtggagacctgcgcctgcctgcgcctcctcgcccgcctccactacatcatgggcgactacgcagaggccctgagtaaccagcagaaggcggtgctgatgagcgagcgggtgatgggcaccgagcaccccaacaccatccaggaatacatgcacctggccctgtactgcttcgccagcagccagctgtccaccgccctgagcctgctgtaccgcgcccgctacctcatgctgctggtgttcggggaagaccaccccgagatggcgctgctggacaacaacatcgggctggtgctgcacggggtgatggagtacgacctgtcgctgcgcttcctggagaacgcgctggccgtcagcaccaagtaccacgggcccaaggccctcaaggtggccctcagccaccaccttgtcgcccgagtctacgagagcaaagctgagttccggtcggccctgcagcacgagaaggagggttacaccatctacaagacgcagctgggcgaggaccatgagaagaccaaggaaagctccgagtacctcaagtgcctgacccagcaggccgtggccctgcagcgcaccatgaacgagatctaccgcaacggctccagcgccaacatcccgcccctcaagttcacggcccccagcatggccagcgtcttggagcagctgaacgtcattaacggcatcctcttcattcctctcagccaaaaagacctggagaatctgaaagccgaggtggcgcggcggcaccagctccaggaggccagcagaaacagggatagagccgaggagcccatggctaccgagcccgcgccagcgggggccccaggagacctgggctcccagcccccggctgccaaggacccttctccgagcgtgcagggatagagagggagccagacggacagccagccagcggccccgtcaccagggagcccgactgcgggagaagggggcgagcctgcgggcggaagaggaagcaaggccctcttcctccacgtctcaccccaccccacccccgtgtcctcctgggagcctggcctgcctgccccgcagaaggtgtttttgcgctggttcaatgaatagatgatgcagaggccccattggagacacgtgaatggcgtgtgcggccatcagttcccggctggggggcaggtgttgcttcggcccccgccgtccggccggcgtgtgcgagtgcgcccctggctgtgagtgttgaccgttcctctcccctgtacatagcccgagccagtcctgagtgggtgactcctgagtgggtgacgcgcagacgggatttctcaggtcatttgtatggtcgacatgatggctgctgctttggctgccaccacccccgggcccagcctgtctgaaagttcagggtttaggccgaaaaacccggtggggaggggtggggagccggagctctgtggcggggctggagggctggggtgcactttagtttggggcgggacgggagccgccgttgtgactggcgtggtctggctgctgctcccgaacggaggggtcggggttggcttgctgggccctcagagcccagtgggtggctctgactcggctccctactccctgcacccagctgggcgcagccttggggcctgcggtctgaatgtatccctcccctcagttttaacctgagctgccgaacgcacagtgggccgggggcgaggctgggggaagcggggcccaattacggatcccgggagttacaggtgccgacgtgatgtcgcttctctggtgcccagctcccttcctggtctgagactagctctgggggtggcgggggcccccacacgctgctcccgctccaccctgcccgtgctgctgctctgtgcctgctgtcagagccctggtgggggaggatgtggccaccctgagacccggaggagacgggcgtctgcctgggtttgcggagagccgcttatgggtgtggtccgtccagacaccttgtttcaagggggatgggcgtgagcgggcaagcagagcatccccaccgctgagcaagaactttttcttgtttttaaaccatcacgtcctcatttcacattggaataaagtgagtttttgaaacctgcggc

SEQ ID NO: 120211 - DNA, 3844 bp, Homo sapiens
  Payload ID: 3568
  Gene Symbol: CLUH
  Gene Name: clustered mitochondria (cluA/CLU1) homolog
  ENST ID: ENST00000574426
  CDS Start-End: 135-3844
gtcaaaggccacggcgcgcaccacgtgggccggtgactccgtccttccctcagcagccgcggcgcgcagggcacttgggttagtggcgcggcgggcggcgcggacagccgaggcggacgcccgctcccgccaccatggttatcaagacggacgagttgccggcggccgccccggccgacagcgcccgggaacacggctcgcaggccgggggcaaggggcggccgggcgcggccgagctgccatcagtcatgctcttaaacggggactgcccagagagcctgaagaaggaggcggcggcggccgagccacccagggaaaatgggcttgacgaggccggcccgggagatgagaccaccggccaggaagtcattgtcattcaggacacgggcttttctgtgaagatcctcgcccctgggatcgagcccttctccctgcaggtgtccccccaggagatggtgcaggagattcaccaggtgctcatggaccgggaggacacgtgtcaccgcacctgcttctcactgcacctggatggcaacgtgctggaccacttctcggagctgcgcagcgtcgaggggctgcaggagggctctgtgctgcgtgtggtggaagagccgtacacggtgcgtgaggcccgcatccacgtgcgccatgtccgagacctgctcaagagcctggacccatccgatgccttcaacggggttgactgcaactccttgtccttcctgagtgtcttcaccgacggcgacctgggagacagcgggaagcggaagaagggcttggagatggaccccatcgactgcacaccacccgagtacatcctgccagggagccgggagcggccactgtgtcccctgcagccccaaaaccgtgactggaagcccttgcagtgcctgaaagtactcaccatgagcggatggaacccgcccccggggaaccggaagatgcacggggacctcatgtacctgtttgtgatcacagccgaggaccggcaagtcagcatcaccgcgtccacacggggcttttacctgaatcagtccacagcttatcacttcaaccccaagcccgccagcccccgcttcctaagccattccctagtggagctgctcaaccagatcagcccgaccttcaagaagaacttcgctgtgctgcagaagaaaagggtccagcgccacccgttcgagaggatcgccaccccattccaggtgtacagctggacagccccccaggcggagcatgccatggattgcgtgcgtgcagaggacgcctacacctcgaggctgggctatgaggagcacattcctggacagacccgagactggaatgaggagctgcagacgacgagggagctgcctcgcaagaacctgcctgagcggctgctccgagaaagggccatattcaaggtgcacagcgacttcaccgcggcagccaccaggggcgccatggccgtcattgacggcaacgtgatggccatcaaccccagcgaggagaccaagatgcagatgttcatctggaacaacatcttcttcagcctgggcttcgacgtccgagaccactacaaggacttcgggggggacgtggcggcctacgtggcgcccaccaacgacctgaatggcgtccgcacgtacaacgcggtggacgtggaggggctgtacacgctgggcacggtggtggtggattaccgcggctaccgggtcacggcccagtccatcatccccggcatcctggagcgggaccaggagcagagcgtcatctacggctccatcgacttcggcaagaccgtggtgtcacacccgcggtacctggagctgctggagcgcacgagtcggcccctcaagatcctgcggcaccaggtgctcaacgaccgtgacgaggaggtggagctctgctcctcggtcgagtgcaagggcatcattggcaacgacgggcgccactacatcctcgacctgctgcgcaccttccccccggacctcaacttcctgcccgtgcctggcgaggagctgcctgaggaatgcgcccgcgccggcttcccccgcgcccaccggcacaagctctgctgcctgcgccaggagctggtggacgccttcgtggagcacaggtacctcctctttatgaagctggccgccttgcagctgatgcagcagaacgccagccagctggagaccccctcctccctggaaaatggtggtccttcctccttggagtccaagtctgaggatcctccaggacaggaggcgggaagtgaggaggagggtagcagcgccagcggcctggccaaggtgaaggagctggcagagaccatcgccgcagacgacggcacagcagaccctcggagccgggaggtgatccgcaacgcgtgcaaggcggtcggctccatcagcagcaccgccttcgacattcgcttcaatcctgacatcttctcaccaggggttcgtttccctgagtcctgccaggatgaagttcgggaccagaagcagctgctgaaggacgcggctgccttcctgctctcctgccagatccctggcttgaaaatcggcattggagaactcatcacccgctcggccaagcacatcttcaagacgtacttacagggagtcgagctctccggcctctcagccgccatcagccacttcctgaactgcttcctgagctcctacccaaaccccgtggcccacctgcccgccgacgagctggtctccaagaagcggaataagaggaggaaaaaccggcccccgggggctgcagataacacagcctgggctgtcatgaccccccaggagctctggaagaacatctgccaggaggccaagaactactttgacttcgacctcgagtgtgagaccgtggaccaggctgtggagacctacggcctgcagaagataacgctcctgcgggagatctcgctgaaaacagggatccaggtcctgctgaaggagtacagcttcgacagtcgccacaagcccgcgttcaccgaggaggacgtgctcaacatcttccccgtggtcaagcacgtcaaccccaaggcctcggatgccttccatttcttccagagcgggcaggccaaagtgcagcagggcttcctgaaggagggctgtgagctcatcaatgaggccctgaacctgtttaacaacgtctacggagccatgcacgtggagacctgcgcctgcctgcgcctcctcgcccgcctccactacatcatgggcgactacgcagaggccctgagtaaccagcagaaggcggtgctgatgagcgagcgggtgatgggcaccgagcaccccaacaccatccaggaatacatgcacctggccctgtactgcttcgccagcagccagctgtccaccgccctgagcctgctgtaccgcgcccgctacctcatgctgctggtgttcggggaagaccaccccgagatggcgctgctggacaacaacatcgggctggtgctgcacggggtgatggagtacgacctgtcgctgcgcttcctggagaacgcgctggccgtcagcaccaagtaccacgggcccaaggccctcaaggtggccctcagccaccaccttgtcgcccgagtctacgagagcaaagctgagttccggtcggccctgcagcacgagaaggagggttacaccatctacaagacgcagctgggcgaggaccatgagaagaccaaggaaagctccgagtacctcaagtgcctgacccagcaggccgtggccctgcagcgcaccatgaacgagatctaccgcaacggctccagcgccaacatcccgcccctcaagttcacggcccccagcatggccagcgtcttggagcagctgaacgtcattaacggcatcctcttcattcctctcag

SEQ ID NO: 120212 - DNA, 583 bp, Homo sapiens
  Payload ID: 3568
  Gene Symbol: CLUH
  Gene Name: clustered mitochondria (cluA/CLU1) homolog
  ENST ID: ENST00000576885
  CDS Start-End: 90-583
aaaggccacggcgcgcaccacgtgggccggtgactccgtccttccctcagcagccgcggcgcgcagggcacttggagctgccatcagtcatgctcttaaacggggactgcccagagagcctgaagaaggaggcggcggcggccgagccacccagggaaaatgggcttgacgaggccggcccgggagatgagaccaccggccaggaagtcattgtcattcaggacacgggcttttctgtgaagatcctcgcccctgggatcgagcccttctccctgcaggtgtccccccaggagatggtgcaggagattcaccaggtgctcatggaccgggaggacacgtgtcaccgcacctgcttctcactgcacctggatggcaacgtgctggaccacttctcggagctgcgcagcgtcgaggggctgcaggagggctctgtgctgcgtgtggtggaagagccgtacacggtgcgtgaggcccgcatccacgtgcgccatgtccgagacctgctcaagagcctggacccatccgatgccttcaacggggttgactgcaactccttgtccttcctgagtgtcttcaccgacgg

SEQ ID NO: 120213 - DNA, 433 bp, Homo sapiens
  Payload ID: 3568
  Gene Symbol: CLUH
  Gene Name: clustered mitochondria (cluA/CLU1) homolog
  ENST ID: ENST00000576309
  CDS Start-End: 161-433
ggggtcgctccgacgtttgcgggacagcccccttcggcacctgctccgcggcggcctcccaggcatcccctgtgcgcagggctgcagccctgggagtgaagctccgctcgaggcttcccaggcttggtttgtgggaagagcacgagagctgccatcagtcatgctcttaaacggggactgcccagagagcctgaagaaggaggcggcggcggccgagccacccagggaaaatgggcttgacgaggccggcccgggagatgagaccaccggccaggaagtcattgtcattcaggacacgggcttttctgtgaagatcctcgcccctgggatcgagcccttctccctgcaggtgtccccccaggagatggtgcaggagattcaccaggtgctcatggaccgggaggacacgtgtcaccgcacctgcttctcactg

SEQ ID NO: 120214 - DNA, 545 bp, Homo sapiens
  Payload ID: 3568
  Gene Symbol: CLUH
  Gene Name: clustered mitochondria (cluA/CLU1) homolog
  ENST ID: ENST00000571566
  CDS Start-End: 326-545
agagcttgacaaacgctccgaaggttataggcctcgggtgcttcccaaaggccccctgcggcctggccaggaaagacccaccggcgctctctgcctggagcacttcaactcactgcaagacctggtcccaatgtcccctctgcagcattctctgacctcaccgttccgtccccgccaagcccctgccaagtgaaaaatacgagttaaagcgtcctggctgtggatggagtcagacccggctctaccccttgctctctgtgtgaccttggtctcggcctcctccactgtaaaatgaggacaccagcctggagagctgccatcagtcatgctcttaaacggggactgcccagagagcctgaagaaggaggcggcggcggccgagccacccagggaaaatgggcttgacgaggccggcccgggagatgagaccaccggccaggaagtcattgtcattcaggacacgggcttttctgtgaagatcctcgcccctgggatcgagcccttctccctgcaggtgtccccccaggagatggtgcaggagattc

SEQ ID NO: 120215 - DNA, 480 bp, Homo sapiens
  Payload ID: 3568
  Gene Symbol: CLUH
  Gene Name: clustered mitochondria (cluA/CLU1) homolog
  ENST ID: ENST00000572129
  CDS Start-End: 1-480
ccgcccccggggaaccggaagatgcacggggacctcatgtacctgtttgtgatcacagccgaggaccggcaagtcagcatcaccgcgtccacacggggcttttacctgaatcagtccacagcttatcacttcaaccccaagcccgccagcccccgcttcctaagccattccctagtggagctgctcaaccagatcagcccgaccttcaagaagaacttcgctgtgctgcagaagaaaaggtgtacagctggacagccccccaggcggagcatgccatggattgcgtgcgtgcagaggacgcctacacctcgaggctgggctatgaggagcacattcctggacagacccgagactggaatgaggagctgcagacgacgagggagctgcctcgcaagaacctgcctgagcggctgctccgagaaagggccatattcaaggtgcacagcgacttcaccgcggcagccaccaggggcgccatgg

SEQ ID NO: 120216 - DNA, 4959 bp, Homo sapiens
  Payload ID: 3568
  Gene Symbol: CLUH
  Gene Name: clustered mitochondria (cluA/CLU1) homolog
  ENST ID: ENST00000575014
  CDS Start-End: 1-3754
ctccctgcaggtgtccccccaggagatggtgcaggagattcaccaggtgctcatggaccgggaggacacgtgtcaccgcacctgcttctcactgcacctggatggcaacgtgctggaccacttctcggagctgcgcagcgtcgaggggctgcaggagggctctgtgctgcgtgtggtggaagagccgtacacggtgcgtgaggcccgcatccacgtgcgccatgtccgagacctgctcaagagcctggacccatccgatgccttcaacggggttgactgcaactccttgtccttcctgagtgtcttcaccgacggcgacctgggagacagcgggaagcggaagaagggcttggagatggaccccatcgactgcacaccacccgagtacatcctgccagggagccgggagcggccactgtgtcccctgcagccccaaaaccgtgactggaagcccttgcagtgcctgaaagtactcaccatgagcggatggaacccgcccccggggaaccggaagatgcacggggacctcatgtacctgtttgtgatcacagccgaggaccggcaagtcagcatcaccgcgtccacacggggcttttacctgaatcagtccacagcttatcacttcaaccccaagcccgccagcccccgcttcctaagccattccctagtggagctgctcaaccagatcagcccgaccttcaagaagaacttcgctgtgctgcagaagaaaagggtccagcgccacccgttcgagaggatcgccaccccattccaggtgtacagctggacagccccccaggcggagcatgccatggattgcgtgcgtgcagaggacgcctacacctcgaggctgggctatgaggagcacattcctggacagacccgagactggaatgaggagctgcagacgacgagggagctgcctcgcaagaacctgcctgagcggctgctccgagaaagggccatattcaaggtgcacagcgacttcaccgcggcagccaccaggggcgccatggccgtcattgacggcaacgtgatggccatcaaccccagcgaggagaccaagatgcagatgttcatctggaacaacatcttcttcagcctgggcttcgacgtccgagaccactacaaggacttcgggggggacgtggcggcctacgtggcgcccaccaacgacctgaatggcgtccgcacgtacaacgcggtggacgtggaggggctgtacacgctgggcacggtggtggtggattaccgcggctaccgggtcacggcccagtccatcatccccggcatcctggagcgggaccaggagcagagcgtcatctacggctccatcgacttcggcaagaccgtggtgtcacacccgcggtacctggagctgctggagcgcacgagtcggcccctcaagatcctgcggcaccaggtgctcaacgaccgtgacgaggaggtggagctctgctcctcggtcgagtgcaagggcatcattggcaacgacgggcgccactacatcctcgacctgctgcgcaccttccccccggacctcaacttcctgcccgtgcctggcgaggagctgcctgaggaatgcgcccgcgccggcttcccccgcgcccaccggcacaagctctgctgcctgcgccaggagctggtggacgccttcgtggagcacaggtacctcctctttatgaagctggccgccttgcagctgatgcagcagaacgccagccagctggagaccccctcctccctggaaaatggtggtccttcctccttggagtccaagtctgaggatcctccaggacaggaggcgggaagtgaggaggagggtagcagcgccagcggcctggccaaggtgaaggagctggcagagaccatcgccgcagacgacggcacagcagaccctcggagccgggaggtgatccgcaacgcgtgcaaggcggtcggctccatcagcagcaccgccttcgacattcgcttcaatcctgacatcttctcaccaggggttcgtttccctgagtcctgccaggatgaagttcgggaccagaagcagctgctgaaggacgcggctgccttcctgctctcctgccagatccctggcttggtgaaggactgcatggagcacgcggtcctgcccgtggacggggcaacgctggcagaggtgatgcgccagcggggcatcaacatgcgctacctgggcaaggtgctggagctggtgctgcggagcccggcccgccaccagctggaccacgtctttaaaatcggcattggagaactcatcacccgctcggccaagcacatcttcaagacgtacttacagggagtcgagctctccggcctctcagccgccatcagccacttcctgaactgcttcctgagctcctacccaaaccccgtggcccacctgcccgccgacgagctggtctccaagaagcggaataagaggaggaaaaaccggcccccgggggctgcagataacacagcctgggctgtcatgaccccccaggagctctggaagaacatctgccaggaggccaagaactactttgacttcgacctcgagtgtgagaccgtggaccaggctgtggagacctacggcctgcagaagataacgctcctgcgggagatctcgctgaaaacagggatccaggtcctgctgaaggagtacagcttcgacagtcgccacaagcccgcgttcaccgaggaggacgtgctcaacatcttccccgtggtcaagcacgtcaaccccaaggcctcggatgccttccatttcttccagagcgggcaggccaaagtgcagcagggcttcctgaaggagggctgtgagctcatcaatgaggccctgaacctgtttaacaacgtctacggagccatgcacgtggagacctgcgcctgcctgcgcctcctcgcccgcctccactacatcatgggcgactacgcagaggccctgagtaaccagcagaaggcggtgctgatgagcgagcgggtgatgggcaccgagcaccccaacaccatccaggaatacatgcacctggccctgtactgcttcgccagcagccagctgtccaccgccctgagcctgctgtaccgcgcccgctacctcatgctgctggtgttcggggaagaccaccccgagatggcgctgctggacaacaacatcgggctggtgctgcacggggtgatggagtacgacctgtcgctgcgcttcctggagaacgcgctggccgtcagcaccaagtaccacgggcccaaggccctcaaggtggccctcagccaccaccttgtcgcccgagtctacgagagcaaagctgagttccggtcggccctgcagcacgagaaggagggttacaccatctacaagacgcagctgggcgaggaccatgagaagaccaaggaaagctccgagtacctcaagtgcctgacccagcaggccgtggccctgcagcgcaccatgaacgagatctaccgcaacggctccagcgccaacatcccgcccctcaagttcacggcccccagcatggccagcgtcttggagcagctgaacgtcattaacggcatcctcttcattcctctcagccaaaaagacctggagaatctgaaagccgaggtggcgcggcggcaccagctccaggaggccagcagaaacagggatagagccgaggagcccatggctaccgagcccgcgccagcgggggccccaggagacctgggctcccagcccccggctgccaaggacccttctccgagcgtgcagggatagagagggagccagacggacagccagccagcggccccgtcaccagggagcccgactgcgggagaagggggcgagcctgcgggcggaagaggaagcaaggccctcttcctccacgtctcaccccaccccacccccgtgtcctcctgggagcctggcctgcctgccccgcagaaggtgtttttgcgctggttcaatgaatagatgatgcagaggccccattggagacacgtgaatggcgtgtgcggccatcagttcccggctggggggcaggtgttgcttcggcccccgccgtccggccggcgtgtgcgagtgcgcccctggctgtgagtgttgaccgttcctctcccctgtacatagcccgagccagtcctgagtgggtgactcctgagtgggtgacgcgcagacgggatttctcaggtcatttgtatggtcgacatgatggctgctgctttggctgccaccacccccgggcccagcctgtctgaaagttcagggtttaggccgaaaaacccggtggggaggggtggggagccggagctctgtggcggggctggagggctggggtgcactttagtttggggcgggacgggagccgccgttgtgactggcgtggtctggctgctgctcccgaacggaggggtcggggttggcttgctgggccctcagagcccagtgggtggctctgactcggctccctactccctgcacccagctgggcgcagccttggggcctgcggtctgaatgtatccctcccctcagttttaacctgagctgccgaacgcacagtgggccgggggcgaggctgggggaagcggggcccaattacggatcccgggagttacaggtgccgacgtgatgtcgcttctctggtgcccagctcccttcctggtctgagactagctctgggggtggcgggggcccccacacgctgctcccgctccaccctgcccgtgctgctgctctgtgcctgctgtcagagccctggtgggggaggatgtggccaccctgagacccggaggagacgggcgtctgcctgggtttgcggagagccgcttatgggtgtggtccgtccagacaccttgtttcaagggggatgggcgtgagcgggcaagcagagcatccccaccgctgagcaagaactttttcttgtttttaaaccatcacgtcctcatttcacattggaataaagtgagtttttgaaacctgc

SEQ ID NO: 120217 - DNA, 3080 bp, Homo sapiens
  Payload ID: 3569
  Gene Symbol: CLU
  Gene Name: clusterin
  Uniprot ID: P10909
  ENST ID: ENST00000316403
  CDS Start-End: 407-1756
tgtgtcttggactgggacagacagccgggctaaccgcgtgagaggggctcccagatgggcacgcgagttcaggctcttccctactggaagcgccgagcggccgcacctcagggtctctcctggagccagcacagctattcgtggtgatgatgcgccccccggcgcccccagcccggtgctgcaccggcccccacctcccggcttccagaaagctccccttgctttccgcggcattctttgggcgtgagtcatgcaggtttgcagccagccccaaagggggtgtgtgcgcgagcagagcgctataaatacggcgcctcccagtgcccacaacgcggcgtcgccaggaggagcgcgcgggcacagggtgccgctgaccgaggcgtgcaaagactccagaattggaggcatgatgaagactctgctgctgtttgtggggctgctgctgacctgggagagtgggcaggtcctgggggaccagacggtctcagacaatgagctccaggaaatgtccaatcagggaagtaagtacgtcaataaggaaattcaaaatgctgtcaacggggtgaaacagataaagactctcatagaaaaaacaaacgaagagcgcaagacactgctcagcaacctagaagaagccaagaagaagaaagaggatgccctaaatgagaccagggaatcagagacaaagctgaaggagctcccaggagtgtgcaatgagaccatgatggccctctgggaagagtgtaagccctgcctgaaacagacctgcatgaagttctacgcacgcgtctgcagaagtggctcaggcctggttggccgccagcttgaggagttcctgaaccagagctcgcccttctacttctggatgaatggtgaccgcatcgactccctgctggagaacgaccggcagcagacgcacatgctggatgtcatgcaggaccacttcagccgcgcgtccagcatcatagacgagctcttccaggacaggttcttcacccgggagccccaggatacctaccactacctgcccttcagcctgccccaccggaggcctcacttcttctttcccaagtcccgcatcgtccgcagcttgatgcccttctctccgtacgagcccctgaacttccacgccatgttccagcccttccttgagatgatacacgaggctcagcaggccatggacatccacttccatagcccggccttccagcacccgccaacagaattcatacgagaaggcgacgatgaccggactgtgtgccgggagatccgccacaactccacgggctgcctgcggatgaaggaccagtgtgacaagtgccgggagatcttgtctgtggactgttccaccaacaacccctcccaggctaagctgcggcgggagctcgacgaatccctccaggtcgctgagaggttgaccaggaaatacaacgagctgctaaagtcctaccagtggaagatgctcaacacctcctccttgctggagcagctgaacgagcagtttaactgggtgtcccggctggcaaacctcacgcaaggcgaagaccagtactatctgcgggtcaccacggtggcttcccacacttctgactcggacgttccttccggtgtcactgaggtggtcgtgaagctctttgactctgatcccatcactgtgacggtccctgtagaagtctccaggaagaaccctaaatttatggagaccgtggcggagaaagcgctgcaggaataccgcaaaaagcaccgggaggagtgagatgtggatgttgcttttgcacctacgggggcatctgagtccagctccccccaagatgagctgcagccccccagagagagctctgcacgtcaccaagtaaccaggccccagcctccaggcccccaactccgcccagcctctccccgctctggatcctgcactctaacactcgactctgctgctcatgggaagaacagaattgctcctgcatgcaactaattcaataaaactgtcttgtgagctgatcgcttggagggtcctctttttatgttgagttgctgcttcccggcatgccttcattttgctatggggggcaggcaggggggatggaaaataagtagaaacaaaaaagcagtggctaagatggtatagggactgtcataccagtgaagaataaaagggtgaagaataaaagggatatgatgacaaggttgatccacttcaagaattgcttgctttcaggaagagagatgtgtttcaacaagccaactaaaatatattgctgcaaatggaagcttttctgttctattataaaactgtcgatgtattctgaccaaggtgcgacaatctcctaaaggaatacactgaaagttaaggagaagaatcagtaagtgtaaggtgtacttggtattataatgcataattgatgttttcgttatgaaaacatttggtgcccagaagtccaaattatcagttttatttgtaagagctattgcttttgcagcggttttatttgtaaaagctgttgatttcgagttgtaagagctcagcatcccaggggcatcttcttgactgtggcatttcctgtccaccgccggtttatatgatcttcatacctttccctggaccacaggcgtttctcggcttttagtctgaaccatagctgggctgcagtaccctacgctgccagcaggtggccatgactacccgtggtaccaatctcagtcttaaagctcaggcttttcgttcattaacattctctgatagaattctggtcatcagatgtactgcaatggaacaaaactcatctggctgcatcccaggtgtgtagcaaagtccacatgtaaatttatagcttagaatattcttaagtcactgtcccttgtctctctttgaagttataaacaacaaacttaaagcttagcttatgtccaaggtaagtattttagcatggctgtcaaggaaattcagagtaaagtcagtgtgattcacttaatgatatacattaattagaattatggggtcagaggtatttgcttaagtgatcataattgtaaagtatatgtcacattgtcacattaatgtcacactgtttcaaaagtta

SEQ ID NO: 120218 - DNA, 2098 bp, Homo sapiens
  Payload ID: 3569
  Gene Symbol: CLU
  Gene Name: clusterin
  Uniprot ID: P10909
  ENST ID: ENST00000405140
  CDS Start-End: 316-1665
aacactggcagggcagcctgctgtcggcttagaggggatgggcagtgtggagggcctggcagagcaagaggactcatccttccaaagggactttctctgggaagcctgctcctcgggccactgcgaaccctctctactctccgaagggaattgtccttcctggcttccactacttccacccctgaatgcacaggcagcccggcccaagtctcccactagggatgcagatggattcggtgtgaagggctggctgctgttgcctccggctcttgaaagtcaagttcagaggcgtgcaaagactccagaattggaggcatgatgaagactctgctgctgtttgtggggctgctgctgacctgggagagtgggcaggtcctgggggaccagacggtctcagacaatgagctccaggaaatgtccaatcagggaagtaagtacgtcaataaggaaattcaaaatgctgtcaacggggtgaaacagataaagactctcatagaaaaaacaaacgaagagcgcaagacactgctcagcaacctagaagaagccaagaagaagaaagaggatgccctaaatgagaccagggaatcagagacaaagctgaaggagctcccaggagtgtgcaatgagaccatgatggccctctgggaagagtgtaagccctgcctgaaacagacctgcatgaagttctacgcacgcgtctgcagaagtggctcaggcctggttggccgccagcttgaggagttcctgaaccagagctcgcccttctacttctggatgaatggtgaccgcatcgactccctgctggagaacgaccggcagcagacgcacatgctggatgtcatgcaggaccacttcagccgcgcgtccagcatcatagacgagctcttccaggacaggttcttcacccgggagccccaggatacctaccactacctgcccttcagcctgccccaccggaggcctcacttcttctttcccaagtcccgcatcgtccgcagcttgatgcccttctctccgtacgagcccctgaacttccacgccatgttccagcccttccttgagatgatacacgaggctcagcaggccatggacatccacttccatagcccggccttccagcacccgccaacagaattcatacgagaaggcgacgatgaccggactgtgtgccgggagatccgccacaactccacgggctgcctgcggatgaaggaccagtgtgacaagtgccgggagatcttgtctgtggactgttccaccaacaacccctcccaggctaagctgcggcgggagctcgacgaatccctccaggtcgctgagaggttgaccaggaaatacaacgagctgctaaagtcctaccagtggaagatgctcaacacctcctccttgctggagcagctgaacgagcagtttaactgggtgtcccggctggcaaacctcacgcaaggcgaagaccagtactatctgcgggtcaccacggtggcttcccacacttctgactcggacgttccttccggtgtcactgaggtggtcgtgaagctctttgactctgatcccatcactgtgacggtccctgtagaagtctccaggaagaaccctaaatttatggagaccgtggcggagaaagcgctgcaggaataccgcaaaaagcaccgggaggagtgagatgtggatgttgcttttgcacctacgggggcatctgagtccagctccccccaagatgagctgcagccccccagagagagctctgcacgtcaccaagtaaccaggccccagcctccaggcccccaactccgcccagcctctccccgctctggatcctgcactctaacactcgactctgctgctcatgggaagaacagaattgctcctgcatgcaactaattcaataaaactgtcttgtgagctgatcgcttggagggtcctctttttatgttgagttgctgcttcccggcatgccttcattttgctatggggggcaggcaggggggatggaaaataagtagaaacaaaaaagcagtggctaagatggtatagggactgtcataccagtgaagaataaaagggtgaagaataaaagggatatgatgacaaggtt

SEQ ID NO: 120219 - DNA, 303 bp, Homo sapiens
  Payload ID: 3569
  Gene Symbol: CLU
  Gene Name: clusterin
  ENST ID: ENST00000519472
  CDS Start-End: 57-303
cgcgcgggcacagggtgccgctgaccgaggcgtgcaaagactccagaattggaggcatgatgaagactctgctgctgtttgtggggctgctgctgacctgggagagtgggcaggtcctgggggaccagacggtctcagacaatgagctccaggaaatgtccaatcagggaagtaagtacgtcaataaggaaattcaaaatgctgtcaacggggtgaaacagataaagactctcatagaaaaaacaaacgaagagcgcaagacactgctcagcaacctagaagaagccaagaagaagaaagagg

SEQ ID NO: 120220 - DNA, 520 bp, Homo sapiens
  Payload ID: 3569
  Gene Symbol: CLU
  Gene Name: clusterin
  ENST ID: ENST00000521770
  CDS Start-End: 1-422
gggcagactgttccaccaacaacccctcccaggctaagctgcggcgggagctcgacgaatccctccaggtcgctgagaggttgaccaggaaatacaacgagctgctaaagtcctaccagtggaagatgctcaacacctcctccttgctggagcagctgaacgagcagtttaactgggtgtcccggctggcaaacctcacgcaaggcgaagaccagtactatctgcgggtcaccacggtggcttcccacacttctgactcggacgttccttccggtgtcactgaggtggtcgtgaagctctttgactctgatcccatcactgtgacggtccctgtagaagtctccaggaagaaccctaaatttatggagaccgtggcggagaaagcgctgcaggaataccgcaaaaagcaccgggaggagtgagatgtggatgttgcttttgcacctacgggggcatctgagtccagctccccccaagatgagctgcagccccccagagagagctctgcacgtcaccaagt

SEQ ID NO: 120221 - DNA, 426 bp, Homo sapiens
  Payload ID: 3569
  Gene Symbol: CLU
  Gene Name: clusterin
  ENST ID: ENST00000523396
  CDS Start-End: 180-426
ggcgtcgccaggaggagcgcgcgggcacagggtgccgctgaccgaatatttgaagatggtgaatgtgaagaatcttgtataaactgcatggaagacagaaggaaatataccacagtgctaacctttgcctctgggtgatatgaattaccgaggcgtgcaaagactccagaattggaggcatgatgaagactctgctgctgtttgtggggctgctgctgacctgggagagtgggcaggtcctgggggaccagacggtctcagacaatgagctccaggaaatgtccaatcagggaagtaagtacgtcaataaggaaattcaaaatgctgtcaacggggtgaaacagataaagactctcatagaaaaaacaaacgaagagcgcaagacactgctcagcaacctagaagaagccaagaagaagaaagagg

SEQ ID NO: 120222 - DNA, 654 bp, Homo sapiens
  Payload ID: 3569
  Gene Symbol: CLU
  Gene Name: clusterin
  ENST ID: ENST00000522413
  CDS Start-End: 266-654
gccaggaggagcgcgcgggcacagggtgccgctgaccgatggggaaactgagacctggagacctgccgcgttgcgggagacccaggctagcaggtgacagagctggcctgcaccgagctccttcctgcagcatatcctctgcgaagatgcggatctctcagttgtggctttcggcttgcatgcatgagtcatctagttttcttctaaattctctagctctctggacactgttgcctaggcgtgcaaagactccagaattggaggcatgatgaagactctgctgctgtttgtggggctgctgctgacctgggagagtgggcaggtcctgggggaccagacggtctcagacaatgagctccaggaaatgtccaatcagggaagtaagtacgtcaataaggaaattcaaaatgctgtcaacggggtgaaacagataaagactctcatagaaaaaacaaacgaagagcgcaagacactgctcagcaacctagaagaagccaagaagaagaaagaggatgccctaaatgagaccagggaatcagagacaaagctgaaggagctcccaggagtgtgcaatgagaccatgatggccctctgggaagagtgtaagccctgcctgaaacagacctgcatgaagttctacgcacgcgtctgcag

SEQ ID NO: 120223 - DNA, 791 bp, Homo sapiens
  Payload ID: 3569
  Gene Symbol: CLU
  Gene Name: clusterin
  ENST ID: ENST00000522238
  CDS Start-End: 696-791
ggctttcggcttgcatgcatgagtcatctagttttcttctaaattctctagctctctggacactgttgcctgtaagtatgaggctgcggatttcagtatatgctgcaaccaccgaaatccgactttttctgcctcctaatgcatctgaggtgcatcagagaaaagtcacacaagatccaccaggcctcagacctctgattccacagtctcattttacagatgataatctgaggcctggagaggtttaggactggtgccaacactaaacagcaaataagtatcagaattgggattcgagccaaagcctcttgaccttccagaatttctggacctagttaaaaaaaatatgatttttattattattttttaaacggagaggttaggaatttaaaggaaagtacagatactatataaaaaaagatgcccatgaaaatgttaagttataataatagtggagcattgggcacaactgaaatggccaatcttgtgagaatggtaaaataaacttaggtccgtgagtaagtggagtattacatagccataaaagtatgcccttaaagaatatttgaagatggtgaatgtgaagaatcttgtataaactgcatggaagacagaaggaaatataccacagtgctaacctttgcctctgggtgatatgaattaccgaggcgtgcaaagactccagaattggaggcatgatgaagactctgctgctgtttgtggggctgctgctgacctgggagagtgggcaggtcctgggggaccagacggtctcagacaatgagctccag

SEQ ID NO: 120224 - DNA, 737 bp, Homo sapiens
  Payload ID: 3569
  Gene Symbol: CLU
  Gene Name: clusterin
  ENST ID: ENST00000520796
  CDS Start-End: 126-737
gatggattcggtgtgaagggctggctgctgttgcctccggctcttgaaagtcaagttcaggtggtgctgagactccctgggggctgcagcgctgtgaggcgtgcaaagactccagaattggaggcatgatgaagactctgctgctgtttgtggggctgctgctgacctgggagagtgggcaggtcctgggggaccagacggtctcagacaatgagctccaggaaatgtccaatcagggaagtaagtacgtcaataaggaaattcaaaatgctgtcaacggggtgaaacagataaagactctcatagaaaaaacaaacgaagagcgcaagacactgctcagcaacctagaagaagccaagaagaagaaagaggatgccctaaatgagaccagggaatcagagacaaagctgaaggagctcccaggagtgtgcaatgagaccatgatggccctctgggaagagtgtaagccctgcctgaaacagacctgcatgaagttctacgcacgcgtctgcagaagtggctcaggcctggttggccgccagcttgaggagttcctgaaccagagctcgcccttctacttctggatgaatggtgaccgcatcgactccctgctggagaacgaccggcagcagacgcacatgctggatgtcatgcaggaccacttcagccgcgcgtccagcatcatagacgagctcttccaggacaggttcttcacccgggagccccaggatacctac

SEQ ID NO: 120225 - DNA, 2381 bp, Homo sapiens
  Payload ID: 3569
  Gene Symbol: CLU
  Gene Name: clusterin
  Uniprot ID: P10909
  ENST ID: ENST00000523500
  CDS Start-End: 787-2136
catccttccaaagggactttctctgggaagcctgctcctcgggccactgcgaaccctctctactctccgaagggaattgtccttcctggcttccactacttccacccctgaatgcacaggcagcccggcccaagtctcccactagggatgcagatggattcggtgtgaagggctggctgctgttgcctccggctcttgaaagtcaagttcaggtggtgctgagactccctgggggctgcagcgctgtggtgaatggggagcgtctgctggggtgaaggtttaggtgcacattgcagaggacgtggctggtctctgggatgcagtccctctgtggaggtggcatggggagggacggatgcatgacctaaggggggtattttcagtgtctgacatgatcgataccactctggacaaggaggccaggatgcagaaagcctgtgtgcctcgctgattgtcggggaggatgtggcttggacaagagcctggttcctccgatgccagggttcttgtttcttccactcaacattgctgtcctgcagtccctccctccctgcacctcctgccttcgctttcattcgaggtgtccatggcaagtctggtcatttccccccatttcctcaggaataaaagtgcagcagtgcctgctgtggggacagctgagggcagtgaggccctggggagctgctgcaggcagcaggtgggcgggacgccagcaggctgtctagctgttcccatgatggtctcctgttctctgcagaggcgtgcaaagactccagaattggaggcatgatgaagactctgctgctgtttgtggggctgctgctgacctgggagagtgggcaggtcctgggggaccagacggtctcagacaatgagctccaggaaatgtccaatcagggaagtaagtacgtcaataaggaaattcaaaatgctgtcaacggggtgaaacagataaagactctcatagaaaaaacaaacgaagagcgcaagacactgctcagcaacctagaagaagccaagaagaagaaagaggatgccctaaatgagaccagggaatcagagacaaagctgaaggagctcccaggagtgtgcaatgagaccatgatggccctctgggaagagtgtaagccctgcctgaaacagacctgcatgaagttctacgcacgcgtctgcagaagtggctcaggcctggttggccgccagcttgaggagttcctgaaccagagctcgcccttctacttctggatgaatggtgaccgcatcgactccctgctggagaacgaccggcagcagacgcacatgctggatgtcatgcaggaccacttcagccgcgcgtccagcatcatagacgagctcttccaggacaggttcttcacccgggagccccaggatacctaccactacctgcccttcagcctgccccaccggaggcctcacttcttctttcccaagtcccgcatcgtccgcagcttgatgcccttctctccgtacgagcccctgaacttccacgccatgttccagcccttccttgagatgatacacgaggctcagcaggccatggacatccacttccatagcccggccttccagcacccgccaacagaattcatacgagaaggcgacgatgaccggactgtgtgccgggagatccgccacaactccacgggctgcctgcggatgaaggaccagtgtgacaagtgccgggagatcttgtctgtggactgttccaccaacaacccctcccaggctaagctgcggcgggagctcgacgaatccctccaggtcgctgagaggttgaccaggaaatacaacgagctgctaaagtcctaccagtggaagatgctcaacacctcctccttgctggagcagctgaacgagcagtttaactgggtgtcccggctggcaaacctcacgcaaggcgaagaccagtactatctgcgggtcaccacggtggcttcccacacttctgactcggacgttccttccggtgtcactgaggtggtcgtgaagctctttgactctgatcccatcactgtgacggtccctgtagaagtctccaggaagaaccctaaatttatggagaccgtggcggagaaagcgctgcaggaataccgcaaaaagcaccgggaggagtgagatgtggatgttgcttttgcacctacgggggcatctgagtccagctccccccaagatgagctgcagccccccagagagagctctgcacgtcaccaagtaaccaggccccagcctccaggcccccaactccgcccagcctctccccgctctggatcctgcactctaacactcgactctgctgctcatgggaagaacagaattgctcctgcatgcaactaattcaataaaactgtcttgtgagctga

SEQ ID NO: 120226 - DNA, 580 bp, Homo sapiens
  Payload ID: 3569
  Gene Symbol: CLU
  Gene Name: clusterin
  ENST ID: ENST00000520491
  CDS Start-End: 174-580
cactagggatgcagatggattcggtgtgaagggctggctgctgttgcctccggctcttgaaagtcaagttcaggtggtgctgagactccctgggggctgcagcgctgtggtgaatggggagcgtctgctggggtgaaggtttagaggcgtgcaaagactccagaattggaggcatgatgaagactctgctgctgtttgtggggctgctgctgacctgggagagtgggcaggtcctgggggaccagacggtctcagacaatgagctccaggaaatgtccaatcagggaagtaagtacgtcaataaggaaattcaaaatgctgtcaacggggtgaaacagataaagactctcatagaaaaaacaaacgaagagcgcaagacactgctcagcaacctagaagaagccaagaagaagaaagaggatgccctaaatgagaccagggaatcagagacaaagctgaaggagctcccaggagtgtgcaatgagaccatgatggccctctgggaagagtgtaagccctgcctgaaacagacctgcatgaagttctacgcacgcgtctgcagaagtggctcaggcctggt

SEQ ID NO: 120227 - DNA, 850 bp, Homo sapiens
  Payload ID: 3569
  Gene Symbol: CLU
  Gene Name: clusterin
  ENST ID: ENST00000522098
  CDS Start-End: 1-850
ccagcttgaggagttcctgaaccagagctcgcccttctacttctggatgaatggtgaccgcatcgactccctgctggagaacgaccggcagcagacgcacatgctggatgtcatgcaggaccacttcagccgcgcgtccagcatcatagacgagctcttccaggacaggttcttcacccgggagccccaggatacctaccactacctgcccttcagcctgccccaccggaggcctcacttcttctttcccaagtcccgcatcgtccgcagcttgatgcccttctctccgtacgagcccctgaacttccacgccatgttccagcccttccttgagatgatacacgaggctcagcaggccatggacatccacttccatagcccggccttccagcacccgccaacagaattcatacgagaaggcgacgatgaccggactgtgtgccgggagatccgccacaactccacgggctgcctgcggatgaaggaccagtgtgacaagtgccgggagatcttgtctgtggactgttccaccaacaacccctcccaggctaagctgcggcgggagctcgacgaatccctccaggtcgctgagaggttgaccaggaaatacaacgagctgctaaagtcctaccagtggaagatgctcaacacctcctccttgctggagcagctgaacgagcagtttaactgggtgtcccggctggcaaacctcacgcaaggcgaagaccagtactatctgcgggtcaccacggtggcttcccacacttctgactcggacgttccttccggtgtcactgaggtggtcgtgaagctctttgactctgatcccatcactgtgacggtccctgta

SEQ ID NO: 120228 - DNA, 583 bp, Homo sapiens
  Payload ID: 3569
  Gene Symbol: CLU
  Gene Name: clusterin
  ENST ID: ENST00000519742
  CDS Start-End: 167-583
ctttcaggggcccctggcagagaggtgtttctggctggctttgtctctctggcatgacaaaggctctgttcctgctggaggcatttcagggctcagtgggcagctggggcagagcccgtgagaccacagccttcctgaggcgtgcaaagactccagaattggaggcatgatgaagactctgctgctgtttgtggggctgctgctgacctgggagagtgggcaggtcctgggggaccagacggtctcagacaatgagctccaggaaatgtccaatcagggaagtaagtacgtcaataaggaaattcaaaatgctgtcaacggggtgaaacagataaagactctcatagaaaaaacaaacgaagagcgcaagacactgctcagcaacctagaagaagccaagaagaagaaagaggatgccctaaatgagaccagggaatcagagacaaagctgaaggagctcccaggagtgtgcaatgagaccatgatggccctctgggaagagtgtaagccctgcctgaaacagacctgcatgaagttctacgcacgcgtctgcagaagtggctcaggcctggttggccgccag

SEQ ID NO: 120229 - DNA, 878 bp, Homo sapiens
  Payload ID: 3569
  Gene Symbol: CLU
  Gene Name: clusterin
  ENST ID: ENST00000523589
  CDS Start-End: 66-878
caggaggagcgcgcgggcacagggtgccgctgaccgaggcgtgcaaagactccagaattggaggcatgatgaagactctgctgctgtttgtggggctgctgctgacctgggagagtgggcaggtcctgggggaccagacggtctcagacaatgagctccaggaaatgtccaatcagggaagtaagtacgtcaataaggaaattcaaaatgctgtcaacggggtgaaacagataaagactctcatagaaaaaacaaacgaagagcgcaagacactgctcagcaacctagaagaagccaagaagaagaaagaggatgccctaaatgagaccagggaatcagagacaaagctgaaggagctcccaggagtgtgcaatgagaccatgatggccctctgggaagagtgtaagccctgcctgaaacagacctgcatgaagttctacgcacgcgtctgcagaagtggctcaggcctggttggccgccagcttgaggagttcctgaaccagagctcgcccttctacttctggatgaatggtgaccgcatcgactccctgctggagaacgaccggcagcagacgcacatgctggatgtcatgcaggaccacttcagccgcgcgtccagcatcatagacgagctcttccaggacagcttgatgcccttctctccgtacgagcccctgaacttccacgccatgttccagcccttccttgagatgatacacgaggctcagcaggccatggacatccacttccatagcccggccttccagcacccgccaacagaattcatacgagaaggcgacgatgaccggactgtgtgccgggagatccgccacaactccacgggctgcctgcggatgaaggaccagtgtgacaagtgc

SEQ ID NO: 120230 - DNA, 1039 bp, Homo sapiens
  Payload ID: 3569
  Gene Symbol: CLU
  Gene Name: clusterin
  ENST ID: ENST00000560566
  CDS Start-End: 148-1039
tctttgcgcctgattacttctcatgagaggcactccttgttaatgtgctactgagtgtccagatgggcctgctgggctgagcgggctttggatgtgaaccatttcaggaaggggaaccccatcgtcctgttggttctgtgatggcaaatggaggcgtgcaaagactccagaattggaggcatgatgaagactctgctgctgtttgtggggctgctgctgacctgggagagtgggcaggtcctgggggaccagacggtctcagacaatgagctccaggaaatgtccaatcagggaagtaagtacgtcaataaggaaattcaaaatgctgtcaacggggtgaaacagataaagactctcatagaaaaaacaaacgaagagcgcaagacactgctcagcaacctagaagaagccaagaagaagaaagaggatgccctaaatgagaccagggaatcagagacaaagctgaaggagctcccaggagtgtgcaatgagaccatgatggccctctgggaagagtgtaagccctgcctgaaacagacctgcatgaagttctacgcacgcgtctgcagaagtggctcaggcctggttggccgccagcttgaggagttcctgaaccagagctcgcccttctacttctggatgaatggtgaccgcatcgactccctgctggagaacgaccggcagcagacgcacatgctggatgtcatgcaggaccacttcagccgcgcgtccagcatcatagacgagctcttccaggacaggttcttcacccgggagccccaggatacctaccactacctgcccttcagcctgccccaccggaggcctcacttcttctttcccaagtcccgcatcgtccgcagcttgatgcccttctctccgtacgagcccctgaacttccacgccatgttccagcccttccttgagatgatacacgaggctcagcaggccatggacatccacttccatagcccggccttccagcacccgccaacagaattcatacgagaaggcgacgatgaccggactgtgtgccggg

SEQ ID NO: 120231 - DNA, 1643 bp, Homo sapiens
  Payload ID: 3570
  Gene Symbol: CLUAP1
  Gene Name: clusterin associated protein 1
  ENST ID: ENST00000341633
  CDS Start-End: 57-1355
tgtgatcgctgaggggcgagcagttgcgaccctgggctcctggggacctgagcgttatgtctttccgcgacctccgcaatttcacagagatgatgagagccctgggataccctcgacatatttctatggaaaatttccgtacacccaattttggacttgtatctgaagtgcttctctggcttgtgaaaagatatgagccccagactgacatcccgcctgacgtggatactgaacaggaccgagttttcttcattaaggcaattgcccagttcatggccaccaaggcacatataaaactcaacactaagaagctttatcaagcagatgggtatgcggtaaaagagctgctgaagatcacatctgtcctttataatgctatgaagaccaaggggatggagggctctgaaatagtagaggaagatgtcaacaagttcaagtttgatcttggctcaaagattgcagatttgaaggcagccaggcagcttgcgtctgaaatcacctccaaaggagcatctctgtatgacttgctcggcatggaagtagagttgagggaaatgagaacagaagccattgccagacctctggaaataaacgagactgaaaaagtgatgagaattgcaataaaagagattttgacacaggttcagaagactaaagacctgctcaataatgtggcctctgatgaagctaatttagaagccaaaatcgaaaagagaaaattagaactggaaagaaatcggaagcgactagagactctgcagagtgtcaggccatgttttatggatgagtatgagaagactgaggaagaattacaaaagcagtatgacacttatctggagaaatttcaaaatctgacttatctggaacaacagcttgaagaccatcataggatggagcaagaaaggtttgaggaagctaaaaacactctctgcctgatacagaacaagctcaaggaggaagagaagcgcctgctcaagagtggaagtaacgatgactcggacatagacatccaggaggacgatgaatccgacagtgagttggaagaaaggcggctgcccaagccacagacagccatggagatgctcatgcaaggaagacctggcaaacgcattgtgggcacgatgcaaggtggagactccgatgacaatatggaagcagcaccagctctcttaggtaaatgcaagacttccagctccaagaagcaggaggactcggaggagagtgaaattgacatggaagatgatgatgacgaggatgacgatttggaagacgagagcatttctctctcaccaaccaagcccaatcgaagggtccggaaatctgaacccctggatgagagtgacaatgacttctgacccttttgccaagggaccctggcagattaaaaccctcagacttgtaggtaaatgggaacttagaaggttaggaaggtaacccctgttttgtttactaagctggctggactcatgatcactgaagcaatacttatttctgctttagcctcctatgtttgcattccatgaagcttaaataagaattgaagcaaatccctaagatttatttttttccaccttatttatcttctaaaacttgaggaatgcatgtgttcttagtgattcacatccacgggacaaaaactcaag

SEQ ID NO: 120232 - DNA, 723 bp, Homo sapiens
  Payload ID: 3570
  Gene Symbol: CLUAP1
  Gene Name: clusterin associated protein 1
  ENST ID: ENST00000572632
  CDS Start-End: 1-86
aaaatcgaaaagagaaaattagaactggaaagaaatcggaagcgactagagactctgcagagtgtcaggccatgttttatggatgagtatgagaagactgaggaagaattacaaaagcagtatgacacttatctggagaaatttcaaaatctgacttatctggaacaacagcttgaagaccatcataggatggagcaagaaaggtttgaggtaacgatgactcggacatagacatccaggaggacgatgaatccgacagtgagttggaagaaaggcggctgcccaagccacagacagccatggagatgctcatgcaaggaagacctggcaaacgcattgtgggcacgatgcaaggtggagactccgatgacaatgaggactcggaggagagtgaaattgacatggaagatgatgatgacgaggatgacgatttggaagacgagagcatttctctctcaccaaccaagcccaatcgaagggtccggaaatctgaacccctggatgagagtgacaatgacttctgacccttttgccaagggaccctggcagattaaaaccctcagacttgtaggtaaatgggaacttagaaggttaggaaggtaacccctgttttgtttactaagctggctggactcatgatcactgaagcaatacttatttctgctttagcctcctatgtttgcattccatgaagcttaaataagaattgaagcaaatccctaa

SEQ ID NO: 120233 - DNA, 588 bp, Homo sapiens
  Payload ID: 3570
  Gene Symbol: CLUAP1
  Gene Name: clusterin associated protein 1
  ENST ID: ENST00000574551
  CDS Start-End: 136-588
gtttttgcatcagagatccacatggcaataaacttcggagaatcagtctataaggcacatctagatctaggaatactggttttgagaactccttttctgaaaatatacgtaaatgattttactgtttcctaggaaatgagaacagaagccattgccagacctctggaaataaacgagactgaaaaagtgatgagaattgcaataaaagagattttgacacaggttcagaagactaaagacctgctcaataatgtggcctctgatgaagctaatttagaagccaaaatcgaaaagagaaaattagaactggaaagaaatcggaagcgactagagactctgcagagtgtcaggccatgttttatggatgagtatgagaagactgaggaagaattacaaaagcagtatgacacttatctggagaaatttcaaaatctgacttatctggaacaacagcttgaagaccatcataggatggagcaagaaaggtttgaggaagctaaaaacactctctgcctgatacagaacaagctcaaggaggaagagaagcgcctgctcaagagtggaagtaacgatgactcggacatagac

SEQ ID NO: 120234 - DNA, 692 bp, Homo sapiens
  Payload ID: 3570
  Gene Symbol: CLUAP1
  Gene Name: clusterin associated protein 1
  ENST ID: ENST00000574369
  CDS Start-End: 88-692
ggttgccatagagatcgtcgagcgctgggcctgtgatcgctgaggggcgagcagttgcgaccctgggctcctggggacctgagcgttatgtctttccgcgacctccgcaatttcacagagatgatgagagccctgggataccctcgacatatttctatggaaaatttccgtacacccaattttggacttgtatctgaagtgcttctctggcttgtgaaaagatatgagccccagactgacatcccgcctgacgtggatactgaacaggaccgagttttcttcattaaggcaattgcccagttcatgattgcagatttgaaggcagccaggcagcttgcgtctgaaatcacctccaaaggagcatctctgtatgacttgctcggcatggaagtagagttgagggaaatgagaacagaagccattgccagacctctggaaataaacgagactgaaaaagtgatgagaattgcaataaaagagattttgacacaggttcagaagactaaagacctgctcaataatgtggcctctgatgaagctaatttagaagccaaaatcgaaaagagaaaattagaactggaaagaaatcggaagcgactagagactctgcagagtgtcaggccatgttttatggatgagtatgagaagactgaggaagaattacaaaagcagtatgacacttatctggagaa

SEQ ID NO: 120235 - DNA, 739 bp, Homo sapiens
  Payload ID: 3570
  Gene Symbol: CLUAP1
  Gene Name: clusterin associated protein 1
  ENST ID: ENST00000575134
  CDS Start-End: 62-169
gggcctgtgatcgctgaggggcgagcagttgcgaccctgggctcctggggacctgagcgttatgtctttccgcgacctccgcaatatgagccccagactgacatcccgcctgacgtggatactgaacaggaccgagttttcttcattaaggcaattgcccagttcatgattgcagatttgaaggcagccaggcagcttgcgtctgaaatcacctccaaaggagcatctctgtatgacttgctcggcatggaagtagagttgagggaaatgagaacagaagccattgccagacctctggaaataaacgagactgaaaaagtgatgagaattgcaataaaagagattttgacacaggttcagaagactaaagacctgctcaataatgtggcctctgatgaagctaatttagaagccaaaatcgaaaagagaaaattagaactggaaagaaatcggaagcgactagagactctgcagagtgtcaggccatgttttatggatgagtatgagaagactgaggaagaattacaaaagcagtatgacacttatctggagaaatttcaaaatctgacttatctggaacaacagcttgaagaccatcataggatggagcaagaaaggtttgaggaagctaaaaacactctctgcctgatacagaacaagctcaaggaggaagagaagcgcctgctcaagagtggaagtaacgatgactcggacatagacatccaggaggacgatgaat

SEQ ID NO: 120236 - DNA, 726 bp, Homo sapiens
  Payload ID: 3570
  Gene Symbol: CLUAP1
  Gene Name: clusterin associated protein 1
  ENST ID: ENST00000574592
  CDS Start-End: 87-212
gttgccatagagatcgtcgagcgctgggcctgtgatcgctgaggggcgagcagttgcgaccctgggctcctggggacctgagcgttatgtctttccgcgacctccgcaatatgagccccagactgacatcccgcctgacgtggatactgaacaggaccgagttttcttcattaaggcaattgcccagttcatggccaccaaggcacatataaaactcaacactaagaagctttatcaagcagatgggtatgcggtaaaagagctgctgaagatcacatctgtcctttataatgctatgaagaccaaggggatggagggctctgaaatagtagaggaagatgtcaacaagttcaagtttgatcttggctcaaagattgcagatttgaaggcagccaggcagcttgcgtctgaaatcacctccaaaggagcatctctgtatgacttgctcggcatggaagtagagttgagggaaatgagaacagaagccattgccagacctctggaaataaacgagactgaaaaagtgatgagaattgcaataaaagagattttgacacaggttcagaagactaaagacctgctcaataatgtggcctctgatgaagctaatttagaagccaaaatcgaaaagagaaaattagaactggaaagaaatcggaagcgactagagactctgcagagtgtcaggccatgttttatggatgagtatgagaagactgaggaaga

SEQ ID NO: 120237 - DNA, 5126 bp, Homo sapiens
  Payload ID: 3570
  Gene Symbol: CLUAP1
  Gene Name: clusterin associated protein 1
  ENST ID: ENST00000571025
  CDS Start-End: 51-1214
cgctgaggggcgagcagttgcgaccctgggctcctggggacctgagcgttatgtctttccgcgacctccgcaatttcacagagatgatgagagccctgggataccctcgacatatttctatggaaaatttccgtacacccaattttggacttgtatctgaagtgcttctctggcttgtgaaaagatatgagccccagactgacatcccgcctgacgtggatactgaacaggaccgagttttcttcattaaggcaattgcccagttcatggccaccaaggcacatataaaactcaacactaagaagctttatcaagcagatgggtatgcggtaaaagagctgctgaagatcacatctgtcctttataatgctatgaagaccaaggggatggagggctctgaaatagtagaggaagatgtcaacaagttcaagtttgatcttggctcaaagattgcagatttgaaggcagccaggcagcttgcgtctgaaatcacctccaaaggagcatctctgtatgacttgctcggcatggaagtagagttgagggaaatgagaacagaagccattgccagacctctggaaataaacgagactgaaaaagtgatgagaattgcaataaaagagattttgacacaggttcagaagactaaagacctgctcaataatgtggcctctgatgaagctaatttagaagccaaaatcgaaaagagaaaattagaactggaaagaaatcggaagcgactagagactctgcagagtgtcaggccatgttttatggatgagtatgagaagactgaggaagaattacaaaagcagtatgacacttatctggagaaatttcaaaatctgacttatctggaacaacagcttgaagaccatcataggatggagcaagaaaggtttgaggaagctaaaaacactctctgcctgatacagaacaagctcaaggaggaagagaagcgcctgctcaagagtggaagtaacgatgactcggacatagacatccaggaggacgatgaatccgacagtgagttggaagaaaggcggctgcccaagccacagacagccatggagatgctcatgcaaggaagacctggcaaacgcattgtgggcacgatgcaaggtggagactccgatgacaatgtaagtcccccgctcccctcagtggttctgtgcactctgggtttggctgtccccatagatgggagtggctgagttgctgtcagcagccagggagccgtctatggtcagcccggccgtgcctcgatgcgtggcagggtttggcctcatgaggctctggactcttcgttgctcgtggatggctcatctcttttcaagtgaatgtgcttgctctgctttttttgccttctcactgttctttccattctcgctttccaaagatggaagcagcaccagctctcttaggtaaatgcaagacttccagctccaagaagcaggttggttttctgttctgcctcatgtgtttgtgggtgtctgtcagccctcccggggccagccaggggcctctccctaggagtgatgcttcctctctcctgggcaaaaaggccactcaaaagagatcctgtggtgacagcgggatcactgaaggcccctgtgctaaagtggaggcgcaggcacggagcctggaggcggggaaagctcaggccgggccatcctcaggccctgggccgccacctagaaatgaaggaggacgccgagggccgggctcaggaccaacccccctccctgttctgtgctggggacggaatggtgaagcagcactgtccccagaccaggccctcgaggtgccaggcatgaggctgagacataagctgccttgagctttactgagtggataactccctggagcacttaagcaaaaggggattctaggggtcctcagtgaggtccagtcatcagggctctgccgcccattgctcaagcctacgttctttgttgcgtccctggcagtgctgctcggcccacacagcaaagggcgactcaacagagactgaccccaggctgcctccatgtgccctgaatttacagggcacagtctgtagagaagcagagagagcaactggaaaataattttcctaacaagctcgggtgtggatggtatacagcgtctctccgtcttgcccacccaagacagaagcagagggagtgtggcgtgggtgctggcaatgctgaggcagcaccgcctgcctcttctccagggtttgccttctctctcctcagagcgaatgcattagtcgcagctgagctttatgcctggtggtcacttgtttatttcaaggaggctgtgtccatgccgccctccaggcacagggttccatgctttacgtgttcaggcatccaacacgtgtctgttgagtgcctgccacatgccagtgctgtcgtggattatggggaacgcagcaggggcagaggcaagcccctgcttcatggctcacaccccagcaataatgatggattgtcggatcagggctcatggtgttaacaggaggaataacagcttcaggggacagggagtgacagggaacaaggagggggtggcgtcttctgcgaggtcagtgaaggcccctgacgtggtggtgtttgagcagggcctgagtggagggagcgagcgcatgggttggcggcacctgggcatgtggaatgcactcctcgcatcgaggagcagaggcagctggtgtgattgtgggtgagtgcgagaggcagcaggggccatgcagagctttgcagggtgagatgaagactctgttttctctgagtgtgaggggaaggccctgaagaatcatgagcccagaagggtcaagagctgatgatccctgtttgagagaagccagttaggaggcgcctgcacccgtggaggtcagaggtgacggtgcttggccgaaggtgtggcagcagaggtgttgagaaatggtcaggtcctgggtctctctaagaaccatcaggttttgtgaattgattggacataggctgttagagaaagagaaaaatgagggtgcctgggcttggtctaatcagcagaaagcagagtttcattttctgagatggggccgacttgacaaaggggcttggaaggcagatcgaaagtttgattttggacattctgaatgtgacagccacatgctagggttgagtagccaggtggaatttaagtctggagttcaagggccacgtctgggctagagattgaattttgggagccacccttatttggttggtatctaagccacaaggatagatgtgactgcctagggagagcaagtagaatgagaagagaggcgacccaaggtcctgagctgcatctgccctgcagaggtccgggaggaaggggcaggcagaggaggctgaggggcgtcagcagtgaggaagggggacctggactagagaaggggccctgggggatggagaagatgggttttaaggatgaaggggtgattccacagctcaagcaggatgaggcctgagaatcgatcccagtccgttgaatgtttccttcttgacaggagcagtgctggggtcagtaggtgagagcccgggggaactgaagcagtcgtgaggggcacaggtgtggacagtgagttcaacgactcgctcaggagctttgtgtgaggggagagagacagggcagagcagctggagaggaaggtgggattacctttggggttttttttcaagaaggaaattacagcatgagtgtgcaccgacaggaatgatctagatagaacgaccagccatcctggtttacatgggacgcaggaactgccgttttaaagctgggctgagttggtcaccctggagccctggatccgatgaggagagagagggtgtgtctttcactttgctccctttttttcttttttttcttttttttttgagatggagtcttgctttggagtgcagtggtgcaatctcggctcactgcacctctgcctcccaggttcaagcgattcttctgcctcagtctccggagtagctgggattcactttgctccttataccaatgtctatgttgctttccatccacaatctacaaaaagccaaaacaggcctcccttccctctctccaagcccctgtccttcttgccatctgtagggggagtctctaggtccagtggccctcagcgcagatgcagagtgcttcttagacgctgcgggaaagccagcccctgcagcaccacacccagatgcacctgcagtttggaggattctggttggatgataaattccagctggcagtacatagcctcagtcccatctgtatgccctcccacagcctgcttgccactctgccagcctcttccttcacacagggatgctgctatagaaagggaggcagagagtcttaggacaagatgtcaggaatgaggcaggatcccccgttgcatctgccatttttttcctataggaggactcggaggagagtgaaattgacatggaagatgatgatgacgaggatgacgatttggaagacgagagcatttctctctcaccaaccaagcccaatcgaagggtccggaaatctgaacccctggatgagagtgacaatgacttctgacccttttgccaagggaccctggcagattaaaaccctcagacttgtaggtaaatgggaacttagaaggttaggaaggtaacccctgttttgtttactaagctggctggactcatgatcactgaagcaatacttatttctgctttagcctcctatgtttgcattccatgaagcttaaataagaattgaagcaaatccctaagatttatttttttccaccttatttatcttctaaaacttgaggaatgcatgtgttcttagtgattcacatccacgggacaaaaactcaagaagaaataagagctgacgccacacaagtcttggctgcttttgttactatacattttctctgagactccagcagagttggggctggaacttggcactggggactcatgtttggaatcgtaggggaacatctggctgttaatcacttgcacagttgagaacatttcctatacatcggcttttaattctagctcttatttcattttgtaatcttattttctttcgtctgcatgttcacaataccaagcattaaatgtattttaataact

SEQ ID NO: 120238 - DNA, 4163 bp, Homo sapiens
  Payload ID: 3570
  Gene Symbol: CLUAP1
  Gene Name: clusterin associated protein 1
  Uniprot ID: Q96AJ1
  ENST ID: ENST00000576634
  CDS Start-End: 145-1386
cgcgtcttcgcttcgctttttgtttgtccctgaccgtgcgccgtccaagggtccattggttgccatagagatcgtcgagcgctgggcctgtgatcgctgaggggcgagcagttgcgaccctgggctcctggggacctgagcgttatgtctttccgcgacctccgcaatttcacagagatgatgagagccctgggataccctcgacatatttctatggaaaatttccgtacacccaattttggacttgtatctgaagtgcttctctggcttgtgaaaagatatgagccccagactgacatcccgcctgacgtggatactgaacaggaccgagttttcttcattaaggcaattgcccagttcatggccaccaaggcacatataaaactcaacactaagaagctttatcaagcagatgggtatgcggtaaaagagctgctgaagatcacatctgtcctttataatgctatgaagaccaaggggatggagggctctgaaatagtagaggaagatgtcaacaagttcaagtttgatcttggctcaaagattgcagatttgaaggcagccaggcagcttgcgtctgaaatcacctccaaaggagcatctctgtatgacttgctcggcatggaagtagagttgagggaaatgagaacagaagccattgccagacctctggaaataaacgagactgaaaaagtgatgagaattgcaataaaagagattttgacacaggttcagaagactaaagacctgctcaataatgtggcctctgatgaagctaatttagaagccaaaatcgaaaagagaaaattagaactggaaagaaatcggaagcgactagagactctgcagagtgtcaggccatgttttatggatgagtatgagaagactgaggaagaattacaaaagcagtatgacacttatctggagaaatttcaaaatctgacttatctggaacaacagcttgaagaccatcataggatggagcaagaaaggtttgaggaagctaaaaacactctctgcctgatacagaacaagctcaaggaggaagagaagcgcctgctcaagagtggaagtaacgatgactcggacatagacatccaggaggacgatgaatccgacagtgagttggaagaaaggcggctgcccaagccacagacagccatggagatgctcatgcaaggaagacctggcaaacgcattgtgggcacgatgcaaggtggagactccgatgacaatgaggactcggaggagagtgaaattgacatggaagatgatgatgacgaggatgacgatttggaagacgagagcatttctctctcaccaaccaagcccaatcgaagggtccggaaatctgaacccctggatgagagtgacaatgacttctgacccttttgccaagggaccctggcagattaaaaccctcagacttgtaggtaaatgggaacttagaaggttaggaaggtaacccctgttttgtttactaagctggctggactcatgatcactgaagcaatacttatttctgctttagcctcctatgtttgcattccatgaagcttaaataagaattgaagcaaatccctaagatttatttttttccaccttatttatcttctaaaacttgaggaatgcatgtgttcttagtgattcacatccacgggacaaaaactcaagaagaaataagagctgacgccacacaagtcttggctgcttttgttactatacattttctctgagactccagcagagttggggctggaacttggcactggggactcatgtttggaatcgtaggggaacatctggctgttaatcacttgcacagttgagaacatttcctatacatcggcttttaattctagctcttatttcattttgtaatcttattttctttcgtctgcatgttcacaataccaagcattaaatgtattttaataactaaacttttctgaaagaaggttagctaaagttaaatgaaaacttggtttctttgaaaatcaggcaatagagacaggctccagatgaggaatcctccattttctgtccgaagctgacattcctctggcagtccagttcaccttggattacagccaccttcatgtttccacggttggtactaaatctggaaactctggtgacctgggctgccctctcagaaactccagactcccatggcaatgacagccgggacacttttcttccctccagccagggtttctctaaaggagctttgttttgtctaaagtgtggcaagacatagtgcacaacacagggacaaaggcaggtttcctgcagctcgctacctaagtgtttctgtaggggaaggagccaattaagaaaaagtgttggtacagattcatgtttctgatttaaaaaaacaacaacacaggattgaattaagtagagtaatagcactagaagaatttttctgttgtgaaattagaagtggagttggtttttttcttttttcttcttctttttttttaatatgaaaagtacttagctgggagtggtggcaagcgcccttgggtccagctactcaggaggccaaggtgggaggatcacttgagcccaggagttttagactagcctggacaactaagtgagactccatctctacaaaaaattaaaaaattagccaggtgtggaggggcatgcctgtggtctcagctattcaggaggctgaggcaggagaatcacttgagaccaggaagttgaggctgcaatgagccgtgatcatgccactgcactccagcctgggtgacagagtgagaccctgtctttaaaaaaaagaaaaagaaaagcacgctgcttgtaaaaagcgtacagtaggtcaggcgtggtggctcatgcctgtaatcctagcactttgagaggctgaggtgggtagatcacctgaggtcaggggtttgagaccagcctggccaacatggcgaaaccccacctctactaaaaatacaaaaattagccgggcgtggtagcgcatgcctgtaaccccagctactggggaggctgaggcaggagaatcgcttgaacctaggaggcggaggttgcagtgagccgagatggcgccactgcactccagcctgggcagcagagtgagactccatctcaaaaaaaaaaaaaaaaaaaaaagcatacagtaaataaaaaagcacaaaacagttttcacttattttacaattaaaaagtcagaagacttctgaagttacttatcttttaatacatgtatttaacaccatacttcatattattaaataggttttacttaaaaatataattattgtatttgtacctgtcagatataaatacttattcaggagttcacaggtacgaaaagatacacataaattttaggaacttttgagttatttctgtcatttttgcttttttctctttcttttcctaaattttatgtataagattacccctaaaaaaaaaaaaacagccagtattcagtgaattcaccagtaatttgaaatgcaccatattgtaaatgatccactgacagggaagccagcgtgttggagccatgccagccacctcagacaccgtggctctaagatgcggaagagtcactgcatcttcttgaatgttacagatttggtttgcctgaatgtgacttgacttctgttttgaaaaaacatacgaatagagttctattttccttatgtgatgctttcttctaacacactttaacacagaagcctaacctagctacaaagagcctatccacagacataggcaacagctccaaagggtatttcattgtgtcacctgcttctagatcatctgttagttaactgactttgtgcaaggtctcaccatgtatagcactgccttgcttgagcacggaagtttctgtcaacagcaagctttatgtgctctatcatttttattaaagtatttcagtcaatagtgacccattgtagaatggatgcaggattcacatgtgcaagtgctttgtgacctggcaccatttggttttggccaagcagcagagcagacctcaggacctaacgaggatggttgtgattaggtcaaatagaaaactagcaggccattgctgacaatttttactatataattagaggacttcctaaaatgctttaaaaaaaaatgtgtatggatggaaaatacaaaggaatttttcaaatactcaa

SEQ ID NO: 120239 - DNA, 2221 bp, Homo sapiens
  Payload ID: 3570
  Gene Symbol: CLUAP1
  Gene Name: clusterin associated protein 1
  Uniprot ID: Q96AJ1
  ENST ID: ENST00000572600
  CDS Start-End: 80-823
cttggctcgctgcgcctctgcctcccaggttcaagagattcttctgcctcagcctcctaagtagctgggattacaggaaatgagaacagaagccattgccagacctctggaaataaacgagactgaaaaagtgatgagaattgcaataaaagagattttgacacaggttcagaagactaaagacctgctcaataatgtggcctctgatgaagctaatttagaagccaaaatcgaaaagagaaaattagaactggaaagaaatcggaagcgactagagactctgcagagtgtcaggccatgttttatggatgagtatgagaagactgaggaagaattacaaaagcagtatgacacttatctggagaaatttcaaaatctgacttatctggaacaacagcttgaagaccatcataggatggagcaagaaaggtttgaggaagctaaaaacactctctgcctgatacagaacaagctcaaggaggaagagaagcgcctgctcaagagtggaagtaacgatgactcggacatagacatccaggaggacgatgaatccgacagtgagttggaagaaaggcggctgcccaagccacagacagccatggagatgctcatgcaaggaagacctggcaaacgcattgtgggcacgatgcaaggtggagactccgatgacaatgaggactcggaggagagtgaaattgacatggaagatgatgatgacgaggatgacgatttggaagacgagagcatttctctctcaccaaccaagcccaatcgaagggtccggaaatctgaacccctggatgagagtgacaatgacttctgacccttttgccaagggaccctggcagattaaaaccctcagacttgtaggtaaatgggaacttagaaggttaggaaggtaacccctgttttgtttactaagctggctggactcatgatcactgaagcaatacttatttctgctttagcctcctatgtttgcattccatgaagcttaaataagaattgaagcaaatccctaagatttatttttttccaccttatttatcttctaaaacttgaggaatgcatgtgttcttagtgattcacatccacgggacaaaaactcaagaagaaataagagctgacgccacacaagtcttggctgcttttgttactatacattttctctgagactccagcagagttggggctggaacttggcactggggactcatgtttggaatcgtaggggaacatctggctgttaatcacttgcacagttgagaacatttcctatacatcggcttttaattctagctcttatttcattttgtaatcttattttctttcgtctgcatgttcacaataccaagcattaaatgtattttaataactaaacttttctgaaagaaggttagctaaagttaaatgaaaacttggtttctttgaaaatcaggcaatagagacaggctccagatgaggaatcctccattttctgtccgaagctgacattcctctggcagtccagttcaccttggattacagccaccttcatgtttccacggttggtactaaatctggaaactctggtgacctgggctgccctctcagaaactccagactcccatggcaatgacagccgggacacttttcttccctccagccagggtttctctaaaggagctttgttttgtctaaagtgtggcaagacatagtgcacaacacagggacaaaggcaggtttcctgcagctcgctacctaagtgtttctgtaggggaaggagccaattaagaaaaagtgttggtacagattcatgtttctgatttaaaaaaacaacaacacaggattgaattaagtagagtaatagcactagaagaatttttctgttgtgaaattagaagtggagttggtttttttcttttttcttcttctttttttttaatatgaaaagtacttagctgggagtggtggcaagcgcccttgggtccagctactcaggaggccaaggtgggaggatcacttgagcccaggagttttagactagcctggacaactaagtgagactccatctctacaaaaaattaaaaaattagccaggtgtggaggggcatgcctgtggtctcagctattcaggaggctgaggcaggagaatcacttgagaccaggaagttgaggctgcaatgagccgtgatcatgccactgcactccagcctgggtgacagagtgagaccctgtcttt

SEQ ID NO: 120240 - DNA, 546 bp, Homo sapiens
  Payload ID: 3570
  Gene Symbol: CLUAP1
  Gene Name: clusterin associated protein 1
  ENST ID: ENST00000573370
  CDS Start-End: 93-245
ccattggttgccatagagatcgtcgagcgctgggcctgtgatcgctgaggggcgagcagttgcgaccctgggctcctggggacctgagcgttatgtctttccgcgacctccgcaatttcacagagatgatgagagccctgggataccctcgacatatttctatggaaaatttccgtacacccaattttggacttgtatctgaagtgcttctctggcttgtgaaaaggccaccaaggcacatataaaactcaacactaagaagctttatcaagcagatgggtatgcggtaaaagagctgctgaagatcacatctgtcctttataatgctatgaagaccaaggggatggagggctctgaaatagtagaggaagatgtcaacaagttcaagtttgatcttggctcaaagattgcagatttgaaggcagccaggcagcttgcgtctgaaatcacctccaaaggagcatctctgtatgacttgctcggcatggaagtagagttgagggaaatgagaacagaagccattgccagacctctggaaataaacga

SEQ ID NO: 120241 - DNA, 414 bp, Homo sapiens
  Payload ID: 3570
  Gene Symbol: CLUAP1
  Gene Name: clusterin associated protein 1
  ENST ID: ENST00000576117
  CDS Start-End: 53-414
cagacatcctgaactccatctgcatcctttctgcagggctgatttcacagagatgatgagagccctgggataccctcgacatatttctatggaaaatttccgtacacccaattttggacttgtatctgaagtgcttctctggcttgtgaaaagatatgagccccagactgacatcccgcctgacgtggatactgaacaggaccgagttttcttcattaaggcaattgcccagttcatggccaccaaggcacatataaaactcaacactaagaagctttatcaagcagatgggtatgcggtaaaagagctgctgaagatcacatctgtcctttataatgctatgaagaccaaggggatggagggctctgaaatagtagaggaagatgtcaacaagttcaagtttgatcttggctc

SEQ ID NO: 120242 - DNA, 1897 bp, Homo sapiens
  Payload ID: 3571
  Gene Symbol: CLUL1
  Gene Name: clusterin-like 1 (retinal)
  Uniprot ID: Q15846
  ENST ID: ENST00000338387
  CDS Start-End: 100-1500
tccctgacacggatgaaaattaaagcagagaaaaacgaaggtccttccagaagctggtggcaacttcactggggagatattgcaaataacagcgggaacatgaagccgccactcttggtgtttattgtgtgtctgctgtggttgaaagacagtcactgcgcacccacttggaaggacaaaactgctatcagtgaaaacctgaagagtttttctgaggtgggggagatagatgcagatgaagaggtgaagaaggctttgactggtattaagcaaatgaaaatcatgatggaaagaaaagagaaggaacacaccaatctaatgagcaccctgaagaaatgcagagaagaaaagcaggaggccctgaaacttctgaatgaagttcaagaacatctggaggaagaagaaaggctatgccgggagtctttggcagattcctggggtgaatgcaggtcttgcctggaaaataactgcatgagaatttatacaacctgccaacctagctggtcctctgtgaaaaataagattgaacggtttttcaggaagatatatcaatttctatttcctttccatgaagataatgaaaaagatctccccatcagtgaaaagctcattgaggaagatgcacaattgacccaaatggaggatgtgttcagccagttgactgtggatgtgaattctctctttaacaggagttttaacgtcttcagacagatgcagcaagagtttgaccagacttttcaatcacatttcatatcagatacagacctaactgagccttacttttttccagctttctctaaagagccgatgacaaaagcagatcttgagcaatgttgggacattcccaacttcttccagctgttttgtaatttcagtgtctctatttatgaaagtgtcagtgaaacaattactaagatgctgaaggcaatagaagatttaccaaaacaagacaaagctcctgaccacggaggcctgatttcaaagatgttacctgggcaggacagaggactgtgtggggaacttgaccagaatttgtcaagatgtttcaaatttcatgaaaaatgccaaaaatgtcaggctcacctatctgaagactgtcctgatgtacctgctctgcacacagaattagacgaggcgatcaggttggtcaatgtatccaatcagcagtatggccagattctccagatgacccggaagcacttggaggacaccgcctatctggtggagaagatgagagggcaatttggctgggtgtctgaactggcaaaccaggccccagaaacagagatcatctttaattcaatacaggtagttccaaggattcatgaaggaaatatttccaaacaagatgaaacaatgatgacagacttaagcattctgccttcctctaatttcacactcaagatccctcttgaagaaagtgctgagagttctaacttcattggctacgtagtggcaaaagctctacagcattttaaggaacattttaaaacctggtaagaagatctaatgcatcctatatccagtaagtagaattatctcttcatctgggacctggaaatcctgaaataaaaaaggataatgcaataaacacagttgcaggaaagtatgttagctatatactatgaagtactcttagtttacttatgttgaatggcttagctattaatactcaaattgagttaaaatgaaaattcctccttaaaaaatcaaacgtaatatgtattacatttcatggtacattagtagttctttgtatattgaataaatactaaatcacctaggtgtctatgttctatcacatctacaaacatgtcacttcctaattaacaaaatgttcttcctttagtttgcttttgcacttaaaatatatataattgacttttttggaaaaaaa

SEQ ID NO: 120243 - DNA, 1943 bp, Homo sapiens
  Payload ID: 3571
  Gene Symbol: CLUL1
  Gene Name: clusterin-like 1 (retinal)
  Uniprot ID: Q15846
  ENST ID: ENST00000400606
  CDS Start-End: 146-1546
acctgcaggcccgggccgcggggttggtttccaccctggaggttgctgacaccctgtgccctcggctgacttccagccggtggcacagacgcctccagggggcagcactcaagcgcatcttaggaatgacagtaacagcgggaacatgaagccgccactcttggtgtttattgtgtgtctgctgtggttgaaagacagtcactgcgcacccacttggaaggacaaaactgctatcagtgaaaacctgaagagtttttctgaggtgggggagatagatgcagatgaagaggtgaagaaggctttgactggtattaagcaaatgaaaatcatgatggaaagaaaagagaaggaacacaccaatctaatgagcaccctgaagaaatgcagagaagaaaagcaggaggccctgaaacttctgaatgaagttcaagaacatctggaggaagaagaaaggctatgccgggagtctttggcagattcctggggtgaatgcaggtcttgcctggaaaataactgcatgagaatttatacaacctgccaacctagctggtcctctgtgaaaaataagattgaacggtttttcaggaagatatatcaatttctatttcctttccatgaagataatgaaaaagatctccccatcagtgaaaagctcattgaggaagatgcacaattgacccaaatggaggatgtgttcagccagttgactgtggatgtgaattctctctttaacaggagttttaacgtcttcagacagatgcagcaagagtttgaccagacttttcaatcacatttcatatcagatacagacctaactgagccttacttttttccagctttctctaaagagccgatgacaaaagcagatcttgagcaatgttgggacattcccaacttcttccagctgttttgtaatttcagtgtctctatttatgaaagtgtcagtgaaacaattactaagatgctgaaggcaatagaagatttaccaaaacaagacaaagctcctgaccacggaggcctgatttcaaagatgttacctgggcaggacagaggactgtgtggggaacttgaccagaatttgtcaagatgtttcaaatttcatgaaaaatgccaaaaatgtcaggctcacctatctgaagactgtcctgatgtacctgctctgcacacagaattagacgaggcgatcaggttggtcaatgtatccaatcagcagtatggccagattctccagatgacccggaagcacttggaggacaccgcctatctggtggagaagatgagagggcaatttggctgggtgtctgaactggcaaaccaggccccagaaacagagatcatctttaattcaatacaggtagttccaaggattcatgaaggaaatatttccaaacaagatgaaacaatgatgacagacttaagcattctgccttcctctaatttcacactcaagatccctcttgaagaaagtgctgagagttctaacttcattggctacgtagtggcaaaagctctacagcattttaaggaacattttaaaacctggtaagaagatctaatgcatcctatatccagtaagtagaattatctcttcatctgggacctggaaatcctgaaataaaaaaggataatgcaataaacacagttgcaggaaagtatgttagctatatactatgaagtactcttagtttacttatgttgaatggcttagctattaatactcaaattgagttaaaatgaaaattcctccttaaaaaatcaaacgtaatatgtattacatttcatggtacattagtagttctttgtatattgaataaatactaaatcacctaggtgtctatgttctatcacatctacaaacatgtcacttcctaattaacaaaatgttcttcctttagtttgcttttgcacttaaaatatatataattgacttttttggaaaaaaa

SEQ ID NO: 120244 - DNA, 2199 bp, Homo sapiens
  Payload ID: 3571
  Gene Symbol: CLUL1
  Gene Name: clusterin-like 1 (retinal)
  ENST ID: ENST00000540035
  CDS Start-End: 210-1766
ggtttccaccctggaggttgctgacaccctgtgccctcggctgacttccagccggtggcacagacgcctccagggggcagcactcaagcgcatcttaggaatgacagagttgcgtccctctcggttgccaggctggagttcagtggcatgttcatagctcactgaagcctcaaattcctgggttcaagtgaccctcctacctcagccccatgaggacctgggactacagatggagtcttgctctcgttgcccagactggagtgcactgctgcaatctcagctcactgcaacctctacctcccaggttcaagcgattctcctgcctcagcctctcgagtggctgggactatagtaacagcgggaacatgaagccgccactcttggtgtttattgtgtgtctgctgtggttgaaagacagtcactgcgcacccacttggaaggacaaaactgctatcagtgaaaacctgaagagtttttctgaggtgggggagatagatgcagatgaagaggtgaagaaggctttgactggtattaagcaaatgaaaatcatgatggaaagaaaagagaaggaacacaccaatctaatgagcaccctgaagaaatgcagagaagaaaagcaggaggccctgaaacttctgaatgaagttcaagaacatctggaggaagaagaaaggctatgccgggagtctttggcagattcctggggtgaatgcaggtcttgcctggaaaataactgcatgagaatttatacaacctgccaacctagctggtcctctgtgaaaaataagattgaacggtttttcaggaagatatatcaatttctatttcctttccatgaagataatgaaaaagatctccccatcagtgaaaagctcattgaggaagatgcacaattgacccaaatggaggatgtgttcagccagttgactgtggatgtgaattctctctttaacaggagttttaacgtcttcagacagatgcagcaagagtttgaccagacttttcaatcacatttcatatcagatacagacctaactgagccttacttttttccagctttctctaaagagccgatgacaaaagcagatcttgagcaatgttgggacattcccaacttcttccagctgttttgtaatttcagtgtctctatttatgaaagtgtcagtgaaacaattactaagatgctgaaggcaatagaagatttaccaaaacaagacaaagctcctgaccacggaggcctgatttcaaagatgttacctgggcaggacagaggactgtgtggggaacttgaccagaatttgtcaagatgtttcaaatttcatgaaaaatgccaaaaatgtcaggctcacctatctgaagactgtcctgatgtacctgctctgcacacagaattagacgaggcgatcaggttggtcaatgtatccaatcagcagtatggccagattctccagatgacccggaagcacttggaggacaccgcctatctggtggagaagatgagagggcaatttggctgggtgtctgaactggcaaaccaggccccagaaacagagatcatctttaattcaatacaggtagttccaaggattcatgaaggaaatatttccaaacaagatgaaacaatgatgacagacttaagcattctgccttcctctaatttcacactcaagatccctcttgaagaaagtgctgagagttctaacttcattggctacgtagtggcaaaagctctacagcattttaaggaacattttaaaacctggtaagaagatctaatgcatcctatatccagtaagtagaattatctcttcatctgggacctggaaatcctgaaataaaaaaggataatgcaataaacacagttgcaggaaagtatgttagctatatactatgaagtactcttagtttacttatgttgaatggcttagctattaatactcaaattgagttaaaatgaaaattcctccttaaaaaatcaaacgtaatatgtattacatttcatggtacattagtagttctttgtatattgaataaatactaaatcacctaggtgtctatgttctatcacatctacaaacatgtcacttcctaattaacaaaatgttcttcctttagtttgcttttgcacttaaaatatatataattgacttttttggaaaaaaatctaagattcattgctttgttttgtaaagaccaata

SEQ ID NO: 120245 - DNA, 2449 bp, Homo sapiens
  Payload ID: 3571
  Gene Symbol: CLUL1
  Gene Name: clusterin-like 1 (retinal)
  ENST ID: ENST00000581619
  CDS Start-End: 848-2323
ctccagcctggacaacacagtgagattctgtctcaaaataaataaataaataaacccaagcagaaaaagaatcactctgaaaacgatcacatctaactatcaatgctcatacagtttatggaattatcagcccaacttgataaaatcagtatttgaggaaactgtggataagccccctgatttcaatccccattgtgccaggtcctggttaactgaggttaacgaagtaaagagctgcagacactattaactgctaccttaaaccgattactctagcttagcctactttccacgtacagattttaccagtggacaacatgatgctttatcttgtttttctctccctgggacttttctccagacattgaaaacagaaatactaataaggccacttttacctgcctgatgcaagaacagaattttcaaactcaacattaatgcaactcctcagtccctgacaatggcgggtggaaaagtttctaaaaatatgcagcagcacaattatcgggaagagatgagatactgttacctaataaaaatgccataaatagagaatgatgaactaccatgggaaatgaatgcatagaagaggacatgctggaatgtgggacagtaaaaatcacttaaactttgcgtgaccttgaagaaagtcacgatgatctgtttttccaggtccctcaaacagtgagatgtggctgtttcccaagtcttcctctccagtgtaaagggtctgaatttagacgctttgtgagtcttccttctttcgacagcctggagtctctcttgagtctcaaggctgcctgagttcctctctaacatcctctaggcagtatcagctaatgagacaatgaattccatggaggcagcagtgggaacagaagtacctctcttggataatttacaacactgtaacagcgggaacatgaagccgccactcttggtgtttattgtgtgtctgctgtggttgaaagacagtcactgcgcacccacttggaaggacaaaactgctatcagtgaaaacctgaagagtttttctgaggtgggggagatagatgcagatgaagaggtgaagaaggctttgactggtattaagcaaatgaaaatcatgatggaaagaaaagagaaggaacacaccaatctaatgagcaccctgaagaaatgcagagaagaaaagcaggaggccctgaaacttctgaatgaagttcaagaacatctggaggaagaagaaaggctatgccgggagtctttggcagattcctggggtgaatgcaggtcttgcctggaaaataactgcatgagaatttatacaacctgccaacctagctggtcctctgtgaaaaataagattgaacggtttttcaggaagatatatcaatttctatttcctttccatgaagataatgaaaaagatctccccatcagtgaaaagctcattgaggaagatgcacaattgacccaaatggaggatgtgttcagccagttgactgtggatgtgaattctctctttaacaggagttttaacgtcttcagacagatgcagcaagagtttgaccagacttttcaatcacatttcatatcagatacagacctaactgagccttacttttttccagctttctctaaagagccgatgacaaaagcagatcttgagcaatgttgggacattcccaacttcttccagctgttttgtaatttcagtgtctctatttatgaaagtgtcagtgaaacaattactaagatgctgaaggcaatagaagatttaccaaaacaagacaaagctcctgaccacggaggcctgatttcaaagatgttacctgggcaggacagaggactgtgtggggaacttgaccagaatttgtcaagatgtttcaaatttcatgaaaaatgccaaaaatgtcaggctcacctatctgaagactgtcctgatgtacctgctctgcacacagaattagacgaggcgatcaggttggtcaatgtatccaatcagcagtatggccagattctccagatgacccggaagcacttggaggacaccgcctatctggtggagaagatgagagggcaatttggctgggtgtctgaactggcaaaccaggccccagaaacagagatcatctttaattcaatacaggtagttccaaggattcatgaaggaaatatttccaaacaagatgaaacaatgatgacagacttaagcattctgccttcctctaatttcacactcaagatccctcttgaagaaagtgctgagagttctaacttcattggctacgtagtggcaaaagctctacagcattttaaggaacattttaaaacctggtaagcagagtgcctggttaggaatgccttgttgacaggaatagttaattctcaaaagggaaaaacaaaacttgtttccaaatacctggaaaacatgtttaacctcattaataaagacatgaaaacaaac

SEQ ID NO: 120246 - DNA, 1742 bp, Homo sapiens
  Payload ID: 3571
  Gene Symbol: CLUL1
  Gene Name: clusterin-like 1 (retinal)
  Uniprot ID: Q15846
  ENST ID: ENST00000579494
  CDS Start-End: 61-1461
ccagaagctggtggcaacttcactggggagatattgcaaagttagtgtaacagcgggaacatgaagccgccactcttggtgtttattgtgtgtctgctgtggttgaaagacagtcactgcgcacccacttggaaggacaaaactgctatcagtgaaaacctgaagagtttttctgaggtgggggagatagatgcagatgaagaggtgaagaaggctttgactggtattaagcaaatgaaaatcatgatggaaagaaaagagaaggaacacaccaatctaatgagcaccctgaagaaatgcagagaagaaaagcaggaggccctgaaacttctgaatgaagttcaagaacatctggaggaagaagaaaggctatgccgggagtctttggcagattcctggggtgaatgcaggtcttgcctggaaaataactgcatgagaatttatacaacctgccaacctagctggtcctctgtgaaaaataagattgaacggtttttcaggaagatatatcaatttctatttcctttccatgaagataatgaaaaagatctccccatcagtgaaaagctcattgaggaagatgcacaattgacccaaatggaggatgtgttcagccagttgactgtggatgtgaattctctctttaacaggagttttaacgtcttcagacagatgcagcaagagtttgaccagacttttcaatcacatttcatatcagatacagacctaactgagccttacttttttccagctttctctaaagagccgatgacaaaagcagatcttgagcaatgttgggacattcccaacttcttccagctgttttgtaatttcagtgtctctatttatgaaagtgtcagtgaaacaattactaagatgctgaaggcaatagaagatttaccaaaacaagacaaagctcctgaccacggaggcctgatttcaaagatgttacctgggcaggacagaggactgtgtggggaacttgaccagaatttgtcaagatgtttcaaatttcatgaaaaatgccaaaaatgtcaggctcacctatctgaagactgtcctgatgtacctgctctgcacacagaattagacgaggcgatcaggttggtcaatgtatccaatcagcagtatggccagattctccagatgacccggaagcacttggaggacaccgcctatctggtggagaagatgagagggcaatttggctgggtgtctgaactggcaaaccaggccccagaaacagagatcatctttaattcaatacaggtagttccaaggattcatgaaggaaatatttccaaacaagatgaaacaatgatgacagacttaagcattctgccttcctctaatttcacactcaagatccctcttgaagaaagtgctgagagttctaacttcattggctacgtagtggcaaaagctctacagcattttaaggaacattttaaaacctggtaagaagatctaatgcatcctatatccagtaagtagaattatctcttcatctgggacctggaaatcctgaaataaaaaaggataatgcaataaacacagttgcaggaaagtatgttagctatatactatgaagtactcttagtttacttatgttgaatggcttagctattaatactcaaattgagttaaaatgaaaattcctccttaaaaaatcaaacgtaatatgtattacatttcatggtacattagtagttctttgtatattgaataaatactaaatcacc

SEQ ID NO: 120247 - DNA, 574 bp, Homo sapiens
  Payload ID: 3571
  Gene Symbol: CLUL1
  Gene Name: clusterin-like 1 (retinal)
  ENST ID: ENST00000579912
  CDS Start-End: 328-574
accctgcgtcacctgcaggcccgggccgcggggttggtttccaccctggaggttgctgacaccctgtgccctcggctgacttccagccggtggcacagacgcctccagggggcagcactcaagcgcatcttaggaatgacaggcagtatcagctaatgagacaatgaattccatggaggcagcagtgggaacagaagtacctctcttggataatttacaacactgagttgcgtccctctcggttgccaggctggagttcagtggcatgttcatagctcactgaagcctcaaattcctgggttcaagtgaccctcctacctcagccccatgaggacctgggactacagtaacagcgggaacatgaagccgccactcttggtgtttattgtgtgtctgctgtggttgaaagacagtcactgcgcacccacttggaaggacaaaactgctatcagtgaaaacctgaagagtttttctgaggtgggggagatagatgcagatgaagaggtgaagaaggctttgactggtattaagcaaatgaaaatcatgatggaaagaaaagagaaggaacacacca

SEQ ID NO: 120248 - DNA, 348 bp, Homo sapiens
  Payload ID: 3571
  Gene Symbol: CLUL1
  Gene Name: clusterin-like 1 (retinal)
  ENST ID: ENST00000585155
  CDS Start-End: 1-103
gcaatttggctgggtgtctgaactggcaaaccaggccccagaaacagagatcatctttaattcaatacaggtaagaagatctaatgcatcctatatccagtaagtagaattatctcttcatctgggacctggaaatcctgaaataaaaaaggataatgcaataaacacagttgcaggaaagtatgttagctatatactatgaagtactcttagtttacttatgttgaatggcttagctattaatactcaaattgagttaaaatgaaaattcctccttaaaaaatcaaacgtaatatgtattacatttcatggtacattagtagttctttgtatattgaataaatacta

SEQ ID NO: 120249 - DNA, 1947 bp, Homo sapiens
  Payload ID: 3571
  Gene Symbol: CLUL1
  Gene Name: clusterin-like 1 (retinal)
  ENST ID: ENST00000620089
  CDS Start-End: 1-1557
atgaggacctgggactacagatggagtcttgctctcgttgcccagactggagtgcactgctgcaatctcagctcactgcaacctctacctcccaggttcaagcgattctcctgcctcagcctctcgagtggctgggactatagtaacagcgggaacatgaagccgccactcttggtgtttattgtgtgtctgctgtggttgaaagacagtcactgcgcacccacttggaaggacaaaactgctatcagtgaaaacctgaagagtttttctgaggtgggggagatagatgcagatgaagaggtgaagaaggctttgactggtattaagcaaatgaaaatcatgatggaaagaaaagagaaggaacacaccaatctaatgagcaccctgaagaaatgcagagaagaaaagcaggaggccctgaaacttctgaatgaagttcaagaacatctggaggaagaagaaaggctatgccgggagtctttggcagattcctggggtgaatgcaggtcttgcctggaaaataactgcatgagaatttatacaacctgccaacctagctggtcctctgtgaaaaataagattgaacggtttttcaggaagatatatcaatttctatttcctttccatgaagataatgaaaaagatctccccatcagtgaaaagctcattgaggaagatgcacaattgacccaaatggaggatgtgttcagccagttgactgtggatgtgaattctctctttaacaggagttttaacgtcttcagacagatgcagcaagagtttgaccagacttttcaatcacatttcatatcagatacagacctaactgagccttacttttttccagctttctctaaagagccgatgacaaaagcagatcttgagcaatgttgggacattcccaacttcttccagctgttttgtaatttcagtgtctctatttatgaaagtgtcagtgaaacaattactaagatgctgaaggcaatagaagatttaccaaaacaagacaaagctcctgaccacggaggcctgatttcaaagatgttacctgggcaggacagaggactgtgtggggaacttgaccagaatttgtcaagatgtttcaaatttcatgaaaaatgccaaaaatgtcaggctcacctatctgaagactgtcctgatgtacctgctctgcacacagaattagacgaggcgatcaggttggtcaatgtatccaatcagcagtatggccagattctccagatgacccggaagcacttggaggacaccgcctatctggtggagaagatgagagggcaatttggctgggtgtctgaactggcaaaccaggccccagaaacagagatcatctttaattcaatacaggtagttccaaggattcatgaaggaaatatttccaaacaagatgaaacaatgatgacagacttaagcattctgccttcctctaatttcacactcaagatccctcttgaagaaagtgctgagagttctaacttcattggctacgtagtggcaaaagctctacagcattttaaggaacattttaaaacctggtaagaagatctaatgcatcctatatccagtaagtagaattatctcttcatctgggacctggaaatcctgaaataaaaaaggataatgcaataaacacagttgcaggaaagtatgttagctatatactatgaagtactcttagtttacttatgttgaatggcttagctattaatactcaaattgagttaaaatgaaaattcctccttaaaaaatcaaacgtaatatgtattacatttcatggtacattagtagttctttgtatattgaataaatactaaatcacctaggtgtctatgttctatcacatctacaaacatgtcacttcctaattaacaaaatgttcttcctttagtttgcttttgcacttaaaatatatataattgacttttttgg

SEQ ID NO: 120250 - DNA, 2825 bp, Homo sapiens
  Payload ID: 3572
  Gene Symbol: CMIP
  Gene Name: c-Maf inducing protein
  Uniprot ID: Q8IY22
  ENST ID: ENST00000398040
  CDS Start-End: 224-2086
gtgtacgcgcgcgagccccagaggctgcggcagcagcagagcagcagagcagcagcccctgcctggcgcgacgtgcttccagtgcattctgagtcactcctctcctggcaaggggcacattcctgctgacgacttgtctcccgtggaggagcaacaggctctgctttccctggcctgagaaccctggcatatgtgcttgcctctgctgacagttgccagagcgatggcaagtgttgcccagaaaaagatttacaaatataagaaagtgctgagtaacccaagccgctgggaagttgtcttgaaagagatccggaccctggtggacatggccctgacatcccccctgcaggatgactccatcaaccaggccccactggaaatcgtctcgaaactgctctcagagaacacaaacttgaccacccaggagcatgaaaacatcattgtggcaatcgctcctttgctggaaaacaaccacccaccaccagatctctgtgaattcttttgcaagcactgcagagagcggccccggtccatggtggtcatcgaggtgttcacccccgtggtgcagcgaatcctcaagcataacatggactttgggaagtgcccgcgactgaggctgtttactcaggagtacatccttgccttgaacgagctcaacgcggggatggaagtggtgaagaagttcattcagagcatgcacggccccacagggcactgcccccacccccgggtcctgcccaacctggtggccgtgtgcctggctgccatctactcctgctatgaagagttcatcaacagccgcgacaattccccaagcctgaaggaaatccggaacggctgccagcagccgtgcgaccggaagcccactttacctctgcgccttctgcaccccagcccggacctggtgtctcaggaagccacgctgtctgaggcccggctcaagtcggtggtcgtggcctccagtgagatccacgtggaggtggaacgcaccagcactgccaagccggcgctgacggccagcgcaggcaacgacagcgagcccaacctcatcgactgcctcatggtcagccccgcctgcagcaccatgagcatcgagctgggcccccaggccgaccgcacgctcggctgctacgtggaaatcctcaagctgctgtcagactatgatgactggagaccgtctctggccagtttgcttcaacccattccattccccaaagaagctctcgcacatgagaagttcaccaaggaactgaagtacgtgattcagaggttcgccgaagaccccaggcaagaggtccactcatgcctgctgagcgtgcgggccggcaaagatggctggttccagctctacagccccggaggggtggcctgcgacgatgacggggagctgttcgccagcatggtgcacatcctcatgggctcctgttacaagaccaaaaaattcctgctctccctggcagaaaacaagctgggtccctgcatgctcctggcactgagggggaaccagaccatggtggagatcctgtgcttgatgctggaatacaacatcatcgacaacaacgacacccaactgcagatcatctcaaccctggagagcacagacgtggggaagcgcatgtacgagcagctgtgtgaccggcagcgggagctgaaggagctgcaaaggaaaggcgggcccaccaggctaacactgccctccaagtccacagacgctgacttggctcgtttgctgagctccggctccttcggaaacctggagaacctcagtttggccttcaccaatgtaaccagtgcctgcgccgagcacctcatcaaactgccttcgctcaagcagctgaacctgtggtccactcagtttggagacgctggccttcggctcctgtcggaacacctcaccatgctccaggtgctgaacctgtgcgagaccccggtcacagacgctggcctgctggccctgagctccatgaagagtctctgcagtttaaacatgaacagcaccaagctctcagctgacacctacgaagatctgaaggccaagcttcccaatttgaaggaagtggacgtccgctacaccgaagcctggtgaagctcccagctcaaggcaggaagacgtttgcaaccgcgacaaaataactcttgactaacagccgcagagcagccggtcctggggtcccaccctggtgccctggctgtgagatagatggggagtctttctgggggcggaggggggagggggtggggagggggcccacaagcacgcccagcccccgccgaattcttttagcttcgtaattggaacctttgacctgatctaaagtggactttgtagcaacaagaggagcatcagcgggtcggggaggggtttgggggtgggctggggggtgggggaccctttgtggattttctttgcctttgtgtttgatgccgtcgtgtgggaaaagtcaactccgatgccaccattgcgggccggacgaaggatgctttcttcctagaggctccgagctgagctgcgaactcgccccccgcccttgggacaagaagacccagtcacatcactgcacccgtcctgtgtcctcaccattgctatgcaaagtgattcttgttgtacataagatttaaataatgcacctatttaagacatgttgacaaattgcgggtctgggacccgcctcttatttatgaagtctttgaccgtcccccccgcccgaccccaccgccctcccgcccccacctggcgtgtagtactgtataaaccagtcagctgtcgggttagtggtagtattattgttatttttttaaaggaaacaaacagacaacaaaaagaa

SEQ ID NO: 120251 - DNA, 3937 bp, Homo sapiens
  Payload ID: 3572
  Gene Symbol: CMIP
  Gene Name: c-Maf inducing protein
  Uniprot ID: Q8IY22
  ENST ID: ENST00000539778
  CDS Start-End: 129-2168
ggcttcttggatgggctgggcgtgcatggcataaccgtttgagaacaacaaaccaagccggccgggctgccgctctgtttcctgcgaggagggaagttacagatctccgccctggcgtccggggaaggatgggacaggctgctgagccaactgggtacatggaaaactcagtctcctacagcgcaattgaagacgttcagctgctgtcctgggagaatgccccgaagtactgtttacagctcacgattcctgggggaactgtcttactgcaggctgccaatagctacctgcgagaccagtggttccattctctgcaatggaagaaaaagatttacaaatataagaaagtgctgagtaacccaagccgctgggaagttgtcttgaaagagatccggaccctggtggacatggccctgacatcccccctgcaggatgactccatcaaccaggccccactggaaatcgtctcgaaactgctctcagagaacacaaacttgaccacccaggagcatgaaaacatcattgtggcaatcgctcctttgctggaaaacaaccacccaccaccagatctctgtgaattcttttgcaagcactgcagagagcggccccggtccatggtggtcatcgaggtgttcacccccgtggtgcagcgaatcctcaagcataacatggactttgggaagtgcccgcgactgaggctgtttactcaggagtacatccttgccttgaacgagctcaacgcggggatggaagtggtgaagaagttcattcagagcatgcacggccccacagggcactgcccccacccccgggtcctgcccaacctggtggccgtgtgcctggctgccatctactcctgctatgaagagttcatcaacagccgcgacaattccccaagcctgaaggaaatccggaacggctgccagcagccgtgcgaccggaagcccactttacctctgcgccttctgcaccccagcccggacctggtgtctcaggaagccacgctgtctgaggcccggctcaagtcggtggtcgtggcctccagtgagatccacgtggaggtggaacgcaccagcactgccaagccggcgctgacggccagcgcaggcaacgacagcgagcccaacctcatcgactgcctcatggtcagccccgcctgcagcaccatgagcatcgagctgggcccccaggccgaccgcacgctcggctgctacgtggaaatcctcaagctgctgtcagactatgatgactggagaccgtctctggccagtttgcttcaacccattccattccccaaagaagctctcgcacatgagaagttcaccaaggaactgaagtacgtgattcagaggttcgccgaagaccccaggcaagaggtccactcatgcctgctgagcgtgcgggccggcaaagatggctggttccagctctacagccccggaggggtggcctgcgacgatgacggggagctgttcgccagcatggtgcacatcctcatgggctcctgttacaagaccaaaaaattcctgctctccctggcagaaaacaagctgggtccctgcatgctcctggcactgagggggaaccagaccatggtggagatcctgtgcttgatgctggaatacaacatcatcgacaacaacgacacccaactgcagatcatctcaaccctggagagcacagacgtggggaagcgcatgtacgagcagctgtgtgaccggcagcgggagctgaaggagctgcaaaggaaaggcgggcccaccaggctaacactgccctccaagtccacagacgctgacttggctcgtttgctgagctccggctccttcggaaacctggagaacctcagtttggccttcaccaatgtaaccagtgcctgcgccgagcacctcatcaaactgccttcgctcaagcagctgaacctgtggtccactcagtttggagacgctggccttcggctcctgtcggaacacctcaccatgctccaggtgctgaacctgtgcgagaccccggtcacagacgctggcctgctggccctgagctccatgaagagtctctgcagtttaaacatgaacagcaccaagctctcagctgacacctacgaagatctgaaggccaagcttcccaatttgaaggaagtggacgtccgctacaccgaagcctggtgaagctcccagctcaaggcaggaagacgtttgcaaccgcgacaaaataactcttgactaacagccgcagagcagccggtcctggggtcccaccctggtgccctggctgtgagatagatggggagtctttctgggggcggaggggggagggggtggggagggggcccacaagcacgcccagcccccgccgaattcttttagcttcgtaattggaacctttgacctgatctaaagtggactttgtagcaacaagaggagcatcagcgggtcggggaggggtttgggggtgggctggggggtgggggaccctttgtggattttctttgcctttgtgtttgatgccgtcgtgtgggaaaagtcaactccgatgccaccattgcgggccggacgaaggatgctttcttcctagaggctccgagctgagctgcgaactcgccccccgcccttgggacaagaagacccagtcacatcactgcacccgtcctgtgtcctcaccattgctatgcaaagtgattcttgttgtacataagatttaaataatgcacctatttaagacatgttgacaaattgcgggtctgggacccgcctcttatttatgaagtctttgaccgtcccccccgcccgaccccaccgccctcccgcccccacctggcgtgtagtactgtataaaccagtcagctgtcgggttagtggtagtattattgttatttttttaaaggaaacaaacagacaacaaaaagaagaaaaaaaaaaagaacctccttggaaaaattaattgctttttcgtaatggattctctatgctaatgctctctcgtctgtctgtctgtctgcccactcccccacccaccactgtgcgtttctgatttccaaatgtctccaactccctcacgaggtggggctcaggctggaggaggagggattaagatccccttgctccactaaggcccaagctctttctctcggcaccttttagacttgaatgggaggctgctaacccgccctctccagtccaccccggtaaaagagctgttccccacccccagggagctcctgtccctgtcagcctttgctgtcccctgtccccaacggagactctgtcacccctgggctccccctgccatcgtgtgcttcacgtggccccatgcatgcccgcctctctgcatggtctcttgggaaaagagagatgtgtcgcctccgccagtccgactgccctccccaccccacccccgccaccccccacatgtgaccactgcaacgaagacactccttctgtccccacctgctccgaagacaaaccaacctccgtttcttttataaacagtcggctttttcttaataagccctcactgtacagaacagcccgttgatggtttatttggggtccccctctccccccagcccttttttctgttggtttagcacaaatacttccctcctccggcacctccaaacctaccccacagtcagtgtacttgttttatatatatttaatcttattcaatggaaaccatgcttttgtcgttttatactttgctaggtagactttattacccccccactatgccctcatttttttaaaaaaggaaaaaaaaaagaaactgggttccagtcttaattcattttccgtgccaggttttatttcgtgtgtgtgtgagtgtgttctgttttgtgttttgttttttgttgttgtttttagttgtttggttttcttttctttcccccctccggtcccatacttcacagcactctggtgcgggaagaagcagaagc

SEQ ID NO: 120252 - DNA, 4357 bp, Homo sapiens
  Payload ID: 3572
  Gene Symbol: CMIP
  Gene Name: c-Maf inducing protein
  Uniprot ID: Q8IY22
  ENST ID: ENST00000537098
  CDS Start-End: 73-2394
gggggccccgccgccccagcagcccaggacagccccctctccccgcccccagccccctcccccggcgcggccatggatgtgaccagcagctcgggcggcggcggcgacccccggcagatcgaggagaccaagccgctgctggggggcgacgtgtcggcccccgaaggcacgaagatgggcgccgtgccctgccgccgggctcttctgctttgcaacgggatgaggtacaaactgctgcaggagggcgacattcaggtctgtgtcatccggcacccgcggacctttctcagcaagatcctcacctcgaaattcctgaggcgctgggagccgcaccacctaacgctggccgacaacagcctggcgtccgccacgccaactgggtacatggaaaactcagtctcctacagcgcaattgaagacgttcagctgctgtcctgggagaatgccccgaagtactgtttacagctcacgattcctgggggaactgtcttactgcaggctgccaatagctacctgcgagaccagtggttccattctctgcaatggaagaaaaagatttacaaatataagaaagtgctgagtaacccaagccgctgggaagttgtcttgaaagagatccggaccctggtggacatggccctgacatcccccctgcaggatgactccatcaaccaggccccactggaaatcgtctcgaaactgctctcagagaacacaaacttgaccacccaggagcatgaaaacatcattgtggcaatcgctcctttgctggaaaacaaccacccaccaccagatctctgtgaattcttttgcaagcactgcagagagcggccccggtccatggtggtcatcgaggtgttcacccccgtggtgcagcgaatcctcaagcataacatggactttgggaagtgcccgcgactgaggctgtttactcaggagtacatccttgccttgaacgagctcaacgcggggatggaagtggtgaagaagttcattcagagcatgcacggccccacagggcactgcccccacccccgggtcctgcccaacctggtggccgtgtgcctggctgccatctactcctgctatgaagagttcatcaacagccgcgacaattccccaagcctgaaggaaatccggaacggctgccagcagccgtgcgaccggaagcccactttacctctgcgccttctgcaccccagcccggacctggtgtctcaggaagccacgctgtctgaggcccggctcaagtcggtggtcgtggcctccagtgagatccacgtggaggtggaacgcaccagcactgccaagccggcgctgacggccagcgcaggcaacgacagcgagcccaacctcatcgactgcctcatggtcagccccgcctgcagcaccatgagcatcgagctgggcccccaggccgaccgcacgctcggctgctacgtggaaatcctcaagctgctgtcagactatgatgactggagaccgtctctggccagtttgcttcaacccattccattccccaaagaagctctcgcacatgagaagttcaccaaggaactgaagtacgtgattcagaggttcgccgaagaccccaggcaagaggtccactcatgcctgctgagcgtgcgggccggcaaagatggctggttccagctctacagccccggaggggtggcctgcgacgatgacggggagctgttcgccagcatggtgcacatcctcatgggctcctgttacaagaccaaaaaattcctgctctccctggcagaaaacaagctgggtccctgcatgctcctggcactgagggggaaccagaccatggtggagatcctgtgcttgatgctggaatacaacatcatcgacaacaacgacacccaactgcagatcatctcaaccctggagagcacagacgtggggaagcgcatgtacgagcagctgtgtgaccggcagcgggagctgaaggagctgcaaaggaaaggcgggcccaccaggctaacactgccctccaagtccacagacgctgacttggctcgtttgctgagctccggctccttcggaaacctggagaacctcagtttggccttcaccaatgtaaccagtgcctgcgccgagcacctcatcaaactgccttcgctcaagcagctgaacctgtggtccactcagtttggagacgctggccttcggctcctgtcggaacacctcaccatgctccaggtgctgaacctgtgcgagaccccggtcacagacgctggcctgctggccctgagctccatgaagagtctctgcagtttaaacatgaacagcaccaagctctcagctgacacctacgaagatctgaaggccaagcttcccaatttgaaggaagtggacgtccgctacaccgaagcctggtgaagctcccagctcaaggcaggaagacgtttgcaaccgcgacaaaataactcttgactaacagccgcagagcagccggtcctggggtcccaccctggtgccctggctgtgagatagatggggagtctttctgggggcggaggggggagggggtggggagggggcccacaagcacgcccagcccccgccgaattcttttagcttcgtaattggaacctttgacctgatctaaagtggactttgtagcaacaagaggagcatcagcgggtcggggaggggtttgggggtgggctggggggtgggggaccctttgtggattttctttgcctttgtgtttgatgccgtcgtgtgggaaaagtcaactccgatgccaccattgcgggccggacgaaggatgctttcttcctagaggctccgagctgagctgcgaactcgccccccgcccttgggacaagaagacccagtcacatcactgcacccgtcctgtgtcctcaccattgctatgcaaagtgattcttgttgtacataagatttaaataatgcacctatttaagacatgttgacaaattgcgggtctgggacccgcctcttatttatgaagtctttgaccgtcccccccgcccgaccccaccgccctcccgcccccacctggcgtgtagtactgtataaaccagtcagctgtcgggttagtggtagtattattgttatttttttaaaggaaacaaacagacaacaaaaagaagaaaaaaaaaaagaacctccttggaaaaattaattgctttttcgtaatggattctctatgctaatgctctctcgtctgtctgtctgtctgcccactcccccacccaccactgtgcgtttctgatttccaaatgtctccaactccctcacgaggtggggctcaggctggaggaggagggattaagatccccttgctccactaaggcccaagctctttctctcggcaccttttagacttgaatgggaggctgctaacccgccctctccagtccaccccggtaaaagagctgttccccacccccagggagctcctgtccctgtcagcctttgctgtcccctgtccccaacggagactctgtcacccctgggctccccctgccatcgtgtgcttcacgtggccccatgcatgcccgcctctctgcatggtctcttgggaaaagagagatgtgtcgcctccgccagtccgactgccctccccaccccacccccgccaccccccacatgtgaccactgcaacgaagacactccttctgtccccacctgctccgaagacaaaccaacctccgtttcttttataaacagtcggctttttcttaataagccctcactgtacagaacagcccgttgatggtttatttggggtccccctctccccccagcccttttttctgttggtttagcacaaatacttccctcctccggcacctccaaacctaccccacagtcagtgtacttgttttatatatatttaatcttattcaatggaaaccatgcttttgtcgttttatactttgctaggtagactttattacccccccactatgccctcatttttttaaaaaaggaaaaaaaaaagaaactgggttccagtcttaattcattttccgtgccaggttttatttcgtgtgtgtgtgagtgtgttctgttttgtgttttgttttttgttgttgtttttagttgtttggttttcttttctttcccccctccggtcccatacttcacagcactctggtgcgggaagaagcagaagcaaaaaaaataaaaataaaaaaataaataaaaataaaaaaaataaaaaaggaaaaaaaaaaaagaagaaacaagacatgccacctttcccctcgcactgttgcttttcctgatggttaatactactgtcacgtagctgtgtacaaagagatgtgaaatactttcaggcaaaaataaactgtaagtgactcatcaa

SEQ ID NO: 120253 - DNA, 2288 bp, Homo sapiens
  Payload ID: 3572
  Gene Symbol: CMIP
  Gene Name: c-Maf inducing protein
  ENST ID: ENST00000566513
  CDS Start-End: 370-2130
gtggtgctgaggagccgagcgggcggggagcctctagctgctccagcatcccacttgctcactgccccctgatcccgtggacagcgcagtcagaggcaggagcaggagaggaggaagcagaggaaaaggaggaggaggaggcggcttgcaactcctcagatccagagccggactccgagctaatgagggagcagcagacacggcctcccaacccttcccccaaggggaacccaggctgccaatagctacctgcgagaccagtggttccattctctgcaatggaagaaaaagatttacaaatataagaaagtgctgagtaacccaagccgctgggaagttgtcttgaaagagatccggaccctggtggacatggccctgacatcccccctgcaggatgactccatcaaccaggccccactggaaatcgtctcgaaactgctctcagagaacacaaacttgaccacccaggagcatgaaaacatcattgtggcaatcgctcctttgctggaaaacaaccacccaccaccagatctctgtgaattcttttgcaagcactgcagagagcggccccggtccatggtggtcatcgaggtgttcacccccgtggtgcagcgaatcctcaagcataacatggactttgggaagtgcccgcgactgaggctgtttactcaggagtacatccttgccttgaacgagctcaacgcggggatggaagtggtgaagaagttcattcagagcatgcacggccccacagggcactgcccccacccccgggtcctgcccaacctggtggccgtgtgcctggctgccatctactcctgctatgaagagttcatcaacagccgcgacaattccccaagcctgaaggaaatccggaacggctgccagcagccgtgcgaccggaagcccactttacctctgcgccttctgcaccccagcccggacctggtgtctcaggaagccacgctgtctgaggcccggctcaagtcggtggtcgtggcctccagtgagatccacgtggaggtggaacgcaccagcactgccaagccggcgctgacggccagcgcaggcaacgacagcgagcccaacctcatcgactgcctcatggtcagccccgcctgcagcaccatgagcatcgagctgggcccccaggccgaccgcacgctcggctgctacgtggaaatcctcaagctgctgtcagactatgatgactggagaccgtctctggccagtttgcttcaacccattccattccccaaagaagctctcgcacatgagaagttcaccaaggaactgaagtacgtgattcagaggttcgccgaagaccccaggcaagaggtccactcatgcctgctgagcgtgcgggccggcaaagatggctggttccagctctacagccccggaggggtggcctgcgacgatgacggggagctgttcgccagcatggtgcacatcctcatgggctcctgttacaagaccaaaaaattcctgctctccctggcagaaaacaagctgggtccctgcatgctcctggcactgagggggaaccagaccatggtggagatcctgtgcttgatgctggaatacaacatcatcgacaacaacgacacccaactgcagatcatctcaaccctggagagcacagacgtggggaagcgcatgtacgagcagctgtgtgaccggcagcgggagctgaaggagctgcaaaggaaaggcgggcccaccaggctaacactgccctccaagtccacagacgctgacttggctcgtttgctgagctccggctccttcggaaacctggagaacctcagtttggccttcaccaatgtaaccagtgcctgcgccgagcacctcatcaaactgccttcgctcaagcagctgaacctgtggtccactcagtttggagacgctggccttcggctcctgtcggaacacctcaccatgctccaggtgctgaacctgtgcgagaccccggtcacagacgctggcctgctggccctgagctccatgaagagtctctgcagtttaaacatgaacagcaccaagctctcagctgacacctacgaagatctgaaggccaagcttcccaatttgaaggaagtggacgtccgctacaccgaagcctggtgaagctcccagctcaaggcaggaagacgtttgcaaccgcgacaaaataactcttgactaacagccgcagagcagccggtcctggggtcccaccctggtgccctggctgtgagatagatggggagtctttctgggggcggaggggggagggggtggggagg

SEQ ID NO: 120254 - DNA, 3512 bp, Homo sapiens
  Payload ID: 3572
  Gene Symbol: CMIP
  Gene Name: c-Maf inducing protein
  ENST ID: ENST00000566462
  CDS Start-End: 322-699
aatgaaggagttcatccagttagaaagtctctcaagcaggccgggtgcatggggcaggcagctgcaaaggcgggagcccgggcgggggtggagggagtgcttggcccagacctccgccttccgagggcctccgtttccatgatgtcagagaggcggaactaactctgcctcaaatccagggaggcagcagcccctgtcccaaccgctctctggcttcgacacagcgcccaagcaaagaaaaagatttacaaatataagaaagtgctgagtaacccaagccgctgggaagttgtcttgaaagagatccggaccctggtggacatggccctgacatcccccctgcaggatgactccatcaaccaggccccactggaaatcgtctcgaaactgctctcagagaacacaaacttgaccacccaggagcatgaaaacatcattgtggcaatcgctcctttgctggaaaacaaccacccaccaccagatctctgtgaattcttttgcaagcactgcagagagcggccccggtccatggtggtcatcgaggtgttcacccccgtggtgcagcgaatcctcaagcataacatggtgagtcaccctgccccaacacccagaccccagcgcccagaacatgaggccccgcgcgcctccctggccttttgcgttggcacagatttggggaatgtggttggcccagcgtgacagccaggaactggggttgagattctggttaaggacttttgggggttttgtacagcttgtcctccattacggcaacaggaagaatctttttgcagttcctaagaattacaaaaataccgcagctggaggagaagaggaaagcctcccgggaagaataggcccaaataatgtctgtagatgccctgccctcaaggacccagagcgcgactttgcactcctttagtgtgtgctgcgcacagcgaggtccttccagagagcactgtatggaagggggcaggagtagccttgcagtggagaaaccagacacactcagcctcagccaggtgatcaaggtcaacatcgacaacaacaagccagttagacagaatattcccttcataggacgtataaaaacgacacttgacctctatggtcttcctcccagtaacccatcaccccattccaatcatgagaaaaacatcagacaaatcccaacaaggggacagtctacaaagtacctggccagtactccccacggtcaaggtcatcaaaaacaaggagattctaagaaactgtcacagctcagaggagtctacgggggcgtaacgactaaatgtcatttggggctctccatgggatcccagaacagaaaagggacatgaagggaaaactgaggaaatctgaataaagcttggcctttaatttttttttttaaatacaaaagcaggatttaattgcacacttagagcgggtggggcgcttgtaatctgtgtggccccttggtgttccctcatcattccagggacagcagcaaatgccattatttgccctgtatgtcacgaggaaactgaggcttagctaggtccactaagtggccacagggaccacaggtaggaataagaataacatctttttgcagatgcttattgaacactttcttggagtcaagagtgtggtgctctttgagtgtattgtgttattaaccctcatgccattcccatgacacctgtgcataggaggaatctgggacccagagaggtgggacgggataggcagggtctgatgagcagctgtgggtggtcctggtgggagctaaggagcaggcagcctgaggccagggcccattcccaatcacatgttgtactgagccagccaccacgttagattttagagtctcctggagcacgtgaaaacaactgaaaaagggtaaccacacatcatttcacttgtgatgtagcttgcctgtctccacaccatgcccctgaagaatagtatatcacctacagccccttccccagtcaggaatggaagtgcatgacacatgtgctcctctaccccttccatgctcatggcagacatcattaatcaattatagcactctttctgtagagccagagacagcatcacactctttcccctcctgcattccaggccaccactaccaactgaaatcgtgttagtaccataatgaatgctatgtaccattctctaccctaagcgattgcaaactgtaaatgaattgttgctgatttctgagcccctcctagatttggggtaaattcatttcttgttttcagaacacaggggatagggacaccctgtgcagttctttctccaggacaaggagactccccactgggggatggggcggggtttctgccttaatttgggcgctcatagtttcaaggaggagctctttctggctttggccagctagaaggaaaggtgccctgtttgttaactttaaaatcactacgggtgtagtgtatggagtgggctgtgccatgctggagttcagagcaaaggttcttcaggttttcttgcgaaggaccttaacttgtcaatggcagagccacacccccgggacatacttggcagaggaatgcctcttcaggcacataaacatttttgcatactccatgttagtcaataaaccgtttcataagggttctttgaggacatctgacttcaaagggaaaaaattcataattcagacaggctctcggggcttcaccatacaacgcctttcttgtatttggttagttttatgggcctggagtgttgaccatgtattaattttctctataaaaatcagaaccgctctgggcagacccagaatttatagtatctgtggcagtctggcagagagtagggaccctcagccatgagtcctcgcctcacttgtaacgagtaccccctaagtgatcccaggtgtctggggatgctttaacgcacccagatcccaccttgctcttggcgcctcctaattacacaccatgagcggcggcggcagaggagaactgctgggaggaccgaggaggatccgcctctcgtgtagaagaacagactgtattaaacagtgattatggccatgccaggcacaggaagacctgacctcatggaatcctaacaacacaggcggtgggcgagagagagctttgacatttactcactgaatgcgccctgatgcttaatgagtggcacgggtcagcagcaccgttgtggagctggggctctcagctggtgtggggggggggtcatgtctctggctaaggagcgtacctagcctgcctaagccatgagcctgttggggtggcatgaacagtgactgctcttcaccccaaatgcagtgtttctccttaaggaggcactcagacatttaggaaacggggggaacgtagccacggtgctgttctgggatttgggggctcccccattctgggtgcatctcttgcaaatatgttatgtgctccctttcacggatgagcaaactgaagctttgagagtctcaaagaatgttctttactagactgaaataaaaactagaaacaaaa

SEQ ID NO: 120255 - DNA, 4000 bp, Homo sapiens
  Payload ID: 3572
  Gene Symbol: CMIP
  Gene Name: c-Maf inducing protein
  ENST ID: ENST00000621537
  CDS Start-End: 1-2037
gggcagtgtgagcagccaactgggtacatggaaaactcagtctcctacagcgcaattgaagacgttcagctgctgtcctgggagaatgccccgaagtactgtttacagctcacgattcctgggggaactgtcttactgcaggctgccaatagctacctgcgagaccagtggttccattctctgcaatggaagaaaaagatttacaaatataagaaagtgctgagtaacccaagccgctgggaagttgtcttgaaagagatccggaccctggtggacatggccctgacatcccccctgcaggatgactccatcaaccaggccccactggaaatcgtctcgaaactgctctcagagaacacaaacttgaccacccaggagcatgaaaacatcattgtggcaatcgctcctttgctggaaaacaaccacccaccaccagatctctgtgaattcttttgcaagcactgcagagagcggccccggtccatggtggtcatcgaggtgttcacccccgtggtgcagcgaatcctcaagcataacatggactttgggaagtgcccgcgactgaggctgtttactcaggagtacatccttgccttgaacgagctcaacgcggggatggaagtggtgaagaagttcattcagagcatgcacggccccacagggcactgcccccacccccgggtcctgcccaacctggtggccgtgtgcctggctgccatctactcctgctatgaagagttcatcaacagccgcgacaattccccaagcctgaaggaaatccggaacggctgccagcagccgtgcgaccggaagcccactttacctctgcgccttctgcaccccagcccggacctggtgtctcaggaagccacgctgtctgaggcccggctcaagtcggtggtcgtggcctccagtgagatccacgtggaggtggaacgcaccagcactgccaagccggcgctgacggccagcgcaggcaacgacagcgagcccaacctcatcgactgcctcatggtcagccccgcctgcagcaccatgagcatcgagctgggcccccaggccgaccgcacgctcggctgctacgtggaaatcctcaagctgctgtcagactatgatgactggagaccgtctctggccagtttgcttcaacccattccattccccaaagaagctctcgcacatgagaagttcaccaaggaactgaagtacgtgattcagaggttcgccgaagaccccaggcaagaggtccactcatgcctgctgagcgtgcgggccggcaaagatggctggttccagctctacagccccggaggggtggcctgcgacgatgacggggagctgttcgccagcatggtgcacatcctcatgggctcctgttacaagaccaaaaaattcctgctctccctggcagaaaacaagctgggtccctgcatgctcctggcactgagggggaaccagaccatggtggagatcctgtgcttgatgctggaatacaacatcatcgacaacaacgacacccaactgcagatcatctcaaccctggagagcacagacgtggggaagcgcatgtacgagcagctgtgtgaccggcagcgggagctgaaggagctgcaaaggaaaggcgggcccaccaggctaacactgccctccaagtccacagacgctgacttggctcgtttgctgagctccggctccttcggaaacctggagaacctcagtttggccttcaccaatgtaaccagtgcctgcgccgagcacctcatcaaactgccttcgctcaagcagctgaacctgtggtccactcagtttggagacgctggccttcggctcctgtcggaacacctcaccatgctccaggtgctgaacctgtgcgagaccccggtcacagacgctggcctgctggccctgagctccatgaagagtctctgcagtttaaacatgaacagcaccaagctctcagctgacacctacgaagatctgaaggccaagcttcccaatttgaaggaagtggacgtccgctacaccgaagcctggtgaagctcccagctcaaggcaggaagacgtttgcaaccgcgacaaaataactcttgactaacagccgcagagcagccggtcctggggtcccaccctggtgccctggctgtgagatagatggggagtctttctgggggcggaggggggagggggtggggagggggcccacaagcacgcccagcccccgccgaattcttttagcttcgtaattggaacctttgacctgatctaaagtggactttgtagcaacaagaggagcatcagcgggtcggggaggggtttgggggtgggctggggggtgggggaccctttgtggattttctttgcctttgtgtttgatgccgtcgtgtgggaaaagtcaactccgatgccaccattgcgggccggacgaaggatgctttcttcctagaggctccgagctgagctgcgaactcgccccccgcccttgggacaagaagacccagtcacatcactgcacccgtcctgtgtcctcaccattgctatgcaaagtgattcttgttgtacataagatttaaataatgcacctatttaagacatgttgacaaattgcgggtctgggacccgcctcttatttatgaagtctttgaccgtcccccccgcccgaccccaccgccctcccgcccccacctggcgtgtagtactgtataaaccagtcagctgtcgggttagtggtagtattattgttatttttttaaaggaaacaaacagacaacaaaaagaagaaaaaaaaaaagaacctccttggaaaaattaattgctttttcgtaatggattctctatgctaatgctctctcgtctgtctgtctgtctgcccactcccccacccaccactgtgcgtttctgatttccaaatgtctccaactccctcacgaggtggggctcaggctggaggaggagggattaagatccccttgctccactaaggcccaagctctttctctcggcaccttttagacttgaatgggaggctgctaacccgccctctccagtccaccccggtaaaagagctgttccccacccccagggagctcctgtccctgtcagcctttgctgtcccctgtccccaacggagactctgtcacccctgggctccccctgccatcgtgtgcttcacgtggccccatgcatgcccgcctctctgcatggtctcttgggaaaagagagatgtgtcgcctccgccagtccgactgccctccccaccccacccccgccaccccccacatgtgaccactgcaacgaagacactccttctgtccccacctgctccgaagacaaaccaacctccgtttcttttataaacagtcggctttttcttaataagccctcactgtacagaacagcccgttgatggtttatttggggtccccctctccccccagcccttttttctgttggtttagcacaaatacttccctcctccggcacctccaaacctaccccacagtcagtgtacttgttttatatatatttaatcttattcaatggaaaccatgcttttgtcgttttatactttgctaggtagactttattacccccccactatgccctcatttttttaaaaaaggaaaaaaaaaagaaactgggttccagtcttaattcattttccgtgccaggttttatttcgtgtgtgtgtgagtgtgttctgttttgtgttttgttttttgttgttgtttttagttgtttggttttcttttctttcccccctccggtcccatacttcacagcactctggtgcgggaagaagcagaagcaaaaaaaataaaaataaaaaaataaataaaaataaaaaaaataaaaaaggaaaaaaaaaaaagaagaaacaagacatgccacctttcccctcgcactgttgcttttcctgatggttaatactactgtcacgtagctgtgtacaaagagatgtgaaatactttcaggcaaaaataaactgtaagtgactcatcaa

SEQ ID NO: 120256 - DNA, 1201 bp, Homo sapiens
  Payload ID: 3573
  Gene Symbol: CMSS1
  Gene Name: cms1 ribosomal small subunit homolog (yeast)
  Uniprot ID: Q9BQ75
  ENST ID: ENST00000421999
  CDS Start-End: 147-986
gacgtcatcgccgcggggcggaggcgacagtgtctagcgggagctccgcgtgtagctacgccggccgcctggctttgagacaacgtgattctccgcagctggtcgcctacccgtgatgttctgcccacgtcgagacctgagctgaaatggcagacgatctcggagacgagtggtgggagaaccagccgactggagcaggcagcagcccagaagcatcagatggtgaaggagaaggagacacagaagtgatgcagcaggagacagttccagttcctgtaccttcagagaaaaccaaacagcctaaagaatgttttttgatacaaccaaaggaaagaaaagagaataccaccaagaccaggaaaagaagaaagaagaaaattactgatgttcttgcaaaatcagaaccaaaaccagggttacctgaagacctacagaagctgatgaaggactattatagcagcagacgcttggtgattgaattagaagaactgaacctgccagactcctgtttcctcaaggccaatgatttgactcacagtctttcctcatacctaaaagaaatttgtcctaagtgggtaaaacttaggaagaaccacagtgagaagaaatcggtcctgatgctgatcatctgcagctcggccgtccgagccctggagctcattaggtcgatgacagcattcagaggagacggcaaagttataaaattatttgcaaagcacataaaggtccaggcgcaggtaaagttgctggagaagcgtgtggtgcacctgggtgtaggaactccggggagaattaaagaacttgttaaacaaggtggccttaatttgagccccttaaaatttctggtttttgactggaactggagagatcagaagttgaggagaatgatggacattcccgagataagaaaggaggtattcgaacttctggaaatgggagtgctcagtctgtgcaagtcagaatccttgaaactgggccttttctaagtctgtgtcctaatgaagattccagttttcacagtagaagttgcatcttatttaatgactctgatacattgcaagcactcagtaaatatcagcaaatagtttatgttaattgtgtcaacagatggatcactggaatgtggggattctgaaacagaaatgaaactgtccttttgacaactctcttatataataaagtatcaccggcttgtgtatga

SEQ ID NO: 120257 - DNA, 753 bp, Homo sapiens
  Payload ID: 3573
  Gene Symbol: CMSS1
  Gene Name: cms1 ribosomal small subunit homolog (yeast)
  ENST ID: ENST00000478909
  CDS Start-End: 79-753
agatactgtggtgctgagacggttatcagactagtagcaaagacattcattttgtagtcattatagcaaaggcatttgatgcagctggtttataaaaaccctaaagaatgttttttgatacaaccaaaggaaagaaaagagaataccaccaagaccaggaaaagaagaaagaagaaaattactgatgttcttgcaaaatcagaaccaaaaccagggttacctgaagacctacagaagctgatgaaggactattatagcagcagacgcttggtgattgaattagaagaactgaacctgccagactcctgtttcctcaaggccaatgatttgactcacagtctttcctcatacctaaaagaaatttgtcctaagtgggtaaaacttaggaagaaccacagtgagaagaaatcggtcctgatgctgatcatctgcagctcggccgtccgagccctggagctcattaggtcgatgacagcattcagaggagacggcaaagttataaaattatttgcaaagcacataaaggtccaggcgcaggtaaagttgctggagaagcgtgtggtgcacctgggtgtaggaactccggggagaattaaagaacttgttaaacaaggtggccttaatttgagccccttaaaatttctggtttttgactggaactggagagatcagaagttgaggagaatgatggacattcccgagataagaaaggaggtattcgaacttctggaaatgggagtgctcagtctgtgc

SEQ ID NO: 120258 - DNA, 881 bp, Homo sapiens
  Payload ID: 3573
  Gene Symbol: CMSS1
  Gene Name: cms1 ribosomal small subunit homolog (yeast)
  ENST ID: ENST00000491299
  CDS Start-End: 98-214
gtgtagctacgccggccgcctggctttgagacaacgtgattctccgcagctggtcgcctacccgtgatgttctgcccacgtcgagacctgagctgaaatggcagacgatctcggagacgagtggtgggagaaccagccgactggagcaggcagcagcccagggcccctcccagtgtcttcaagagtttgtgcaagcaaatacctgaaaacctaaggaaaatgatgggaaactgaacttcagatacttatcaaaaagaagatgaaggtagggattgagaagcatcagatggtgaaggagaaggagacacagaagtgatgcagcaggagacagttccagttcctgtaccttcagagaaaaccaaacagcctaaagaatgttttttgatacaaccaaaggaaagaaaagagaataccaccaagaccaggaaaagaagaaagaagaaaattactgatgttcttgcaaaatcagaaccaaaaccagggttacctgaagacctacagaagctgatgaaggactattatagcagcagacgcttggtgattgaattagaagaactgaacctgccagactcctgtttcctcaaggccaatgatttgactcacagtctttcctcatacctaaaagaaatttgtcctaagtgggtaaaacttaggaagaaccacagtgagaagaaatcggtcctgatgctgatcatctgcagctcggccgtccgagccctggagctcattaggtcgatgacagcattcagaggagacggcaaagttataaaattatttgcaaagcacataaaggtccaggcgcaggtaaagttgctggagaagcgtgtggtgcacctgggtgtaggaactccggggagaattaaagaacttgttaaacaagg

SEQ ID NO: 120259 - DNA, 538 bp, Homo sapiens
  Payload ID: 3573
  Gene Symbol: CMSS1
  Gene Name: cms1 ribosomal small subunit homolog (yeast)
  ENST ID: ENST00000497345
  CDS Start-End: 1-247
tgaagacctacagaagctgatgaaggactattatagcagcagacgcttggtgattgaattagaagaactgaacctgccagactcctgtttcctcaaggccaatgatttgactcacagtctttcctcatacctaaaagaaatttgtcctaagtgggtaaaacttaggaagaaccacagtgagaagaaatcggtcctgatgctgatcatctgcagctcggccgtccgagccctggagctcattagataagaaaggaggtattcgaacttctggaaatgggagtgctcagtctgtgcaagtcagaatccttgaaactgggccttttctaagtctgtgtcctaatgaagattccagttttcacagtagaagttgcatcttatttaatgactctgatacattgcaagcactcagtaaatatcagcaaatagtttatgttaattgtgtcaacagatggatcactggaatgtggggattctgaaacagaaatgaaactgtccttttgacaactctcttatataataaagtatcaccggcttgtgt

SEQ ID NO: 120260 - DNA, 397 bp, Homo sapiens
  Payload ID: 3573
  Gene Symbol: CMSS1
  Gene Name: cms1 ribosomal small subunit homolog (yeast)
  ENST ID: ENST00000463526
  CDS Start-End: 321-397
gtcatcgccgcggggcggaggcgacagtgtctagcgggagctccgcgtgtagctacgccggccgcctggctttgagacaacgtgattctccgcagctggtcgcctacccgtgatgttctgcccacgtcgagacctgagctgaaatggcagacgatctcggagacgagtggtgggagaaccagccgactggagcaggcagcagcccaggtttttaaaactcatttggacacccacctcaatatatgctgtgcaattagaataatccagaagactgaaagagtaaagcatcagatggtgaaggagaaggagacacagaagtgatgcagcaggagacagttccagttcctgtaccttcagagaaaaccaaacagcctaaagaatgttttttgatacaacc

SEQ ID NO: 120261 - DNA, 1056 bp, Homo sapiens
  Payload ID: 3573
  Gene Symbol: CMSS1
  Gene Name: cms1 ribosomal small subunit homolog (yeast)
  Uniprot ID: Q9BQ75
  ENST ID: ENST00000489081
  CDS Start-End: 60-845
tttagtgtcacaggagacacgagggcaaagtgctgaggaaactctagagcaacatcggaatgcatggtgaagcatcagatggtgaaggagaaggagacacagaagtgatgcagcaggagacagttccagttcctgtaccttcagagaaaaccaaacagcctaaagaatgttttttgatacaaccaaaggaaagaaaagagaataccaccaagaccaggaaaagaagaaagaagaaaattactgatgttcttgcaaaatcagaaccaaaaccagggttacctgaagacctacagaagctgatgaaggactattatagcagcagacgcttggtgattgaattagaagaactgaacctgccagactcctgtttcctcaaggccaatgatttgactcacagtctttcctcatacctaaaagaaatttgtcctaagtgggtaaaacttaggaagaaccacagtgagaagaaatcggtcctgatgctgatcatctgcagctcggccgtccgagccctggagctcattaggtcgatgacagcattcagaggagacggcaaagttataaaattatttgcaaagcacataaaggtccaggcgcaggtaaagttgctggagaagcgtgtggtgcacctgggtgtaggaactccggggagaattaaagaacttgttaaacaaggtggccttaatttgagccccttaaaatttctggtttttgactggaactggagagatcagaagttgaggagaatgatggacattcccgagataagaaaggaggtattcgaacttctggaaatgggagtgctcagtctgtgcaagtcagaatccttgaaactgggccttttctaagtctgtgtcctaatgaagattccagttttcacagtagaagttgcatcttatttaatgactctgatacattgcaagcactcagtaaatatcagcaaatagtttatgttaattgtgtcaacagatggatcactggaatgtggggattctgaaacagaaatgaaactgtccttttgacaactctcttatataataaagtatcaccggcttgtgt

SEQ ID NO: 120262 - DNA, 902 bp, Homo sapiens
  Payload ID: 3574
  Gene Symbol: CDRT1
  Gene Name: CMT1A duplicated region transcript 1
  ENST ID: ENST00000261644
  CDS Start-End: 1-902
gtccaaagccccagaaaatgaacacttccttggggcagcatctaaccctgaggaaccatggaggaattcactccggtgtatatccgaaatgaataggctgttttctggaaaagcagacataaccaagccagggtacgatccctgcaatctattggttgacctggatgacatcagagacctgtcttctgggttcagcaaataccgagacttcatccgttacctgcccatccacctctccaagtacattctaagtatgctggggtgtatgaggggatttcccagacacctcccctcttggcccagttctggggtttctgggtccatcttttttttttttccaggaatgctggatagacacaccctgaacaagtgcgcctctgtgagccagcactgggccgccatggctcaacaggtcaagatggacttgtcagcgcacggcttcattcagaaccagattaccttcttgcaggggtcctatacaagaggaattgatcctaattatgccaataaggtttctatcccagttcctaaaatggtagatgacgggaagagcatgcgtgtgaaacatccgaagtggaagttgagaacgaagaatgagtacaacctgtggactgcataccagaacgaggaaacgcagcaggtcctgatggaggagagaaatgttttctgtgggacctacaatgttcgcattctctctgacacgtgggatcaaaaccgagtcatccactattccgggggagatctgatagctgtgtcatctaatcgaaagatccatcttctggacatcatacaagtgaaagcgatacccgttgaattccgaggccatgctgggagtgtccgggccctcttcctgtgtgaggaggaaaactttctcctaagcgggagctatgacctaagtatca

SEQ ID NO: 120263 - DNA, 1557 bp, Homo sapiens
  Payload ID: 3574
  Gene Symbol: CDRT1
  Gene Name: CMT1A duplicated region transcript 1
  Uniprot ID: O95170
  ENST ID: ENST00000354433
  CDS Start-End: 212-970
ggattcaaatccaggcccctgactctaagctgaaccatgagaatctgctgcctcccaactaactaattatctacatgggttctacgcagtatgatcctttgggccctcaggaactctcacattcttttggcctgattcctgcagatactgggatctgaaaagtggggtttgcacacgaatcttcggtggtcaccaggggactatcacttgcatggacttgtgtaagaacaggctcgtatctggaggaagagattgccaggtaaaagtatgggatgtagacacagggaagtgcctgaagacgtttagacacaaagaccccatcttggccaccaggatcaatgatacctacattgtgagcagctgtgagcgagggctggtgaaagtgtggcacattgccatggcccagttggtaaagactctcagtggccacgagggagctgtgaaatgcctgttctttgaccagtggcatctcctctcaggaagcactgatggcctggtcatggcctggagcatggtggggaagtacgagcgctgcctgatggccttcaagcatcccaaagaggtgctcgacgtgtcccttctcttcctccgggtcatcagcgcctgtgcagatggcaagatccgaatttacaatttcttcaatgggaactgtatgaaggtgataaaagccaatggcagaggcgatcctgtgctgtccttctttattcagggcaacagaatttcagtctgccacatcagcacatttgctaaaagaattaacgtgggatggaatggaatcgaaccaagtgctacagctcagggaggaaatgcctccttgaccgagtgtgctcatgtgagactccacatcgcaggacacttaccagcatcgaggctgcccgtggccgctgtccagcccatgacaggcgggatggccccaaccacagctccgacccatgtgttggcaatgctgatccttttcagtggtgtgtagcagcaggtatacaggaaaatgttgaagagccccagggctcctgtgagtggattcacccccaaggtcagaatggcaactcctggaacagcacaacaagtggcaaaggacacagctagcaacgggctggaaaaaggcagagaacgtggagtgatcatctccaactcaactcaatcacactgcctaaaatcggcactgacaaagtacaaataatccacctatccagtagaggcagcactgatctggctgattcctggatatggggaatcctctttatgaaacaaacttacaataagaaagaatatgtttgtgggagctctggctgctcttcttgattttgctagctaagagtaaagtggttaagagagtcaggattagagtgttctggattcatataggttctgtcccttcctggctatagggcagctaggtttcacttactcctctctataagagaaatgatcatcttttcctcctagggttgaagactgactgagacaatgcctcctgcacagtgttccattttatatttagtcatgaacaaacaacttcagacacaatattggaagatttgggcagaaaatactacc

SEQ ID NO: 120264 - DNA, 2337 bp, Homo sapiens
  Payload ID: 3574
  Gene Symbol: CDRT1
  Gene Name: CMT1A duplicated region transcript 1
  ENST ID: ENST00000395667
  CDS Start-End: 193-2337
agacttctgctggcagttactgagagagataggctttccatccatggcagccatttacttttgctctgggagacgtttgtaatagaaaaggcacaactggggtatttattcatttccccccgttcctctagtgtttggtggcgttgccgttgcaagtgcgcagggctaaaatgaactggttatcttaggatcatggaaaacctggaatcaaggctcaagaatgccccctattttcgttgtgagaagggaaccgattccatccctctatgccggaagtgtgagacgcgtgtcttagcctggaagatcttctctaccaaagagtggttctgcaggatcaatgacatatcacagaggaggtttctagttggcattctgaagcagttaaatagcttatatttgttacactatttccaaaatatccttcagaccacacagggaaaggatttcatctataacaggtcccggatcgacctcagcaagaaagaggggaaagttgtgaagtcctccttgaaccaaatgttggataaaacagtagaacagaagatgaaagagatcttgtattggtttgcgaacagcacccagtggaccaaggcgaattatactctcttactgctgcagatgtgcaaccccaaattactgctcactgctgccaatgtgatcagagtcctgtttctgagagaggagaacaatatctcagggctcaatcaagacatcacagatgtgtgtttttcccctgagaaagaccacagctccaagtctgcgacctcacaagtctattggacagccaaaactcagcacacatcccttcctttgtccaaagccccagaaaatgaacacttccttggggcagcatctaaccctgaggaaccatggaggaattcactccggtgtatatccgaaatgaataggctgttttctggaaaagcagacataaccaagccagggtacgatccctgcaatctattggttgacctggatgacatcagagacctgtcttctgggttcagcaaataccgagacttcatccgttacctgcccatccacctctccaagtacattctaagaatgctggatagacacaccctgaacaagtgcgcctctgtgagccagcactgggccgccatggctcaacaggtcaagatggacttgtcagcgcacggcttcattcagaaccagattaccttcttgcaggggtcctatacaagaggaattgatcctaattatgccaataaggtttctatcccagttcctaaaatggtagatgacgggaagagcatgcgtgtgaaacatccgaagtggaagttgagaacgaagaatgagtacaacctgtggactgcataccagaacgaggaaacgcagcaggtcctgatggaggagagaaatgttttctgtgggacctacaatgttcgcattctctctgacacgtgggatcaaaaccgagtcatccactattccgggggagatctgatagctgtgtcatctaatcgaaagatccatcttctggacatcatacaagtgaaagcgatacccgttgaattccgaggccatgctgggagtgtccgggccctcttcctgtgtgaggaggaaaactttctcctaagcgggagctatgacctaagtatcagatactgggatctgaaaagtggggtttgcacacgaatcttcggtggtcaccaggggactatcacttgcatggacttgtgtaagaacaggctcgtatctggaggaagagattgccaggtaaaagtatgggatgtagacacagggaagtgcctgaagacgtttagacacaaagaccccatcttggccaccaggatcaatgatacctacattgtgagcagctgtgagcgagggctggtgaaagtgtggcacattgccatggcccagttggtaaagactctcagtggccacgagggagctgtgaaatgcctgttctttgaccagtggcatctcctctcaggaagcactgatggcctggtcatggcctggagcatggtggggaagtacgagcgctgcctgatggccttcaagcatcccaaagaggtgctcgacgtgtcccttctcttcctccgggtcatcagcgcctgtgcagatggcaagatccgaatttacaatttcttcaatgggaactgtatgaaggtgataaaagccaatggcagaggcgatcctgtgctgtccttctttattcagggcaacagtgatcacttacggaagacctatctgccagttgagtggaagacagatggaaggagggttaggaagaaggcagagaagtcagctgggatgtgctgtaataacccacgcaaaaccgatgatgggctgaagctaaagcactga

SEQ ID NO: 120265 - DNA, 2571 bp, Homo sapiens
  Payload ID: 3574
  Gene Symbol: CDRT1
  Gene Name: CMT1A duplicated region transcript 1
  Uniprot ID: O95170
  ENST ID: ENST00000395906
  CDS Start-End: 1-2259
atggaaaacctggaatcaaggctcaagaatgccccctattttcgttgtgagaagggaaccgattccatccctctatgccggaagtgtgagacgcgtgtcttagcctggaagatcttctctaccaaagagtggttctgcaggatcaatgacatatcacagaggaggtttctagttggcattctgaagcagttaaatagcttatatttgttacactatttccaaaatatccttcagaccacacagggaaaggatttcatctataacaggtcccggatcgacctcagcaagaaagaggggaaagttgtgaagtcctccttgaaccaaatgttggataaaacagtagaacagaagatgaaagagatcttgtattggtttgcgaacagcacccagtggaccaaggcgaattatactctcttactgctgcagatgtgcaaccccaaattactgctcactgctgccaatgtgatcagagtcctgtttctgagagaggagaacaatatctcagggctcaatcaagacatcacagatgtgtgtttttcccctgagaaagaccacagctccaagtctgcgacctcacaagtctattggacagccaaaactcagcacacatcccttcctttgtccaaagccccagaaaatgaacacttccttggggcagcatctaaccctgaggaaccatggaggaattcactccggtgtatatccgaaatgaataggctgttttctggaaaagcagacataaccaagccagggtacgatccctgcaatctattggttgacctggatgacatcagagacctgtcttctgggttcagcaaataccgagacttcatccgttacctgcccatccacctctccaagtacattctaagaatgctggatagacacaccctgaacaagtgcgcctctgtgagccagcactgggccgccatggctcaacaggtcaagatggacttgtcagcgcacggcttcattcagaaccagattaccttcttgcaggggtcctatacaagaggaattgatcctaattatgccaataaggtttctatcccagttcctaaaatggtagatgacgggaagagcatgcgtgtgaaacatccgaagtggaagttgagaacgaagaatgagtacaacctgtggactgcataccagaacgaggaaacgcagcaggtcctgatggaggagagaaatgttttctgtgggacctacaatgttcgcattctctctgacacgtgggatcaaaaccgagtcatccactattccgggggagatctgatagctgtgtcatctaatcgaaagatccatcttctggacatcatacaagtgaaagcgatacccgttgaattccgaggccatgctgggagtgtccgggccctcttcctgtgtgaggaggaaaactttctcctaagcgggagctatgacctaagtatcagatactgggatctgaaaagtggggtttgcacacgaatcttcggtggtcaccaggggactatcacttgcatggacttgtgtaagaacaggctcgtatctggaggaagagattgccaggtaaaagtatgggatgtagacacagggaagtgcctgaagacgtttagacacaaagaccccatcttggccaccaggatcaatgatacctacattgtgagcagctgtgagcgagggctggtgaaagtgtggcacattgccatggcccagttggtaaagactctcagtggccacgagggagctgtgaaatgcctgttctttgaccagtggcatctcctctcaggaagcactgatggcctggtcatggcctggagcatggtggggaagtacgagcgctgcctgatggccttcaagcatcccaaagaggtgctcgacgtgtcccttctcttcctccgggtcatcagcgcctgtgcagatggcaagatccgaatttacaatttcttcaatgggaactgtatgaaggtgataaaagccaatggcagaggcgatcctgtgctgtccttctttattcagggcaacagaatttcagtctgccacatcagcacatttgctaaaagaattaacgtgggatggaatggaatcgaaccaagtgctacagctcagggaggaaatgcctccttgaccgagtgtgctcatgtgagactccacatcgcaggacacttaccagcatcgaggctgcccgtggccgctgtccagcccatgacaggcgggatggccccaaccacagctccgacccatgtgttggcaatgctgatccttttcagtggtgtgtagcagcaggtatacaggaaaatgttgaagagccccagggctcctgtgagtggattcacccccaaggtcagaatggcaactcctggaacagcacaacaagtggcaaaggacacagctagcaacgggctggaaaaaggcagagaacgtggagtgatcatctccaactcaactcaatcacactgcctaaaatcggcactgacaaagtacaaataatccacctatccagtagaggcagcactgatctggctgattcctggatatggggaatcctctttatgaaacaaacttacaataagaaagaatatgtttgtggga

SEQ ID NO: 120266 - DNA, 562 bp, Homo sapiens
  Payload ID: 3574
  Gene Symbol: CDRT1
  Gene Name: CMT1A duplicated region transcript 1
  ENST ID: ENST00000583965
  CDS Start-End: 33-269
tcttcggtggtcaccaggggactatcacttgcatggacttgtgtaagaacaggctcgtatctggaggaagagattgccaggtaaaagtatgggatgtagacacagggaagtgcctgaagacgtttagacacaaagaccccatcttggccaccaggatcaatgatacctacattgtgagcagctgtgagcgagggctggtgaaagtgtggcacattgccatggcccagttggtaaagaatttcagtctgccacatcagcacatttgctaaaagaattaacgtgggatggaatggaatcgaaccaagtgctacagctcagggaggaaatgcctccttgaccgagtgtgctcatgtgagactccacatcgcaggacacttaccagcatcgaggctgcccgtggccgctgtccagcccatgacaggcgggatggccccaaccacagctccgacccatgtgttggcaatgctgatccttttcagtggtgtgtagcagcaggtatacaggaaaatgttgaagagccccagggctcctgtgagtggattcacccccaaggtcagaatgg

SEQ ID NO: 120267 - DNA, 800 bp, Homo sapiens
  Payload ID: 3574
  Gene Symbol: CDRT1
  Gene Name: CMT1A duplicated region transcript 1
  ENST ID: ENST00000571263
  CDS Start-End: 33-296
tcttcggtggtcaccaggggactatcacttgcatggacttgtgtaagaacaggctcgtatctggaggaagagattgccaggtaaaagtatgggatgtagacacagggaagtgcctgaagacgtttagacacaaagaccccatcttggccaccaggatcaatgatacctacattgtgagcagctgtgagcgagggctggtgaaagtgtggcacattgccatggcccagttggtaaaggaagcactgatggcctggtcatggcctggagcatggtggggaagtacgagcgctgcctgatggccttcaagcatcccaaagaggtgctcgacgtgtcccttctcttcctccgggtcatcagcgcctgtgcagatggcaagatccgaatttacaatttcttcaatgggaactgtatgaaggtgataaaagccaatggcagaggcgatcctgtgctgtccttctttattcagggcaacagaatttcagtctgccacatcagcacatttgctaaaagaattaacgtgggatggaatggaatcgaaccaagtgctacagctcagggaggaaatgcctccttgaccgagtgtgctcatgtgagactccacatcgcaggacacttaccagcatcgaggctgcccgtggccgctgtccagcccatgacaggcgggatggccccaaccacagctccgacccatgtgttggcaatgctgatccttttcagtggtgtgtagcagcaggtatacaggaaaatgttgaagagccccagggctcctgtgagtggattcacccccaaggtcagaatgg

SEQ ID NO: 120268 - DNA, 1082 bp, Homo sapiens
  Payload ID: 3574
  Gene Symbol: CDRT1
  Gene Name: CMT1A duplicated region transcript 1
  ENST ID: ENST00000472534
  CDS Start-End: 1-211
gaactgtatgaaggtgataaaagccaatggcagaggcgatcctgtgctgtccttctttattcagggcaacagtgatcacttacggaagacctatctgccagttgagtggaagacagatggaaggagggttaggaagaaggcagagaagtcagctgggatgtgctgtaataacccacgcaaaaccgatgatgggctgaagctaaagcactgagatgatgcggagaaagcacaaaaacaaggacaattggaaactcctggaaaactgcccagtcacccaaagaaaaagtcttggaaaatccctatgtcacctgaccaattcctcctgactgttagcgccctgcagcacgcccgtaattccggggaatttgcctatccctgtaggccccaaacagaaattactgatgtctggggaccttcaatttcatacccaaggaaggtcttgaatttcaaaggaaaatcaatccaacgtgcagttgatcggttgagattgagcaatcctcctatagatgtgaaacgaaccagtattccccttgaaatccagaaactgcagcccaacttgaagatctctttgcacagtcctagagcccagtccaccatacccgagcccatgattatccgctccaggttctctggcagcttaaagggtggagaccaagtgaccagttcaattgaaagggctgtgtgcagtacgggtcccctgaccagtatgcaggtcattaaaccaaaccgcatgctagctccacaagtgggcacagccaccctgtctcttaagaaagaacggcctcgcatctatacagcccttgatccttttagagtgaacgctgagttcgtgctgttgaccgtgaaggaggagaaggagcaccaggaagccaagatgaaggaatatcaggccagggagtccactggagtggttgatccaggaaaagccagcaaagctgcatggatcaggaagatcaaaggcctgcctattgataatttcacgaagcaagggaaaacagcggcccctgaacttggacaaaatgtatttatctaaaccagccttgggaaattacagtgttttacaataaacagaaagccaagcg

SEQ ID NO: 120269 - DNA, 794 bp, Homo sapiens
  Payload ID: 3574
  Gene Symbol: CDRT1
  Gene Name: CMT1A duplicated region transcript 1
  ENST ID: ENST00000630868
  CDS Start-End: 13-744
tggaaaatccctatgtcacctgaccaattcctcctgactgttagcgccctgcagcacgcccgtaattccggggaatttgcctatccctgtaggccccaaacagaaattactgatgtctggggaccttcaatttcatacccaaggaaggtcttgaatttcaaaggaaaatcaatccaacgtgcagttgatcggttgagattgagcaatcctcctatagatgtgaaacgaaccagtattccccttgaaatccagaaactgcagcccaacttgaagatctctttgcacagtcctagagcccagtccaccatacccgagcccatgattatccgctccaggttctctggcagcttaaagggtggagaccaagtgaccagttcaattgaaagggctgtgtgcagtacgggtcccctgaccagtatgcaggtcattaaaccaaaccgcatgctagctccacaagtgggcacagccaccctgtctcttaagaaagaacggcctcgcatctatacagcccttgatccttttagagtgaacgctgagttcgtgctgttgaccgtgaaggaggagaaggagcaccaggaagccaagatgaaggaatatcaggccagggagtccactggagtggttgatccaggaaaagccagcaaagctgcatggatcaggaagatcaaaggcctgcctattgataatttcacgaagcaagggaaaacagcggcccctgaacttggacaaaatgtatttatctaaaccagccttgggaaattacagtgttttacaataaacagaaagccaagcgg

SEQ ID NO: 120270 - DNA, 655 bp, Homo sapiens
  Payload ID: 3575
  Gene Symbol: CDRT15
  Gene Name: CMT1A duplicated region transcript 15
  ENST ID: ENST00000431716
  CDS Start-End: 104-472
acttggtgggagtcgctcaagagagcaagatgttctcgtgttgcttccccacttcgagaggttgctgcttcaggaatggagggagtgagagccttttccgacgatgccgaagaaggctcatccctcaccccagacgcctgtcgcccgttgtaataaggcgcatccagctcctggtccatgtgcagaagtaagagcactgccagcaccagcggcggagccagagccagcatgggaagaggcccctccagagagagcactggagctggagggagctccagccaaggaccagaccaacgaggagctgcctgaaatcacggaggtgccggagagcattaaaagaaggctgggaagaagagttccagcagctacgcctgctcccagaggcaacctcctcctccaggcatggatgcgggtccacagctgggcatccaggctgtttgcccctaatgtgctgcccgggacaggcccttaacaggcgggcagtgggtgaggggaccaggaggtggctccaaagggtaaagcaaacaaagcttttaacgacagccgttgtgccccaggctctccatgccaccacctgccctaccatttattaatagtgttagaattacaagttgatgaaacgagattacaataaagtttgatttctgaaacttca

SEQ ID NO: 120271 - DNA, 766 bp, Homo sapiens
  Payload ID: 3575
  Gene Symbol: CDRT15
  Gene Name: CMT1A duplicated region transcript 15
  Uniprot ID: Q96T59
  ENST ID: ENST00000420162
  CDS Start-End: 17-583
cgctcaagagagcaagatgttctcgtgttgcttccccacttcgagaggttgctgcttcaggaatggagggagtgagagccttttccgacgatgccgaagaaggctcatccctcaccccagacgcctgtcgcccgttgtaataaggcgcatccaggtaccacaggacagcctggggcaggccctagcaggccaggccacaccagagatcccattggggctgcagctgcacactgtccttgtccaggagattcaggagctcattgaggcacagacacttgctcctggtccatgtgcagaagtaagagcactgccagcaccagcggcggagccagagccagcatgggaagaggcccctccagagagagcactggagctggagggagctccagccaaggaccagaccaacgaggagctgcctgaaatcacggaggtgccggagagcattaaaagaaggctgggaagaagagttccagcagctacgcctgctcccagaggcaacctcctcctccaggcatggatgcgggtccacagctgggcatccaggctgtttgcccctaatgtgctgcccgggacaggcccttaacaggcgggcagtgggtgaggggaccaggaggtggctccaaagggtaaagcaaacaaagcttttaacgacagccgttgtgccccaggctctccatgccaccacctgccctaccatttattaatagtgttagaattacaagttgatgaaacgagattacaataaagtttgatttctgaaacttca

SEQ ID NO: 120272 - DNA, 1048 bp, Homo sapiens
  Payload ID: 3576
  Gene Symbol: CDRT15L2
  Gene Name: CMT1A duplicated region transcript 15-like 2
  Uniprot ID: A8MXV6
  ENST ID: ENST00000399044
  CDS Start-End: 21-866
gagacgctcaagagagcaagatgttctcctgttgcttccccacttcgagaggttgctgcttcaggaatggagggagtgagagccttttccgacaatgccgaagaaggctcatccctcaccccagacgcctgtggccctttgtaagaaggcgcacccaggtaccacaggacagcccggggcaggccctagctggccaggccacaccagagatcccatcggggctgcctctgcacattgtccttgtccaggaggagattcgggagcccatggaggcacagacacatgctcctggtccgtacgcagacatagcagcacttgcggcaccggctgtcgagccaaagccagcatgggaagagccccctccagagagagcgctggaggtggagggagctccagccaaggaccagcccagccaggagctgcctgaaatcatggcacctactgtagccactggccttaatgctggagctgaaaacgtggctggagagagaagtgggagggagggggtgacaagcacagccccagccagcagatcccatgctgcccctagtcctgggcatggtggcaaacatggaggcggagaccagggcattcagactggactcctgtacctcgctggagagaggcttctctcattcgccggaaccacagccctgctgctgcagggcctgtttattgtgctaattctggtggggtatatctctgtgaaggtgatgctcaagagcattaaaacaaggctgggaagaagagttccagcagctcctcctgctctcagacgcaatcttctcctccaggcatggaagtgtgtctgcaactgggcatccaggctgtttgcccctaatgtgctgccccgaacgggctcttaacaggtgggcaggggttgaggggaccaggaggtggctccaaagggtacagcaaggaaagcttttaaagacagctgttgtgctccaggctctccatgccaccacctgccctagcatttattaatagtgttagaattacaagtttatgaaatgaaatataaataaagtttgatttctgaaacttc

SEQ ID NO: 120273 - DNA, 632 bp, Homo sapiens
  Payload ID: 3577
  Gene Symbol: CDRT4
  Gene Name: CMT1A duplicated region transcript 4
  ENST ID: ENST00000524205
  CDS Start-End: 559-632
gacattctaatgtcaccaatttttcgacatgctaatgccagcaattttttttgaaagttgaaatagaacataataaggcaacaaaacgagactaagagggttctgcaccgtgttccaacaatcttcagtccccttcactgttcatgtctaagcactgaggcgttctaaagcaggtcaccttttgcctcaaggacttttcttgaaatatcatggtcttgctctgtcgcccaggctggagtgcagtggcgtggtcacagctcattgcagcttcgacttcctgggctgaagcgatcctcccatctcggcctgtcaagtagctggaaccacaggcgcgccactacacctggctaatttatttttattttattttttgtagagacggtctcgccacattgcccagactggtctgaaagtcttgggctcaagagatcctcccgcttccgccttccaaagcgctgggataacaggcgtgagccgctgcccgggccatccctcgaggaagtttcatcaggaatctgaacctgtgatgttaagaaatcagtaaatattaaaaagaagatggatgcaagaaggatgaagaaagaagaaggactcacagaaaacactggacttccccggaagctacttgaaaa

SEQ ID NO: 120274 - DNA, 2498 bp, Homo sapiens
  Payload ID: 3577
  Gene Symbol: CDRT4
  Gene Name: CMT1A duplicated region transcript 4
  ENST ID: ENST00000619038
  CDS Start-End: 282-740
aggggcaagaggatggttagctgcagcaaagagagagccaaagagaagtgggattgagagcacaggggacagctggagacaaaatataaacgccgggcaggggaacagccaagatagtgcaggaaggatggggaatcacagaaacttctcaggaacccagtgaaatgagctgcaccaggaactttaagagagagttttcagctgggagaagaggaaggcaagatatcagaacaagaatctgaacctgtgatgttaagaaatcagtaaatattaaaaagaagatggatgcaagaaggatgaagaaagaagaaggactcacagaaaacactggacttccccggaagctacttgaaaaacatgacccctggccggcctatgtcacctatacctctcagacagtgaaaagactcattgagaaaagcaaaactagagaactggaatgcatgcgtgccctcgaggaaagaccctgggcatcaaggcagaataaaccttccagcgtcattcagccgaaaaggaggaagtcttccaagtcttctggcaaagctgtgttcagggacacgctgtcagaatccacgttatcaatgtggggcgcttattcggtattggccatggctcctaccatgatcccagaacccacacacttacatgcggattccagagactgtccaactgaaaactataacaagatcatctttgcccgcaagcctatgatgaggatgctccctacagttcgctactgaccaacaaggagaaacatgcaaatgttttagccaggggtccctgcagccattccccaagaacgtacaaaagttaagctccatttaccactcacttgacagtgtcctttaaatctgaacttgctcttgctcatgcggagcttggctaagagaaaccagatcagaatgcaagctgtaggtgggtgggtgagtgtgtcccctcccacactgctctctggtgggtttgggcagtccctggctctagtctctgctgcagattctcaggaccaaaatgtgggtgatttgtctgggtccaggcaggagacagaaatcacacaagctcttttattagagataatataaagaatgattaaccaggtgacagtaaagggcaggaagggaatacaaaggtatccatggaggtagcaccacaggaagcaggcatcacacttgaggcttgggaacaaggggaagatgctggactcattgaaaggtggttgcttggagaagggacatggggctgaatctcagacttctgaggtgggggagtggggatgccactcaatgcagctggtatctctgagctctgaggagagtcctgtggggatggtgccccctcctctgaataggggagatgttttgttggtgtctctgaggggacccccatgaggctgcttttgtgagtgttggaaaaaccaaaaactgcattgaaatgtttctgggaggagttgccactgcctgggtgaagaaaaagcactgctagggttagcaacctgtctggcaagggacaggaagctgatagaaagtgaacaggaagcaaacaggaagtgagcaaggggccacttcctacttcctcctttagcctagcagattccttctagctccccctgggggctgagcctatcagggcacaaagccagaatgtggtttgtagaatcccagccccagcatctccaagcataggatggattttgaagccaagagggaattagctctcggccgggttctgagtgatcccatccagctgctcctggacctggtattgagaggtttttcccttggagggcaaacaaagtggcagtggggaccagggtgtcccctgctgagaaatggagagctcttttcccctgtacttctctggggtttgccttgtggaaccaagtgcttgggggaggagctcctggcaggactccagctgttatttgtcagaggacagctaggattggttcacccttgctctgagttggccccaaagcgagctatgctgaactcttctccatctccaagcagacaacctttgtctttacatgcaagagggatccaattatgacaggctgacccagctggtttcatgtttggggtttatctactgagtaaggctgaccttacctgagtttctgtatgtgtatttgcaagacagttaatactaatccatcatccctcacagagatgtagaggatgagatgtagtaacttatagcagtgtcatttggaaaagttgaatttgccctacaaggcatgttctccattcaagggtcttgtgtaaacgtttgcagacacaggtgcagctttggagaactcacctctggctcttgtgcttttatgttgggacagctgcctaaattaggagctctagacctgttattggttcccaactgttggccagaatgaattcttcgaaaaatataggtggtttccagggaatttgaatgattgtattttgtgtccatggaacgtttatagacatggaggcaggcaataaattcctccaataattttttta

SEQ ID NO: 120275 - DNA, 5130 bp, Homo sapiens
  Payload ID: 3578
  Gene Symbol: CNDP2
  Gene Name: CNDP dipeptidase 2 (metallopeptidase M20 family)
  Uniprot ID: Q96KP4
  ENST ID: ENST00000324262
  CDS Start-End: 317-1744
gaaatggggcggggagagagtgacaccacccctctgcctgtggctggattggtgggcgtggcgggggcgtggcgatgcctgccctccggacaaggcggggttggtggccagggcgaccgcggggcgggccagcgccgggggtcgtggccgggacacgtggtacggaaccggcgccgcgcttgctgctggtaacagggccttgcctagtgggccttccttcccaggtcgcccctcagtctccactagagacaggactgaccagttgctcttccttccaagaaccttcgagatctgcggtctggggtctggttgaaagatggcggccctcactaccctgtttaagtacatagatgaaaatcaggatcgctacattaagaaactcgcaaaatgggtggctatccagagtgtgtctgcgtggccggagaagagaggcgaaatcaggaggatgatggaagttgctgctgcagatgttaagcagttggggggctctgtggaactggtggatatcggaaaacaaaagctccctgatggctcggagatcccgctccctcctattctgctcggcaggctgggctccgacccacagaagaagaccgtgtgcatttacgggcacctggatgtgcagcctgcagccctggaggacggctgggacagcgagcccttcaccctggtggagcgagacggcaagctgtatgggagaggttcgactgatgataagggcccggtggccggctggataaacgccctggaagcgtatcagaaaacaggccaggagattcctgtcaacgtccgattctgcctcgaaggcatggaggagtcaggctctgagggcctagacgagctgatttttgcccggaaagacacattctttaaggatgtggactatgtctgcatttctgacaattactggctgggaaagaagaagccctgcatcacctacggcctcaggggcatttgctactttttcatcgaggtggagtgcagcaacaaagacctccattctggggtgtacgggggctcggtgcatgaggccatgactgatctcattttgctgatgggctctttggtggacaagagggggaacatcctgatccccggcattaacgaggccgtggccgccgtcacggaagaggagcacaagctgtacgacgacatcgactttgacatagaggagtttgccaaggatgtgggggcgcagatcctcctgcacagccacaagaaagacatcctcatgcaccgatggcggtacccgtctctgtccctccatggcatcgaaggcgccttctctgggtctggggccaagaccgtgattcccaggaaggtggttggcaagttctccatcaggctcgtgccgaacatgactcctgaagtcgtcggcgagcaggtcacaagctacctaactaagaagtttgctgaactacgcagccccaatgagttcaaggtgtacatgggccacggtgggaagccctgggtctccgacttcagtcaccctcattacctggctgggagaagagccatgaagacagtttttggtgttgagccagacttgaccagggaaggcggcagtattcccgtgaccttgacctttcaggaggccacgggcaagaacgtcatgctgctgcctgtggggtcagcggatgacggagcccactcccagaatgaaaagctcaacaggtataactacatagagggaaccaagatgctggccgcgtacctgtatgaggtctcccagctgaaggactaggccaagccctctgtgtgccatctccaatgagaaggaatcctgccctcacctcacccttttccaacttgcccagggaagtggaggttccctctttcctttccctcttgtcaggtcatccatgactttagagaacagacacaagtgtatccagctgtccacgggtggagctacccgttgggcttatgagtgacctggagtgacagctgagtcaccctgggtaagttctcagagtggtcaggatggcttgacctgcagaagatacccaaggtccaaaagcacaaggtctgcggaaagttctggttgtcggccgggcaccacggctcacacctataatcgagcactttgggaggccaagacaggaggatcacttgaggccaggagtctgagacaagcctaggcaacaaaacaagactctgtctctacaaaaagtttaagaaatgagccagacatggtggtgtatgcctgtagtcccagccactcagaaggctgaggcaggaggatcgcttgagaccaagagtttgagcctgcggtgagctgtgaatgcaccacggcactcaagcctgggcaatgtagcaagatcctgtctctacaagaaattttttaaaaatgagccaagtgtggtggtgcatgcctgtagttccagctactcaggacactgacgtaggagggttgcttgagactgagagttggaggctgcgatgagccatgaatgccccactgcactccagcctgggcgacagaacgagaccccatctcaaaaaaaataagttctggttgtcattgaattgggataaacagagagcttgatgctttctgccttctgtctcaggtgatgcattgcacatttgggatatttggaaaggaaatgaggaaagaaattagggcctcctctgatctctcgctatctgcgggtcctgtccttttctcaagaccttcaccattactggcattttcctgtcttctctttagtatgatccctcaaaacctcactaactggaaggatgattttgtctcagtttgtactcctaaataaaaagtaaacatgacacctctaaaagaatcgctccatctcagttgctcgtcgcgtgcacaccatgcttattgagtggtgtctggttggtggtgtcagctcagggcaggggacagcaggcaggacccggaaaacagaacccaggtcttcccaggcgagcactccctccctcgtccacacaagtggaggctcactcgtggccccctgcatgttccgagaagtgtccctgtctctgctccttaacggctgtggggccacaggaagtccagctggcttaaacaaagaattgattggcccacttgacataaaagaacagagtaaactcaatgaaaggaaaaggctccttgaagtggttggttccagggctgggcagggaagatgcaagatgagtctggaccctctcacatcggaacgtaaggatgcgctcctgagggcgtggggctgcgtccaaggacacaggagccagcctggaagagtttgcaggggcccaggggagcaattggagtgagaaaatagcagtagtgttggatttttaccatggaataaacaacaatccatgagtccatactaatataaataaagtgacaaagtgggtgagaaggaccagtgcccctggatgaagaatctctgctcatgtgggaggaaggtgggagatcaaagctggagcacttgctgctgcaggtgagacccctgacacactctcaaattggtaggcaaaggtttaaagaacgggatatttgcttagcttaaaagcacctcccaaggggaaaacagtaacttcacagtggagagacctggcaggcaccaccctcagatcaaaatgaacctcagcagtaatgacacgtccacatcagcacccccaacaccactccctgaggaggacatgccagttctgggaacatcacactcatcgtgacaaaacatcagacaaacccaaacggatgaaatgtgaggaaaatctgtagttggttttacgtggatgttaatctcttagttttgatcattgtgctgtagctgcataagaggttagctgggtgaagtgtatctggggaccctctatggcttttgcatcttttctctaagtctcctgtcatttcaaagtaaaaacaaaaaaagaagacaagggtagcggcttcaggtacagctggacccagcactcagtgctatctgggcttgtggctccaactcaactcctccatcagaactgtgagaaatgcattctttcagcttctaatcctgcaaaaagaactgcatggtcttcccccagaaatcctaagagtagctgctggtgtctcatgcatgcgagctgcatatgggcccccgttagtcaggaacccatgctgagaggtgctatgctttgaatgtttggctcctcccaaactcgtgttgaaacttaatagccattgtaacagtattaagaggcagggccttcaagagctggtcaggccatgagggccctgtcctcctgactgagtgaatgctgttattgtaggagtgggcttgtttggcctcctcttgctctctctacccctctctgagcccttgtgttgtgggatgacacagccagaaggcccttgccaggttccggtccctccaccttggacctcccagcctcccgaacgttgagccaatacatctctgctcattgtaaattacctagtcttgggcattgtgttacagcagcaaaaagcagcctacggcagtcaccgtgctaacacctgcagcagcctgcggcggtcaccgtgctaacacgtgcagcagcctgtgtggctcaggccagtcagcttcccctggaagcaagtgtgaggtcgtcgcctctggaagtgctagcggagggtgatctcccggaggaaatcagagtggtgttctactagaaggccgatgactcctgggtaaagtgccaatgctcacctccatctctgcaagctcagtccctcgtggaatttccaggagcacaagggcaatctcgacagctccacgttcccagtgcccgacccaagcctggcccatgatcagataaatgcctaagtggggtggcatggacatttgcacacgtccagactgctttatgttagaagctgagctggcatgccactagctggttttgatgtaaacaacaattttgtaaaaccctggactgaatgggtctgactaacggctggttctgtgaacttgagcctcagcgtcctgtgtcagaagagcacaaaccactttcccagagaggttatgaagacagaaatgaccctgtgacccctttgcaaagtatgaagaacggttcccactcatgcatggagctggatcttctcaagtgggaaacaggcgtggtaaataaatactgttgtttcagctggtgtaa

SEQ ID NO: 120276 - DNA, 2349 bp, Homo sapiens
  Payload ID: 3578
  Gene Symbol: CNDP2
  Gene Name: CNDP dipeptidase 2 (metallopeptidase M20 family)
  Uniprot ID: Q96KP4
  ENST ID: ENST00000324301
  CDS Start-End: 114-1289
gaacacgtgctttctgggcaggtcgcccctcagtctccactagagacaggactgaccagttgctcttccttccaagaaccttcgagatctgcggtctggggtctggttgaaagatggcggccctcactaccctgtttaagtacatagatgaaaatcaggatcgctacattaagaaactcgcaaaatgggtggctatccagagtgtgtctgcgtggccggagaagagaggcgaaatcaggaggatgatggaagttgctgctgcagatgttaagcagttggggggctctgtggaactggtggatatcggaaaacaaaaggagattcctgtcaacgtccgattctgcctcgaaggcatggaggagtcaggctctgagggcctagacgagctgatttttgcccggaaagacacattctttaaggatgtggactatgtctgcatttctgacaattactggctgggaaagaagaagccctgcatcacctacggcctcaggggcatttgctactttttcatcgaggtggagtgcagcaacaaagacctccattctggggtgtacgggggctcggtgcatgaggccatgactgatctcattttgctgatgggctctttggtggacaagagggggaacatcctgatccccggcattaacgaggccgtggccgccgtcacggaagaggagcacaagctgtacgacgacatcgactttgacatagaggagtttgccaaggatgtgggggcgcagatcctcctgcacagccacaagaaagacatcctcatgcaccgatggcggtacccgtctctgtccctccatggcatcgaaggcgccttctctgggtctggggccaagaccgtgattcccaggaaggtggttggcaagttctccatcaggctcgtgccgaacatgactcctgaagtcgtcggcgagcaggtcacaagctacctaactaagaagtttgctgaactacgcagccccaatgagttcaaggtgtacatgggccacggtgggaagccctgggtctccgacttcagtcaccctcattacctggctgggagaagagccatgaagacagtttttggtgttgagccagacttgaccagggaaggcggcagtattcccgtgaccttgacctttcaggaggccacgggcaagaacgtcatgctgctgcctgtggggtcagcggatgacggagcccactcccagaatgaaaagctcaacaggtataactacatagagggaaccaagatgctggccgcgtacctgtatgaggtctcccagctgaaggactaggccaagccctctgtgtgccatctccaatgagaaggaatcctgccctcacctcacccttttccaacttgcccagggaagtggaggttccctctttcctttccctcttgtcaggtcatccatgactttagagaacagacacaagtgtatccagctgtccacgggtggagctacccgttgggcttatgagtgacctggagtgacagctgagtcaccctgggtaagttctcagagtggtcaggatggcttgacctgcagaagatacccaaggtccaaaagcacaaggtctgcggaaagttctggttgtcggccgggcaccacggctcacacctataatcgagcactttgggaggccaagacaggaggatcacttgaggccaggagtctgagacaagcctaggcaacaaaacaagactctgtctctacaaaaagtttaagaaatgagccagacatggtggtgtatgcctgtagtcccagccactcagaaggctgaggcaggaggatcgcttgagaccaagagtttgagcctgcggtgagctgtgaatgcaccacggcactcaagcctgggcaatgtagcaagatcctgtctctacaagaaattttttaaaaatgagccaagtgtggtggtgcatgcctgtagttccagctactcaggacactgacgtaggagggttgcttgagactgagagttggaggctgcgatgagccatgaatgccccactgcactccagcctgggcgacagaacgagaccccatctcaaaaaaaataagttctggttgtcattgaattgggataaacagagagcttgatgctttctgccttctgtctcaggtgatgcattgcacatttgggatatttggaaaggaaatgaggaaagaaattagggcctcctctgatctctcgctatctgcgggtcctgtccttttctcaagaccttcaccattactggcattttcctgtcttctctttagtatgatccctcaaaacctcactaactggaaggatgattttgtctcagtttgtactcctaaataaaaagtaaacatgacacctctaaaagaa

SEQ ID NO: 120277 - DNA, 572 bp, Homo sapiens
  Payload ID: 3578
  Gene Symbol: CNDP2
  Gene Name: CNDP dipeptidase 2 (metallopeptidase M20 family)
  ENST ID: ENST00000582666
  CDS Start-End: 309-572
gtttttaaacaggtactgagtgtaaaacaatatgagagggtctctctcttccctcagtacaaacagtttttaaaatctttaacccaaagcacacgtgatgggtctgtcctatttccaatcagcctgttcaactgcagcagccacagagggtgagcctggaatgtggcaacgttacgggagcctcttctccctcaaggacaccttttcagaatccctcgttgcttcttgtccacaaacagaaactcgcaaaatgggtggctatccagagtgtgtctgcgtggccggagaagagaggcgaaatcaggaggatgatggaagttgctgctgcagatgttaagcagttggggggctctgtggaactggtggatatcggaaaacaaaagctccctgatggctcggagatcccgctccctcctattctgctcggcaggctgggctccgacccacagaagaagaccgtgtgcatttacgggcacctggatgtgcagcctgcagccctggaggacggctgggacagcgagcccttcaccctggtggagcgagacggcaagctgtatgggagaggttcgact

SEQ ID NO: 120278 - DNA, 1176 bp, Homo sapiens
  Payload ID: 3578
  Gene Symbol: CNDP2
  Gene Name: CNDP dipeptidase 2 (metallopeptidase M20 family)
  ENST ID: ENST00000579624
  CDS Start-End: 1-330
gacgagctgatttttgcccggaaagacacattctttaaggatgtggactatgtctgcatttctgacaattactggctgggaaagaagaagccctgcatcacctacggcctcaggggcatttgctactttttcatcgaggtggagtgcagcaacaaagacctccattctggggtgtacgggggctcggtgcatgaggccatgactgatctcattttgctgatgggttccctctttcctttccctcttgtcaggtcatccatgactttagagaacagacacaagtgtatccagctgtccacgggtggagctacccgttgggcttatgagtgacctggagtgacagctgagtcaccctgggtaagttctcagagtggtcaggatggcttgacctgcagaagatacccaaggtccaaaagcacaaggtctgcggaaagttctggttgtcggccgggcaccacggctcacacctataatcgagcactttgggaggccaagacaggaggatcacttgaggccaggagtctgagacaagcctaggcaacaaaacaagactctgtctctacaaaaagtttaagaaatgagccagacatggtggtgtatgcctgtagtcccagccactcagaaggctgaggcaggaggatcgcttgagaccaagagtttgagcctgcggtgagctgtgaatgcaccacggcactcaagcctgggcaatgtagcaagatcctgtctctacaagaaattttttaaaaatgagccaagtgtggtggtgcatgcctgtagttccagctactcaggacactgacgtaggagggttgcttgagactgagagttggaggctgcgatgagccatgaatgccccactgcactccagcctgggcgacagaacgagaccccatctcaaaaaaaataagttctggttgtcattgaattgggataaacagagagcttgatgctttctgccttctgtctcaggtgatgcattgcacatttgggatatttggaaaggaaatgaggaaagaaattagggcctcctctgatctctcgctatctgcgggtcctgtccttttctcaagaccttcaccattactggcattttcctgtcttctctttagtatgatccctcaaaacctcactaactggaaggatgattttgtctcagtttgtactcctaaataaaaa

SEQ ID NO: 120279 - DNA, 2653 bp, Homo sapiens
  Payload ID: 3578
  Gene Symbol: CNDP2
  Gene Name: CNDP dipeptidase 2 (metallopeptidase M20 family)
  Uniprot ID: Q96KP4
  ENST ID: ENST00000579847
  CDS Start-End: 163-1590
gttggtggccagggcgaccgcggggcgggccagcgccgggggtcgtggccgggacacgtggtacggaaccggcgccgcgcttgctgctggtaacagggccttgcctagtgggccttccttcccagaaccttcgagatctgcggtctggggtctggttgaaagatggcggccctcactaccctgtttaagtacatagatgaaaatcaggatcgctacattaagaaactcgcaaaatgggtggctatccagagtgtgtctgcgtggccggagaagagaggcgaaatcaggaggatgatggaagttgctgctgcagatgttaagcagttggggggctctgtggaactggtggatatcggaaaacaaaagctccctgatggctcggagatcccgctccctcctattctgctcggcaggctgggctccgacccacagaagaagaccgtgtgcatttacgggcacctggatgtgcagcctgcagccctggaggacggctgggacagcgagcccttcaccctggtggagcgagacggcaagctgtatgggagaggttcgactgatgataagggcccggtggccggctggataaacgccctggaagcgtatcagaaaacaggccaggagattcctgtcaacgtccgattctgcctcgaaggcatggaggagtcaggctctgagggcctagacgagctgatttttgcccggaaagacacattctttaaggatgtggactatgtctgcatttctgacaattactggctgggaaagaagaagccctgcatcacctacggcctcaggggcatttgctactttttcatcgaggtggagtgcagcaacaaagacctccattctggggtgtacgggggctcggtgcatgaggccatgactgatctcattttgctgatgggctctttggtggacaagagggggaacatcctgatccccggcattaacgaggccgtggccgccgtcacggaagaggagcacaagctgtacgacgacatcgactttgacatagaggagtttgccaaggatgtgggggcgcagatcctcctgcacagccacaagaaagacatcctcatgcaccgatggcggtacccgtctctgtccctccatggcatcgaaggcgccttctctgggtctggggccaagaccgtgattcccaggaaggtggttggcaagttctccatcaggctcgtgccgaacatgactcctgaagtcgtcggcgagcaggtcacaagctacctaactaagaagtttgctgaactacgcagccccaatgagttcaaggtgtacatgggccacggtgggaagccctgggtctccgacttcagtcaccctcattacctggctgggagaagagccatgaagacagtttttggtgttgagccagacttgaccagggaaggcggcagtattcccgtgaccttgacctttcaggaggccacgggcaagaacgtcatgctgctgcctgtggggtcagcggatgacggagcccactcccagaatgaaaagctcaacaggtataactacatagagggaaccaagatgctggccgcgtacctgtatgaggtctcccagctgaaggactaggccaagccctctgtgtgccatctccaatgagaaggaatcctgccctcacctcacccttttccaacttgcccagggaagtggaggttccctctttcctttccctcttgtcaggtcatccatgactttagagaacagacacaagtgtatccagctgtccacgggtggagctacccgttgggcttatgagtgacctggagtgacagctgagtcaccctgggtaagttctcagagtggtcaggatggcttgacctgcagaagatacccaaggtccaaaagcacaaggtctgcggaaagttctggttgtcggccgggcaccacggctcacacctataatcgagcactttgggaggccaagacaggaggatcacttgaggccaggagtctgagacaagcctaggcaacaaaacaagactctgtctctacaaaaagtttaagaaatgagccagacatggtggtgtatgcctgtagtcccagccactcagaaggctgaggcaggaggatcgcttgagaccaagagtttgagcctgcggtgagctgtgaatgcaccacggcactcaagcctgggcaatgtagcaagatcctgtctctacaagaaattttttaaaaatgagccaagtgtggtggtgcatgcctgtagttccagctactcaggacactgacgtaggagggttgcttgagactgagagttggaggctgcgatgagccatgaatgccccactgcactccagcctgggcgacagaacgagaccccatctcaaaaaaaataagttctggttgtcattgaattgggataaacagagagcttgatgctttctgccttctgtctcaggtgatgcattgcacatttgggatatttggaaaggaaatgaggaaagaaattagggcctcctctgatctctcgctatctgcgggtcctgtccttttctcaagaccttcaccattactggcattttcctgtcttctctttagtatgatccctcaaaacctcactaactggaaggatgattttgtctcagtttgtactcctaaataaaaagtaaacatgacacctctaaaagaatcg

SEQ ID NO: 120280 - DNA, 551 bp, Homo sapiens
  Payload ID: 3578
  Gene Symbol: CNDP2
  Gene Name: CNDP dipeptidase 2 (metallopeptidase M20 family)
  ENST ID: ENST00000581912
  CDS Start-End: 387-551
gtgtggcctcttggtcaggtgcttgtggaggtttagctgatgccctttggctgtttctggactaagatcatcaactttcttaaactgaatctggttttccttgggctctgtcgtctgtgttgtgggtttgtggtggtggacacaggatgtgacattcttgctgggatccctgaagtgactatatcctctgcaataacagaaagtgaaacttatctttgtgctttaagagtgtaaaaatttttattaaagtaccagtaaaactaaaagtgcctacttttagttttcactgtattttcttcaactcaggccctccctctgttgttacctgccatctgacacggaattttgtaaccttcgagatctgcggtctggggtctggttgaaagatggcggccctcactaccctgtttaagtacatagatgaaaatcaggatcgctacattaagaaactcgcaaaatgggtggctatccagagtgtgtctgcgtggccggagaagagaggcgaaatcaggaggatgatggaagttgctgctgcagatgttaagcagttg

SEQ ID NO: 120281 - DNA, 574 bp, Homo sapiens
  Payload ID: 3578
  Gene Symbol: CNDP2
  Gene Name: CNDP dipeptidase 2 (metallopeptidase M20 family)
  ENST ID: ENST00000583216
  CDS Start-End: 127-574
atgcgcgctggagcctgtgtggcctcttggtcaggtcgcccctcagtctccactagagacaggactgaccagttgctcttccttccaagaaccttcgagatctgcggtctggggtctggttgaaagatggcggccctcactaccctgtttaagtacatagatgaaaatcaggatcgctacattaagaaactcgcaaaatgggtggctatccagagtgtgtctgcgtggccggagaagagaggcgaaatcaggaggatgatggaagttgctgctgcagatgttaagcagttggggggctctgtggaactggtggatatcggaaaacaaaagctccctgatggctcggagatcccgctccctcctattctgctcggcaggctgggctccgacccacagaagaagaccgtgtgcatttacgggcacctggatgtgcagcctgcagccctggaggacggctgggacagcgagcccttcaccctggtggagcgagacggcaagctgtatgggagaggttcgactgatgataagggcccggtggccggctggataaacgccctggaagcgtatcagaaaa

SEQ ID NO: 120282 - DNA, 539 bp, Homo sapiens
  Payload ID: 3578
  Gene Symbol: CNDP2
  Gene Name: CNDP dipeptidase 2 (metallopeptidase M20 family)
  ENST ID: ENST00000582589
  CDS Start-End: 155-539
aagatcatcaactttcttaaactgaatctggttttccttgggctctgtcgtctgtgttgtgggtcgcccctcagtctccactagagacaggactgaccagttgctcttccttccaagaaccttcgagatctgcggtctggggtctggttgaaagatggcggccctcactaccctgtttaagtacatagatgaaaatcaggatcgctacattaagaaactcgcaaaatgggtggctatccagagtgtgtctgcgtggccggagaagagaggcgaaatcaggaggatgatggaagttgctgctgcagatgttaagcagttggggggctctgtggaactggtggatatcggaaaacaaaagctccctgatggctcggagatcccgctccctcctattctgctcggcaggctgggctccgacccacagaagaagaccgtgtgcatttacgggcacctggatgtgcagcctgcagccctggaggacggctgggacagcgagcccttcaccctggtggagcgagacggcaagctgtatgggagag

SEQ ID NO: 120283 - DNA, 1135 bp, Homo sapiens
  Payload ID: 3578
  Gene Symbol: CNDP2
  Gene Name: CNDP dipeptidase 2 (metallopeptidase M20 family)
  ENST ID: ENST00000583785
  CDS Start-End: 387-1135
gtaaaaatttttattaaagtaccagtaaaactaaaagtgcctacttttagttttcactgtattttcttcaactcaggccctccctctgttgttacctgccatctgacacggaattttgtgtaattttccttccaagtaaagaagggaagtttagccccagcctctaactggttcccaaagtttttgtctctgaagccgcagtcacttcctggagcgtctctggctgggtgttgcagtgctggctgggagggtggggcaacaatttacaattctgaacacgtgctttctgggcaggtcgcccctcagtctccactagagacaggactgaccagttgctcttccttccaagaaccttcgagatctgcggtctggggtctggttgaaagatggcggccctcactaccctgtttaagtacatagatgaaaatcaggatcgctacattaagaaactcgcaaaatgggtggctatccagagtgtgtctgcgtggccggagaagagaggcgaaatcaggaggatgatggaagttgctgctgcagatgttaagcagttggggggctctgtggaactggtggatatcggaaaacaaaagctccctgatggctcggagatcccgctccctcctattctgctcggcaggctgggctccgacccacagaagaagaccgtgtgcatttacgggcacctggatgtgcagcctgcagccctggaggacggctgggacagcgagcccttcaccctggtggagcgagacggcaagctgtatgggagaggttcgactgatgataagggcccggtggccggctggataaacgccctggaagcgtatcagaaaacaggccaggagattcctgtcaacgtccgattctgcctcgaaggcatggaggagtcaggctctgagggcctagacgagctgatttttgcccggaaagacacattctttaaggatgtggactatgtctgcatttctgacaattactggctgggaaagaagaagccctgcatcacctacggcctcaggggcatttgctactttttcatcgaggtggagtgcagcaacaaagacctccattctggggtgtacgggggctcggtgcatgaggccatgactgatctcattttgctgatgggctcttt

SEQ ID NO: 120284 - DNA, 567 bp, Homo sapiens
  Payload ID: 3578
  Gene Symbol: CNDP2
  Gene Name: CNDP dipeptidase 2 (metallopeptidase M20 family)
  ENST ID: ENST00000583203
  CDS Start-End: 153-567
agggcgaccgcggggcgggccagcgccgggggtcgtggccgggacacgtggtacggaaccggcgccgcgcttgctgctggtaacagggccttgcctagtgggccttccttcccagaaccttcgagatctgcggtctggggtctggttgaaagatggcggccctcactaccctgtttaagtacatagatgaaaatcaggatcgctacattaagcctgttcaactgcagcagccacagagggtgagcctggaatgtggcaacgttacgggagcctcttctccctcaaggacaccttttcagaatccctcgttgcttcttgtccacaaacagaaactcgcaaaatgggtggctatccagagtgtgtctgcgtggccggagaagagaggcgaaatcaggaggatgatggaagttgctgctgcagatgttaagcagttggggggctctgtggaactggtggatatcggaaaacaaaagctccctgatggctcggagatcccgctccctcctattctgctcggcaggctgggctccgacccacagaagaagaccgtgtgcatttacgggcacc

SEQ ID NO: 120285 - DNA, 568 bp, Homo sapiens
  Payload ID: 3578
  Gene Symbol: CNDP2
  Gene Name: CNDP dipeptidase 2 (metallopeptidase M20 family)
  ENST ID: ENST00000581513
  CDS Start-End: 198-568
gacacgtggtacggaaccggcgccgcgcttgctgctggtaacagggccttgcctagtgggccttccttcccaggcatggtggctcatgtgtgtaacctcggcactttgggagaccaaggcggacagatcgcttgagtccaggagttcgagaccagcctgaaaccttcgagatctgcggtctggggtctggttgaaagatggcggccctcactaccctgtttaagtacatagatgaaaatcaggatcgctacattaagaaactcgcaaaatgggtggctatccagagtgtgtctgcgtggccggagaagagaggcgaaatcaggaggatgatggaagttgctgctgcagatgttaagcagttggggggctctgtggaactggtggatatcggaaaacaaaagctccctgatggctcggagatcccgctccctcctattctgctcggcaggctgggctccgacccacagaagaagaccgtgtgcatttacgggcacctggatgtgcagcctgcagccctggaggacggctgggacagcgagcccttcaccctggtggagcgagacggcaa

SEQ ID NO: 120286 - DNA, 582 bp, Homo sapiens
  Payload ID: 3578
  Gene Symbol: CNDP2
  Gene Name: CNDP dipeptidase 2 (metallopeptidase M20 family)
  ENST ID: ENST00000577600
  CDS Start-End: 316-582
gaaccggcgccgcgcttgctgctggtaacagggccttgcctagtgggccttccttcccaggcatggtggctcatgtgtgtaacctcggcactttgggagaccaaggcggacagatcgcttgagtccaggagttcgagaccagcctgagtaacacgagcaaaccccgtctctacaaaaaatacaaaaattagctgggtgtggtggtgcgcacctgcagtcccagctacttgggaagctgaggcaggaggatcatttgagcctgggagacagaggttgcaaaccttcgagatctgcggtctggggtctggttgaaagatggcggccctcactaccctgtttaagtacatagatgaaaatcaggatcgctacattaagaaactcgcaaaatgggtggctatccagagtgtgtctgcgtggccggagaagagaggcgaaatcaggaggatgatggaagttgctgctgcagatgttaagcagttggggggctctgtggaactggtggatatcggaaaacaaaagctccctgatggctcggagatcccgctccctcctattctgctcggcaggctgggctccgaccca

SEQ ID NO: 120287 - DNA, 595 bp, Homo sapiens
  Payload ID: 3578
  Gene Symbol: CNDP2
  Gene Name: CNDP dipeptidase 2 (metallopeptidase M20 family)
  ENST ID: ENST00000584613
  CDS Start-End: 229-595
gcgcttgctgctggtaacagggccttgcctagtgggccttccttcccaggcatggtggctcatgtgtgtaacctcggcactttgggagaccaaggcggacagatcgcttgagtccaggagttcgagaccagcctgagtcgcccctcagtctccactagagacaggactgaccagttgctcttccttccaagaaccttcgagatctgcggtctggggtctggttgaaagatggcggccctcactaccctgtttaagtacatagatgaaaatcaggatcgctacattaagaaactcgcaaaatgggtggctatccagagtgtgtctgcgtggccggagaagagaggcgaaatcaggaggatgatggaagttgctgctgcagatgttaagcagttggggggctctgtggaactggtggatatcggaaaacaaaagctccctgatggctcggagatcccgctccctcctattctgctcggcaggctgggctccgacccacagaagaagaccgtgtgcatttacgggcacctggatgtgcagcctgcagccctggaggacggctgggacagcgagcccttcaccctggtggagcgagacg

SEQ ID NO: 120288 - DNA, 510 bp, Homo sapiens
  Payload ID: 3578
  Gene Symbol: CNDP2
  Gene Name: CNDP dipeptidase 2 (metallopeptidase M20 family)
  ENST ID: ENST00000579583
  CDS Start-End: 96-510
accggcgccgcgcttgctgctggtaacagggccttgcctagtgggccttccttcccagaaccttcgagatctgcggtctggggtctggttgaaagatggcggccctcactaccctgtttaagtacatagatgaaaatcaggatcgctacattaagaaactcgcaaaatgggtggctatccagagtgtgtctgcgtggccggagaagagaggcgaaatcaggaggatgatggaagttgctgctgcagatgttaagcagttggggggctctgtggaactggtggatatcggaaaacaaaaggagattcctgtcaacgtccgattctgcctcgaaggcatggaggagtcaggctctgagggcctagacgagctgatttttgcccggaaagacacattctttaaggatgtggactatgtctgcatttctgacaattactggctgggaaagaagaagccctgcatcacctacggcctcaggggcatttgctactttttcatcgaggtggagtgca

SEQ ID NO: 120289 - DNA, 547 bp, Homo sapiens
  Payload ID: 3578
  Gene Symbol: CNDP2
  Gene Name: CNDP dipeptidase 2 (metallopeptidase M20 family)
  ENST ID: ENST00000581272
  CDS Start-End: 146-547
agtgctggatgcgcaagggaatgggagcgtcgtgggacctccggagcctgggagatcagagggtggagtcagggccccctagttttggactccattgccgcactgcagaaccttcgagatctgcggtctggggtctggttgaaagatggcggccctcactaccctgtttaagtacatagatgaaaatcaggatcgctacattaagaaactcgcaaaatgggtggctatccagagtgtgtctgcgtggccggagaagagaggcgaaatcaggaggatgatggaagttgctgctgcagatgttaagcagttggggggctctgtggaactggtggatatcggaaaacaaaagctccctgatggctcggagatcccgctccctcctattctgctcggcaggctgggctccgacccacagaagaagaccgtgtgcatttacgggcacctggatgtgcagcctgcagccctggaggacggctgggacagcgagcccttcaccctggtggagcgagacggcaagctgtatgggagaggttcgactgatgataag

SEQ ID NO: 120290 - DNA, 661 bp, Homo sapiens
  Payload ID: 3578
  Gene Symbol: CNDP2
  Gene Name: CNDP dipeptidase 2 (metallopeptidase M20 family)
  ENST ID: ENST00000580672
  CDS Start-End: 49-661
cacccctctgcctgtggctggattggtgggcgtggcgggggcgtggcgatgcctgccctccggacaaggcggggttggtggccagggcgaccgcggggcgggccagcgccgggggtcgtggccgggacacgtggtacggaaccggcgccgcgcttgctgctggtaacagggccttgcctagtgggccttccttcccagctccctgatggctcggagatcccgctccctcctattctgctcggcaggctgggctccgacccacagaagaagaccgtgtgcatttacgggcacctggatgtgcagcctgcagccctggaggacggctgggacagcgagcccttcaccctggtggagcgagacggcaagctgtatgggagaggttcgactgatgataagggcccggtggccggctggataaacgccctggaagcgtatcagaaaacaggccaggagattcctgtcaacgtccgattctgcctcgaaggcatggaggagtcaggctctgagggcctagacgagctgatttttgcccggaaagacacattctttaaggatgtggactatgtctgcatttctgacaattactggctgggaaagaagaagccctgcatcacctacggcctcaggggcatttgctactttttcatcgaggtggagtgca

SEQ ID NO: 120291 - DNA, 743 bp, Homo sapiens
  Payload ID: 3578
  Gene Symbol: CNDP2
  Gene Name: CNDP dipeptidase 2 (metallopeptidase M20 family)
  ENST ID: ENST00000582260
  CDS Start-End: 151-420
ggcgaccgcggggcgggccagcgccgggggtcgtggccgggacacgtggtacggaaccggcgccgcgcttgctgctggtaacagggccttgcctagtgggccttccttcccagaaccttcgagatctgcggtctggggtctggttgaaagatggcggccctcactaccctgtttaagtacatagatgaaaatcaggatcgctacattaaggtactgagtgtaaaacaatatgagagggtctctctcttccctcagtacaaacagtttttaaaatctttaacccaaagcacacgtgatgggtctgtcctatttccaatcagcctgttcaactgcagcagccacagaggaaactcgcaaaatgggtggctatccagagtgtgtctgcgtggccggagaagagaggcgaaatcaggaggatgatggaagttgctgctgcagatgttaagcagttggggggctctgtggaactggtggatatcggaaaacaaaagctccctgatggctcggagatcccgctccctcctattctgctcggcaggctgggctccgacccacagaagaagaccgtgtgcatttacgggcacctggatgtgcagcctgcagccctggaggacggctgggacagcgagcccttcaccctggtggagcgagacggcaagctgtatgggagaggttcgactgatgataagggcccggtggccggctggataaacgccctggaagcgtatcagaaaacaggccag

SEQ ID NO: 120292 - DNA, 536 bp, Homo sapiens
  Payload ID: 3578
  Gene Symbol: CNDP2
  Gene Name: CNDP dipeptidase 2 (metallopeptidase M20 family)
  ENST ID: ENST00000577355
  CDS Start-End: 1-375
gaaatcaggaggatgatggaagttgctgctgcagatgttaagcagttggggggctctgtggaactggtggatatcggaaaacaaaagctccctgatggctcggagatcccgctccctcctattctgctcggcaggctgggctccgacccacagaagaagaccgtgtgcatttacgggcacctggatgtgcagcctgcagccctggaggacggctgggacagcgagcccttcaccctggtggagcgagacggcaagctgtatgggagaggttcgactgatgataagggcccggtggccggctggataaacgccctggaagcgtatcagaaaacaggccagctgcttaaaggtcacaatattggcgactcagcgtgatttttgccaccgcatgaaatgtgacttttcagtccctgcctgtctctgtgagtgtggtcccttgccagaacatagtgcaggctctgtcacatcacacaggcccctcactgtctctgtgtggtttacgtcctcctaaaaataaattctgatttttaaaatgt

SEQ ID NO: 120293 - DNA, 897 bp, Homo sapiens
  Payload ID: 3578
  Gene Symbol: CNDP2
  Gene Name: CNDP dipeptidase 2 (metallopeptidase M20 family)
  ENST ID: ENST00000584768
  CDS Start-End: 34-507
ttcgagatctgcggtctggggtctggttgaaagatggcggccctcactaccctgtttaagtacatagatgaaaatcaggatcgctacattaagaaactcgcaaaatgggtggctatccagagtgtgtctgcgtggccggagaagagaggcgaaatcaggaggatgatggaagttgctgctgcagatgttaagcagttggggggctctgtggaactggtggatatcggaaaacaaaagctccctgatggctcggagatcccgctccctcctattctgctcggcaggctgggctccgacccacagaagaagaccgtgtgcatttacgggcacctggatgtgcagcctgcagccctggaggacggctgggacagcgagcccttcaccctggtggagcgagacggcaagctgtatgggagaggttcgactgatgataagggcccggtggccggctggataaacgccctggaagcgtatcagaaaacaggccaggtatgccccccacgctgacttctgcctgagtcctgggttccatctgagccatacaaagacaggctctctgttcacacaacagcttataaagctcacaggaaaagataagacaagcgtcccccagcccttatcagcacagatgactcggatgtaagagtataggtttgttttccagctttaggaaacattcaaagtgtaattgttttacagctgcttaaaggtcacaatattggcgactcagcgtgatttttgccaccgcatgaaatgtgacttttcagtccctgcctgtctctgtgagtgtggtcccttgccagaacatagtgcaggctctgtcacatcacacaggcccctcactgtctctgtgtggtttacgtcctcctaaaaataaattctgatttttaaaatgta

SEQ ID NO: 120294 - DNA, 536 bp, Homo sapiens
  Payload ID: 3579
  Gene Symbol: CNKSR3
  Gene Name: CNKSR family member 3
  ENST ID: ENST00000424998
  CDS Start-End: 1-536
aacattaaacctggggaaggcctgggcatgtacatcaaatcaacctatgatgggttacacgtgattactggaaccacagaaaatgtgggatggcagctgaaaaatctggtgaagaaattgagagagaatcccaccggagttgtgttactgcttaagaagcgccccaccgggtctttcaactttactcctgctcccctgaaaaacctacggtggaagccacctcttgtacagacctcacctccacccgcgacaacccagtcccctgaaagcactatggatacctcactgaagaaggagaagtcagccatcctggatctttatattcctcctccgcctgctgttccctactctccccgggatgagaatggcagttttgtttatggagggtccagtaagtgcaaacaaccattgcctggtcctaagggttcagagtccccgaattccttcttggaccaggaaagccggagacgaagattcaccattgcagactcggatcagttgcctgggtactcggtggaaaccaacattctgcccac

SEQ ID NO: 120295 - DNA, 2023 bp, Homo sapiens
  Payload ID: 3579
  Gene Symbol: CNKSR3
  Gene Name: CNKSR family member 3
  ENST ID: ENST00000479339
  CDS Start-End: 352-1779
acatgaataaacacggtgcagtccagaggggcagaagggagaagtgatgaatcttgctggtgaggaagctggtgcgtggttggtgtccagagaaggcctcaaaaaggaggagaagcttctggggagccttggaggatcaggaggagttggccagaccagatagggttggatgactgcctgcaacaatatgtccacaagtttgaacgagagaagatcaacggcgagcagctgctgcagatttcccatcaggacctggaggagctgggggtcacacggattggacaccaggagcttgtgttggaggctgtggaccttctctgtgcactgaattatggcctcgaaactgataacatgaagaacttggttctgaaactgagagcatcttcccacaatttacagaattacataagtagccgacggaaaagtcccgcttacgatggcaacacctcccgcaaggcccccaatgagttcctgacctcggtggtggagctcatcggcgccgccaaggccctgctggcgtggctggaccgggctccgtttacagggatcactgatttctcagtcacgaagaacaaaattatccagctttgcttggacctgaccactacagtccagaaggattgctttgtagcggaaatggaggataaagttttaactgtggtcaaggttttaaatggcatctgtgacaaaacaatccgatctaccacagatcctgtgatgagccagtgtgcatgtctggaggaagttcacttaccaaacattaaacctggggaaggcctgggcatgtacatcaaatcaacctatgatgggttacacgtgattactggaaccacagaaaattctcctgcagacagatctcagaagattcatgctggtgacgaagtcattcaagttaatcagcaaactgtggtgggatggcagctgaaaaatctggtgaagaaattgagagagaatcccaccggagttgtgttactgcttaagaagcgccccaccgggtctttcaactttactcctgctcccctgaaaaacctacggtggaagccacctcttgtacagacctcacctccacccgcgacaacccagtcccctgaaagcactatggatacctcactgaagaaggagaagtcagccatcctggatctttatattcctcctccgcctgctgttccctactctccccgggatgagaatggcagttttgtttatggagggtccagtaagtgcaaacaaccattgcctggtcctaagggttcagagtccccgaattccttcttggaccaggaaagccggagacgaagattcaccattgcagactcggatcagttgcctgggtactcggtggaaaccaacattctgcccacaaaaatgagagagaaaacaccatcttatggcaagccacggcctttgtccatgcctgctgatgggaactggatggggattgtggacccttttgccagacctcgaggtcatggcaggaaaggggaggatgccctttgccggtatttcagtaacgagcggattcctccgatcattgaagagagctcctctcccccataccggttctccagacccacgaccgagcggcatctggtccggggtgcggactacatccgaggaagcaggtgctacatcaactcagatctccacagcagcgccacgattccattccaggaggaagggaccaaaaagaaatctggctcctcagctacgaagtcctcgtccacagaaccgtccctcctggtcagctggtttacgcgcctcaaactgttgactcactgagagggaccctgctcaggccacctgcctggctcctgccccaagtgccttgcttttacagtggacagcctcttctcgtttcagcctcagtattatgtagggaccttatgcaatttctttttcttttgaaaagttatctactgcccttcttggaagtttgcaggattggatgggaacaaattcagaggatcttaggtgctggcttgtggagacaaaaggagggaaatgggtagagcctgtttgtctt

SEQ ID NO: 120296 - DNA, 21063 bp, Homo sapiens
  Payload ID: 3579
  Gene Symbol: CNKSR3
  Gene Name: CNKSR family member 3
  Uniprot ID: Q6P9H4
  ENST ID: ENST00000607772
  CDS Start-End: 546-2213
aactttgcaacccgagcgcgcacgctctgcgctcggccctgccagggcggcacgggagggcggcgcaggaggtgggacctgcgccgggaaggctccgggacgccagcgcacgcggagcggggaccccggagagccagcaggcgagaagaccggccgagggagagccgatcgcgcctcgagagatccgaggaagtggtcgcgggccgggaggctcccgtgccgagccgaggccaggggtctggggtcgcagcccggcgtgcctgcagctgccgtcgctcgggagcagcagctgtgcccgggatcccggcggcggcgggggaaggaggagctgcagctggactgtggcagctggagggagagggccgggctcccctggcggagccgcgctgggacgactggctgaccgcggccatgcagtcttgacggagtcgctcgggcgcaggggagcagccgcgggcgcgccctcccgggaaggggcaccggagcgcaggcagcagcactttatctgcgactctccagcccagcgagaggcgaagcggtttaccatggaacccgtgaccaagtggagccccaaacaagtggtggactggactagagggttggatgactgcctgcaacaatatgtccacaagtttgaacgagagaagatcaacggcgagcagctgctgcagatttcccatcaggacctggaggagctgggggtcacacggattggacaccaggagcttgtgttggaggctgtggaccttctctgtgcactgaattatggcctcgaaactgataacatgaagaacttggttctgaaactgagagcatcttcccacaatttacagaattacataagtagccgacggaaaagtcccgcttacgatggcaacacctcccgcaaggcccccaatgagttcctgacctcggtggtggagctcatcggcgccgccaaggccctgctggcgtggctggaccgggctccgtttacagggatcactgatttctcagtcacgaagaacaaaattatccagctttgcttggacctgaccactacagtccagaaggattgctttgtagcggaaatggaggataaagttttaactgtggtcaaggttttaaatggcatctgtgacaaaacaatccgatctaccacagatcctgtgatgagccagtgtgcatgtctggaggaagttcacttaccaaacattaaacctggggaaggcctgggcatgtacatcaaatcaacctatgatgggttacacgtgattactggaaccacagaaaattctcctgcagacagatctcagaagattcatgctggtgacgaagtcattcaagttaatcagcaaactgtggtgggatggcagctgaaaaatctggtgaagaaattgagagagaatcccaccggagttgtgttactgcttaagaagcgccccaccgggtctttcaactttactcctgctcccctgaaaaacctacggtggaagccacctcttgtacagacctcacctccacccgcgacaacccagtcccctgaaagcactatggatacctcactgaagaaggagaagtcagccatcctggatctttatattcctcctccgcctgctgttccctactctccccgggatgagaatggcagttttgtttatggagggtccagtaagtgcaaacaaccattgcctggtcctaagggttcagagtccccgaattccttcttggaccaggaaagccggagacgaagattcaccattgcagactcggatcagttgcctgggtactcggtggaaaccaacattctgcccacaaaaatgagagagaaaacaccatcttatggcaagccacggcctttgtccatgcctgctgatgggaactggatggggattgtggacccttttgccagacctcgaggtcatggcaggaaaggggaggatgccctttgccggtatttcagtaacgagcggattcctccgatcattgaagagagctcctctcccccataccggttctccagacccacgaccgagcggcatctggtccggggtgcggactacatccgaggaagcaggtgctacatcaactcagatctccacagcagcgccacgattccattccaggaggaagggaccaaaaagaaatctggctcctcagctacgaagtcctcgtccacagaaccgtccctcctggtcagctggtttacgcgcctcaaactgttgactcactgagagggaccctgctcaggccacctgcctggctcctgccccaagtgccttgcttttacagtggacagcctcttctcgtttcagcctcagtattatgtagggaccttatgcaatttctttttcttttgaaaagttatctactgcccttcttggaagtttgcaggattggatgggaacaaattcagaggatcttaggtgctggcttgtggagacaaaaggagggaaatgggtagagcctgtttgtcttgcttccccagagatagaatgtgaagacacgcgctagaaatcgcagtcctggccagagacgttatggtcattgtgagggactggtggcattgttcctttttgaggggctggggggactcaaattggtggctgttttcacacagatgtgttggtttgtggtccaacttctttatctgaaaaagccagtgagaaaacatttttgatttgatttttctaaactatctaccatattttaagtgtagcagctttgactttgcaataacgtggcaagtatctgatttctcctttgaggcagaggtttaagtgtaggcctgttacacttgtttgatacctttttcatgacagtctcagtatagatcagttggtacagaaatacatgaacacattttgatagggcttatttcacacaaagaagtttatggttatttgtgtggggtggtgttgttatatattattgtctttaagggaaaagaagctataagattcgctgacagccaaagtatcatttagaaaagtgaagcaacaagatttaggttgatgaaagatacatgagtttgcattttgacctgttcagtgtctgtcttccagcacggtgtgtacacttcttcaaaattgtacacagtttgctaattagaaatatcttggaaagcctcatggtcactaattttcaactagcatcaggtattttgaaaacgtgtgtctggatattaactcttgtttaaactgaatgtatgatattttgttagaatggaaaagtactatcttgttaatttaagtattttaaatatagttgtatatttttcttactcttagtcacctgtaattgaaatatttctgttttgcgtcatacacgaagctagtgaaaaagaaagtgcaaggcattttcagatgagcaagtgactatcgtggctgttgccagcagggcagtattgttaaaaaaaatcaaaataaaccctcccaagcattttgggattttatggattagaaatggaagaacaggagaagcatatgcaaagtgaaattgcacgaggggaattttctgaggtatcttcctaggcagagccgaaatctcctactccaaaatgccctttctcataccaccggaattgttgagtttgctgaactgcctggaattcagcccatgaaaatcactggagttaggaaacatcttccctttaaaatgcttctggtgtggttaaaggaactagcaaccactcatgtataattactgtgactgaattcagtcaggctggttttttttgtttgtttgtttgtttttgagatggagtctcaatctgtcacccaggctggagtgcagtggcgcaatctcagctcactgcaacctccaccttccaggttcaagcgattctcctgcctcagcctcccatgtagctgggattataggtgcccgccaccatgcctggctaatttttgtatttttagtggagacggggtttcactacgttggccaggctggtctcaaactcccaacctcaactgatctgccggcctcagcctcccaaagtgctgggattacaggcatgagccaccacacccggctcagtctggctgttttcttctctacctctaagacaactgccatgaagatctggtatttcggcctggcgcagtggctcatgcctgtaattccagaactttggggggccaaggtgggtggattacctggggtcaggagttcaagaccagcctggccaacatggtgaaaccctgtctctactaaaaatcagcttcgcatggtggtgggcacctgtagtcccagctactcgggaggctgaggcaggagaatcacttgaaccctggaggcggaggttgtagtgagccaagatcaggccactgcactccagcctgggtgacagaaggagactctgtctcaaaaaaaaaacaaaaagaaaaagatctggtatttcatggagacatggagacccaagggtgtttggcagatggagagaagaggcttgcagtgtgtgaccacagggtgttcaacacactaggagggtggggtgtgggctggggaggtctcgtgtagggcactggtgatgaggagggagctgtgtacgaggggcgagccagccctgcctgttttactcttgtcttgagctggctttatgcccaggaagtgggtggcaacatctcctcttactccccagattgtggggagaactctaagagctgtagttccactggatgatgagttaaatcactctggaggccttagctggctggtgagctctttttctgtggggaaaatgccacttgtgaattgaacagccatcctttaagtgaatattcggcagtcagtcttcattataggcagtggccaaccagattggtgcttttcagcctttgttccctggagtcccaggacccgcgagagaagttcctggctcctctacttgcagtcaccctccacagcttcatctttctttttatttgaggttttctcctgaattgtgtttgaaaaatatattgctgctaaaaaaaaaaaacctttgtaaacctctactatggacatacataaataatagtttaatatggatttcttagaaattaatggaaactgcttgcctcagtagtaatccaggtttaattgtggacgtgtgttcacatatgaagttgcttgatgatgctttttgacaggattctttatttttatttctttaaaaaaaatttttttttttttctgagacagattctcactctgtcacccaggctagagtgcagtggtacaatctcaactcactgcagcctctgcctcccaggttcaggcaattctcctgcctcagcctcccaagtagctgggattacaggtgcccgccaccacacctggctaatttttgtatttttagtagagatggagtttcaccatgttggccaggctgatcttgaactccttgacaggatactttacaagagtgattgttaaaactctcccagacacaactcaacacctacccctattataatattttatagcatcacttttcaatcttcaaatgaaaatcatggatgatgaagcttaccttcactcataaaaacatcactccatttactattctgaaatgaaactagcaggtaatataactagcctctaaaacatacccatcagtgacgttctaactgaaacagataagatattttataatgaaataattattttcatatgtacatattctagcatggttatattacaagatgtaattaaactactaagcagggcacatactttgtatgtgtgtgtataaatataaatatgtgaaaaatcaccatgaatgtggtagttaccaattcagacctgctgcattggcagttcaataccaggaaaggggtcgatgtcagcagtatgattttctaaaatgtggccaattctttagataaagttctaggcatacctagtctgtaatggcttcactcatatagtgcttgctgtgtgcctggcattgttctaatacctttctaataaatctatgaggtgagtactgctgttagtcccgttttgcatatgagggagttacccaggttatgtgctagtcatcctggttatgtgctaataatggcagagctgggattaaaatgaaagcagcctggctctggctttcttgctcataatcactcagtatataggcttccttccatttatagaattctctcattgcattcttgaaaaatccaaagcatattaaaactgggctgaaaattctgtgtgtttatatataaaatgaaatgagatcatagatttgttattgtaaactgagttcccatctatatgaatattgggcggggcaattgaaagttgtgttgatgagtcagctctttgttgtgagggctgtaagctgcagggcttgtgtatcacgcatgctccaacaggttaaatctcagtagtggccgcccatcagtggcacccctaacatgctcacatttccagaactgcctcttgggcggaggtgggggagggtaccatctctttcagaacaagtattttaaaagaaatcctgtatcctccttaagtagtatttcagtctatatatttgtccatttcctatctctgcttctctctcagttctttccccaccaaacctgaaatttcagaatctattttgtgggctttctttttttaattttttccctggaagaccatgaacattcctctttaggttgttagtattgcagcaaaccctgaggtattgacacaaaacttttcatccgccaaagagctcgagtaagtaaatctgtctgacatttgaatgtcaccagcaaagcatgagactcatgctgccttttgccaccataggcatgaatggtatggagaagtaggcctgacttgttttcttctattgtagatgagattagttttgtagaccattagttcacattttgctcctacccttgtgcataaaatcactgcatcatttccgtggggatgagactactgcaagctacttccttggagattctgtggaagatggacatcttaaaagtaaactacttttggtatgactgctcattggcttggccagtgatacttgatgttatttattttgtgagttactctgtgtcttaatcagctcaggctgcaataacaaaataccatacactgggtagcttaaatgacagaaatttctcaccgttctggaggctgggaagtccaagatcaaggtgagttcctggtgagcacccttaccctggtttgctgatagccatcatcttcccattgcatccttacatggcagagagagagaaaggaagcaagcaagctctcctttcccttcttgtgagggcgctaatattcatgagggctccaccctcaggacctactcacttcccaaaggcccacttatggtattagctccgcctcctaataccattgctttggagattagggtttcaacagatgaattttgggaggacataaacatgcaatccatagcactctgcttttgtatatttttcaaacctttcatgctaatcagctggaaggtgaatattttaaaatctattttaaaactggcttaaggagcacacaaaagctgatttctgatgtttcttccaatacgtggaaaattttgcatgatgtattaacccctagttagggtccctcaaccccagttgaggacctcaacacacatttggtaatacctaagggaatttaaatatatattttgtagcctatagcatatggaattagaaaaaaattagtctctttactgtaaaatttaccttttaattatttggaaatttcacaattgccaagtttcaacttaaagtttctatttatttggggccagaattattgccagaagtgtgctaatttgacaaagggtaccttttacataagtaaaggaaaaagtgattacatcatgttcagacctgctagagggccttgtttttcctctagttttaggggtgtggagtctgtcccaaaccctatatatgtgtgcatttgtgtatgtaaaagacaaattttttatactcaaaagtttgtcttaaataatggcctatggcctactgatttggatagaggagagaaattttgtctataagcaacaaaaaatgctacacagccaggagactgtcacacacagtttttcagaacctttgggccacatactgcactccccttccatagaaatacacatggggtcagtgattaaggactcaattctggttgtgacttggccatccataggcatattctaaagttctatggcaacctttatgaagctcgtcttctgagttgatcacctgttcatgcgctgcccatttacaacatacctcagggattaaaacgtgaggctacacctaaggaaagtcggtcctaatcctgcgtttcctcctgcatgtcactgaccattggagtcactgctctctgaggaagacagtttacagcctgagcattcatgtcacgctcacagccaacctgttacttgctggcctcctttaccaagctccttgtttcatgaagaagttgtgaaactgaagttggaggaaaaaaattaagaaataaacctcaaaggtatttaaaagggcagtagagtaattactcctcacacccagggataaggatattctcatcattttctctcctcttgcctggagcataaacattcagatgtttgtgaagaaatgattaaaaggagagaaaatatcaggagaaaaatgattaaaatgagagaaatgttcttccactgactagacccattaaaggggaggatttaactttattgttagaggggtgaaaactggattttaagatatttcttcaccattttgacatatcttgggctgaacattttgattattttagagaatcagggagcttcagaaatgaagtttaatataaagtaagattgtctctgaaggaagaaattgtccttttaactcagtgtcaggttccgttttcttactcatatctaaacttcctgtcactccaactgaggctgcaccaggataagaggagggatttgaggaattagcgcgaatttagaagcctttgacttttgggaatttgcatcaagcagatagaagcaggcgggggctcagcttttgaagttggatcatccagctgtctcactttgccacttatgggatctgtgacttgaagcaggtgactgacctctccactcctcagttatctatgaaatggggataatactagcatctacttcgaaggcttatggtgattaaatgagataatgtttttaaggccctttcttcgcatagtctggcacacagcatttaagagatgttgactcgtgttcctgtagtagcagtactgactccatctcagcctctagtgaataaggtattcagagctggccaacaggaaattgctcattcttttgtccataagcagcaaaataatgccagtgtgacactgtcagagggctgcagtgtggtcagtggcctagagatgcagcttttactgttagaaaactcactcggatgttttagccgattcagaactcaagaaatgacaaaagtctgtgattggacacacttttttttttttttttgagacggagtttcagtcttgttgcccaggctggagtgcaatggtacgatcttggctcaccgcaacttccgcctactgggttcaagtgattctcctgcctcagactcccaagtagctgggattacaggcatgtgccaccacacccggctaattttgtatttttagtagatggggtttcttcgtgttggtcaggctggtctcgaactcccgacctcaggtgatccgctcacctcagcctcccaaagtgttgggattacaggcgtgagccactgcgccccgcctagagtattctttcaatattgacttgatttgtcatcatcatatcttttctattaaatcccttccacttccttcaatgaaatcgtatatgaaaacaaagggaatcggagcattttgcccacctcctagttggctgaattatttttgcctcccattcccatcttgaagtggtattcctcaaactcgtttctatgtttcctgtggttttaaataaaggaataatgtagaatggtatctattttggacattctcatcgtgaaaaggaactcttacacaaatacaaagccaagagattgtgttgccattgttgaagctgaaaaggacagtcactggatgcctccccacccaaggccaaggctttggtaggtccaggaagtgaaaaggaaagagaagctatgggagagacaaagggaagtaaaaaatggttgttcggctcagcataacaatcacttttgtggggcttattggttgtgcataaatttcatccatttgggcacacacacagatgtgacacccagaccactcagacacttggctaacactgatgccgtcatcctgaatgttgtttctggaaggactttcatgaatagaatctatttcagattggccgtaagtctcgatttattgatccgcaccactggactggggtggggttgtgtccactttttccctgccccttccctgctttggctcttgtgattgtgtcctccgtgtgtcaggcagagccctgtgaaggtgtggatatgtggccatattttacctgcataatctgcagttcatatgattcagcctaatgggttgcaatgccctgaggacagagaccatactttttcttcctttgtctttttagcgaaattcaatcctgttctgcgcctgcgccacagttgcaggctgtactgtctgccctgtgcatctcacacacccccactgcactgtgcacctagtgatggccgcagatttgcttttactcatcttccagggcctaccctgttaattccatcacagttgcaggctgtactgtctgccctgtgcatctcacacacccccactgcactgtgcacctagtgatggccgcagatttgcttttactcatctgtttgcagggcctaccctgttaattccatcacagttgcaggctctactgtctgccctgtgcatgcatctcacacacccactggactgtgcacctagttgatgaccacagatttgctcttacccatctatttccagggcctgccactgttaattcctaggaaaaaagaaaaaacaagcatggtggattggttaaattggcattttatattgtttgtgttcatggccatgccaatgataaacaagagctggtcatgggcattcagatcagatgagcaattaaatcccctccaaaaaacagaaacctacttttagagaagaaaagaattaaaccaagatctttcagggttttgcttctccttttgtttttaaggcacttaaataaatggaagaacatgtaagctaaccgtgtttagagtactatgttttactagaaagtgctacccttctgcagatttctcctcaatgaaagaatgccactgaagcacctttaatggtgcctttatcctatagtcttattgaatcattctctttagccaacataaaatacaaagccagggtataagacttcatgtaggtggtaatttaaactaacaattagtgaggccgggcgcggtgggtcacgcctgtaatcccagcactttgggaggctgaggcaggtggatcacaaggtcaggagatcgagaccatcctggctaacacggtgaaaccccgtctctactaaaaatataaaaaaaaaaaaattagccgggcgtggtggcgggcgcctgtagtcccagctactcgggaggttgaggcaggagaatggcgtgaacccgggaggcgcaacttgcagtgagccgagattgcgccactgcactccagcctgggagacagagcgagactccgtctcaaaaaaaaaaaaaaaagaaaacaattagtgaatttttgctgatgctttccttaaaccccttacttagcacttagttctggattcttaaatcctgataatggactcatccttctcggtctagttaccccagtaagtcccaaggtcatccatatgaggtcctccttgatcttactctgaatagaattaactggtctcttctgtttttccatagcattgactcatcgtgttagaccagcttgaattgtgagcctttctaaagcagggtctgtataatttacccttatatttgctctgtaggcagagaaaatattattgaagtaactagatggtaaaattaactgtgcaatcagaaaagaagttagaaaaaattattaaaattttctgtgaaaattgttttaattttattaatatattaaagcattttgcagactattccataaagaattttattacattggctctcattttaaagaaaacattataccaggtgtcagaactcaatcatatttgtaggaagaataagccttggccatcaacaacgcttctttggttacaggattacaggaactgctgagaatgtaagcactttccgaagtccacaaagaactcatttaaagctcgtacaggcagtttcaaattagccagggaaaagttaatggtggggaggtaaggtcatagaatgctctataaatggaggcgacgtggaggacagttgcagttgtataacatttgattgaaggagagggatttggacctgaggaaaccaggtctataaatactaaggctggctgggcacagttggctcatgcctgtaatctcagcattttgggaggctgaggccggtggattgcttgagcccaggagtttgagaccagcctggacaacatggtgaaaccctgcctccaaacaaacaaaattaaccgagtgtggtggtgtgcacctgtagtcccagctactcaggaggctgagatgggaggatctcttgagcctgagaggtagaggctgcagtaagcccagattgcaccactgcactccagcctggtgacagagtgagactccatctcaaacaaacaaaacgtacatgcatatataggctgtagactaaatagtgaaatattactaagaaccttcatcccaaggggttgagtggtagaaccactgagaatattgttgctgctcttttggagacaacaaactgcattaataaaagtctgagaacaagaaagttgagttttcaagtaatgtcctttgcatattgctacatagggctcatctgagtctgtgatgttctactttgttgatgaaagaaaacaagtggaaattctgctcccccacacatcctgcactgcaaaaagataacaagtagcaggagatactcaattatgatgcagttcaacaaagaaaacaaattaaaataaagagatcctgggtggttaaatacagagtctcctttgtaaacagcaatggatgatgatgatgactgttaccagggctctgtatgatcattttcccaattctttggagtacttttttcaaaagcactcttgtagaattaactggaaacatagactacccttcactcattacatgggaaatgggattgaattctcttcttggcaatggaaaatacttgatgcatgcaaataagaaaactcttactttttccttctctccttgcagggggagcacgcgtcctaagcttgccaggaagccctgctctcctgccctgggcacctccgttccacttgaccttttccacctgtactccctgcattttggtctcttgctctggtctttagccttcgcattttcctgatgcagcccaaaccagtcacctctctcctagattcattctctgtgctcagaccatctctttcctttagttcctgtgacgaaagaaaatgtatttggccattggaggtataagcaacaaagaatccaacccacacagctttatatatgcaggttctctatatgctcttcttgtgaacagcgtggggagaggaaaatagacttggcaagaggactaagaacagaatcggacagttatctgatggctttcctaaggttcaggaaagaacagtggtccctttgttgggcctttctgttgtttctttgttttcaatttcactgatttctgctttttattttctattttcttctgtttcctttggaattcttctttttttttttttttttttttacttcttgtattaggctcatgctataacaaacaacccccaaatctcagtgactttacacactaagagtttacattttcctcatcaacgtccactttggatgttccaggttgggtaatgctctgtggctgtcctctagctagtgactcagggacttgggttgctcctggtgtctccagcgtggttatggtgtctccaattttggacttcaaggtgacccaggcattatccacctggtaaattgggagatgggtcccaggaaagtgaatactcaaccaacctggcctagaagtgacaataataaggccatgtgtggtggctaacagtcagaaacccaacaattgggagattgagctgggaggattgcttgagaccagaagttcaagaccagctgggcaccatagtgagaccctatctttcaaaaaaatataacaaccaggcttggtggtgtacacctgtggtcccagctatttgggaggctgaggtgggataatcgctggagcccaggagtttgaggttacagtaaaccaggtttacaccactgcactccagtctggatgacaaagcaaaaccctcatctcacaaaagaaaagaaatgacaatcacagccactgcaacttcaaggaaggttgggagagtgatattggtcaggatgagtggtctctgacatgtttcttaagttggatatttagcttattaatttacaactcttttctaatattaatactcaagactacattttccccaaaacatttattttgccatgttttgcaaggcttggtatatggcattttcattactctttaattctaactaatttttaatttctattatgatttattatttgatctatgaatcattttgaaatttgtttttgtaaccttggatagggaaagatttcttatagaagacagtaaaagggctgagtacaaaagaaaagactaataaattcagctacgctaaagcttagaacttttcctcatcataggacaccttaaagaaaatttttaaaaagttacaaattgggagaagattaaaaagtcctaagggttagcagtaagaatatatacatataattattacaaattggcaagagaatgacaaatcaacacaaaaacgagcgaaaaggcattttgcaaaagagaatcagatggtccatatgcatgtgaagcgattttcactagcgagcagggaaagtgaagtcaaaatcacagggagatgctgctctctacctgactggcaaaactgaaatgattagaaaatacttggaggatatcctagaacgatcagtgggatctggtatattatgtgtatgaggttaaattagcagtgagtattcacataccctatgactcagcagtttcattcctagatatatatcctggggattagaaacactaagtaggtgggtgcagtggctcacacctacaatcccagcactttgggaggccaaggcaggtggatcacttgaggtcaggggttcgagaccagactggccaacatggtgaaaccccatctctactaaaaatacaaaaattagccaggcgtggtggcgggcacctgtaatcccagctacttgggaggctgaggtgggagaatcgcttgaaccccggaggtggaggttgcagtgagctgagattgtgccactgtactccagcctgggcgacagaatgagactccatctccaaacaaacaaacaaacaaacaaaccactaactacctcagaggacaatgctaacatttcaaagtgttctagaagttggtttcccagaaaagaagtcaggctcttgtggagctccatggaaactggcaatgacccatgacttagggcagtgaagtctcatcaaatgcaaggcttagaccccattctgctgctgccgtcaggggaggcaagggctccttgttccccaaacatcgatgctaatgaagcaaatcctgctgctagtttgcagtgttgcctagctgcaaacacaacctctgatgatgccaatagagaggctggtgcctccttcatcatagagcttacaatccccacaaggtttcgggaccctcttttggattctgagggtgggctcctttagccatctgtttagtgccccagatgaaattgacagcaggggacctgcactccttctactgctttttctcaaggcatccccagcagagggtctctagggtgcctgttatgtgtgctgtttggccatctgcctttgtagaacacagcccaatgtctgttggcaaaaaaaggtttacatgtggtatattcttaccatggaatattctgcagcaagtaaaaatgaataaattacagctattcatatcaaagagatggattttattaatatagtgctgagtgggaaaaagcatcagaagacaacatataatggtacactctttttttttttttgagatggagtctctctctgttgcccaggctggagtgcagtggctccatctcggctcactgcaacctccacctcccaggttcgagcgattctcctgcctcagctgcccgagtagctgggactacaggtgcgcaccaccacaccaagctaatttttgtatttttaatagtgacggggtttcaccatgttggccaggatggtctctgtctcttgacctcatgatccgcctgcctcagccttccaaagtgctgggattacaggcatgagccaccatgcccagctacattctttttaaacattcagaaacaggtaaaactgaaaaatatataatttagacacaacacttatgtgaaaagaccaagtttaggatgttggttacctgtgacggggcagcaagattgtgggaaaggaaggaagctacaggtatgtgacagagagttgcattagcccaaatctctacagagctggtgtcaaggatgaaactattggtgttttatttggaagatacaagcccaaggcgaggtgagaaaaaagagaagggaagcaaaagaagacacaaagtgacacaaaatggcatgaactaaattacgttctctccaaattcacatattgaagtcctaaccccagtacctcagaatgtaactgtatttggagattcggtctttaaagaagtgattcaggctgggcctgattgctcacgcctgtaatcccagcactttgggaggccgaggcaggcggatcatgaggtcaggagattgagactatcctggctaacacgatgaaaccctgtctctactaaaaatacaaaaaattagccagttgtggtggcaggcgcctgtagtctcagctacttgggaagttgagggaggagaatggtgtgaacccaggaggtggagcttgcagtgagccgagattgtgccactgcactccagcctgggtgacagagtgagaccccgtctcaaaaaaagaaaaaaagtgattcagttaaaatgcagtcattatggtgggctcaatcaaggacatgtggacacagatatgtatgcacatggaggaaagaccatgtgaagtcggggagaagaaaaccagctacacactaaagaaagaggcgtcaggccgggcgcgatggctcccgcttgtaatcctagcagtttgggaggccaaggtgggcaaatcacttgaggtcaggagttcgagaccagcctggccagaatggtgaaaccctctctctactaaaaatataaaaattagctgggcgtggtggcatgtgcctgtaatcccagctacttgggaggctgaggcaggagaatcacttgaacccgggaggtggaggttgcagtgagccgagatggagccactgcactccagcctgggcaacagagtgagactccatctcaaaaaaaaaaaaaaaaaaaagcctcagaagaaaccagtgctgctgacaccttgatcagtcttccacctgcagagctgtgagaagacacatttctgttgtttaagctacccagtctgtggtattttgttatggcagccccaacaaactaatacacaaaatgatgcacagccttgctgactatcacttcaaaatgagccaaacagagacacaacggggcactaggcaattgtgtcccactcagtgaaacttctctggaaagctgtaaggtatagtccagagacgagaggaagggaagaagaaatttatcctctgggagcctcccatttcctgtctcctaatagtgagaatttttccatgagaagttaatgtccctatactttcacaatgtgttaccttcttttgttgctgttcaagatgccaagcctatgccctgcagtgtggccttttgtcagagtccataaagggcaggaggaactaggaactctgggtgtgtatggttggcccagctgcagagttgacagtcaaggggataaccaactctaatcagcctagaagggaacttggtagcctaggtgagttggtcaggcacaggctggggctaaggcaaggcaaatggctgaggtctaagacgtaggtggtgctgagaaaatgtggggaagcatacaagatttgtgactgatgagtaatattctagttcttggttaggataatgggtacatggggtgttccttttattattttcaaaatgaaatgaaataaaagagggatatgtgtggactgatgatgatgtataatgaatcaaagattatgattaacttaactctgcatacttgagtttgtttatttttctataaaaggagaatagcaatattaagtcttacagcccaggaatgaaatgtctttccatttgtttgtgtcttctttaatttatttcatcagtattttgtagttttcagtatacaagtctttcacctccttagttaagtttattcccaagtattttattattttgggtgctattatatatgggattgtttcgctaatttcctttttagatagttctgtgttaatgtatagaaatcgcaactgatttttgtatgttgattttgtattatgcaactttattgaattcctttattctaacatgtttaaaaaatggagtcttagggcgttctatatatgagacgatgtcatctgaagacagggacaaaacaattctacagtccatatgaaaccacaaaagaccatgaatagccatatcaatcttgagaaagaagaacaaagatagaggcatcacattgcttgatttcagaatgtataacaaaactacagtaatcaaaacagtatgttactggccaacagatagacatatatgtgaatggaacagaatagagagtccagaaatagattcacatgtatattgtcaactgatcttcaacaatggtgccaagaatacataatggggaaaggatagtctcttcaacacatggtattgagaaaatcagatatccatgtgcaaaagggggaaactggacttttatcttacatcacatacaaaacccaactcaaaatggattaaagatttaaacataaaatctgaagctgtaaaactcctagaagaaaacataggcgaaaagctctttgacattggtcttgtcaatgatttcatggatatgacccccaaaacacaggcaacaaaaacaaaaataagcaaagttacatcaaatcacaaagcttctcacagcaaaggcaacaatcaacagagtgaaaagaaaacctatgaaatgggagaaagtatttgcaagcgatgtatgtgataagggttgacatctaaaatatgtaaggaattcataactcaatagcaaaaaaaaaaaaacccaatttttacaaatgggccaaggatctgaatagcatgggctctggcatcttgaacagcaatgaaagaagctagttgacacattgcgagagtatagggatattaacctctcatgggcaaattctcatcaatgagaggaaatgggaggctcccagaggataaaaggtgctcatcatcactgatcatcagggcaatgcaaatcaaaaccaccgtgagatatcaactctcacctgtcaggatggctatcattgaagaaccaaaacacaacaaatattggtgaagaagtggacaaattggaacccttgcatactgttgatgggaatgcaaaatggtgcagccactaaggaaaacagtatgggtgttcctaaaaaatgtaaaaatagaactgccatgtgacctagcaaccctatttctggatatttatccaaaaaaattgaaatcaggatcccaaagaggtattagcatttgcaggttcattgccgcattattcacaatatccaagatacacaaacaatctaagcgtccatcggcggagaaatgaataaagaaaatgtatatacacatacaatggaatactatttagcttttaaaaagaaggaaattctgcaattattcaacaacatggataaatcttaaggacattacgctaagtgaaataaactattaacagaaagactaatatggcaggattcaatttatgtgggatatttaaaatagtcaacttcatagaaccaaagagtgaaatgatggtggccaggggctgaggggagtggggagttactaatcaataggcataaagtttcagtgaagtcaggtgaataagctctagagatttgtggtacaatattgcacctatagtcaacaatactgcagtgtacactgaacaatttgttaagatagatctcaccttgtgttcttactgaaaaaaaaaaagaaagaaaatagaacagaaaagcaattggattttaattctggaaactcctttctcttccttacatccaggaaatttgctgtttattttgaaaagcaaatttaaacctatttaagggagagagagctcttgtaaaaattcatttattagttctggaccaatgttatttataagctattatttcaaatgataaaaaataaatgcataatacatttgatgatagaacatttttctttttaaataaggcctgatttttcaaaaagcattgaatatgtttgtttctaatttccaaagcttgacagtttcttatgtttcattaaaagcagaagaattgttatgtatgcatgttcatatcacttttgaatgactcatgtggctacaaatgcagcaatctgtggttatcatggaccatgaactagataaacattcctgcttttcttaacattcctttcctgtgcctcattaactaatgtacataataaaacatctttatttcattttctttgca

SEQ ID NO: 120297 - DNA, 2700 bp, Homo sapiens
  Payload ID: 3579
  Gene Symbol: CNKSR3
  Gene Name: CNKSR family member 3
  ENST ID: ENST00000616478
  CDS Start-End: 1-2700
atggaacccgtgaccaagtggagccccaaacaagtggtggactggactagagggttggatgactgcctgcaacaatatgtccacaagtttgaacgagagaagatcaacggcgagcagctgctgcagatttcccatcaggacctggaggagctgggggtcacacggattggacaccaggagcttgtgttggaggctgtggaccttctctgtgcactgaattatggcctcgaaactgataacatgaagaacttggttctgaaactgagagcatcttcccacaatttacagaattacataagtagccgacggaaaagtcccgcttacgatggcaacacctcccgcaaggcccccaatgagttcctgacctcggtggtggagctcatcggcgccgccaaggccctgctggcgtggctggaccgggctccgtttacagggatcactgatttctcagtcacgaagaacaaaattatccagctttgcttggacctgaccactacagtccagaaggattgctttgtagcggaaatggaggataaagttttaactgtggtcaaggttttaaatggcatctgtgacaaaacaatccgatctaccacagatcctgtgatgagccagtgtgcatgtctggaggaagttcacttaccaaacattaaacctggggaaggcctgggcatgtacatcaaatcaacctatgatgggttacacgtgattactggaaccacagaaaattctcctgcagacagatctcagaagattcatgctggtgacgaagtcattcaagttaatcagcaaactgtggtgggatggcagctgaaaaatctggtgaagaaattgagagagaatcccaccggagttgtgttactgcttaagaagcgccccaccgggtctttcaactttactcctgctcccctgaaaaacctacggtggaagccacctcttgtacagacctcacctccacccgcgacaacccagtcccctgaaagcactatggatacctcactgaagaaggagaagtcagccatcctggatctttatattcctcctccgcctgctgttccctactctccccgggatgagaatggcagttttgtttatggagggtccagtaagtgcaaacaaccattgcctggtcctaagggttcagagtccccgaattccttcttggaccaggaaagccggagacgaagattcaccattgcagactcggatcagttgcctgggtactcggtggaaaccaacattctgcccacaaaaatgagagagaaaacaccatcttatggcaagccacggcctttgtccatgcctgctgatgggaactggatggggattgtggacccttttgccagacctcgaggtcatggcaggaaagcttttgtttctactaagatgacatcatacatggctattgatggcagtgctcttgttcccttgcgtcagaagcccaggaggaaaactcaaggttttctcacgatgagtcggaggaggatatcgtgtaaagatctgggccatgctgactgccaagggtggctgtataagaaaaaggaaaagggaagtttcctaagcaacaaatggaaaaagttctgggtgatactgaaggggtcgtcactgtactggtatagcaatcaaatggcagagaaagctgatggatttgtcaacctgcctgatttcactgtggaaagagcatctgaatgcaagaaaaagcatgcttttaagatcagccatccacagatcaagaccttttattttgcagctgagaatgtgcaggaaatgaacgtgtggttaaataaacttggatcggctgtaatccatcaggaatccactacaaaggatgaagaatgttacagtgaaagtgaacaggaagatccagaaatagctgcggagacaccaccccctcctcacgcttcccagactcagtctttgactgcacagcaggcatcttcatcctcacccagcctgagtggaacgtcgtattctttctcttccctggaaaatacagtgaagacacccagcagttttccttcctccttatctaaagagagacaatccttgcctgacacagttaacagtttgtctgctgctgaagatgagggacaaccaataacgtttgctgtgcaagttcattcacctgtaccctcagaggcaggcatccacaaggccctggaaaacagttttgtcacatcagaaagtggatttttgaactctttatctagtgatgatacttcttcattgagtagcaatcatgaccatcttactgtcccagataagcctgctggatcaaagatcatggacaaagaagagacaaaagtgtctgaagatgatgaaatggagaagctgtacaaatcattagagcaagctagtctatctcctcttggggaccgacgaccttcgactaaaaaggagttgagaaaatcctttgttaagcggtgtaaaaatccatctataaacgagaaactccacaaaatccgaacattgaatagcacattaaagtgtaaagaacatgatctggccatgattaaccagttgctggatgacccgaagctgacagccaggaaatacagagagtggaaagtcatgaacaccctgctgatccaggacatctatcagcagcagcgggcttcgcctgcccctgatgacactgatgacaccccccaggaactcaagaaatcaccttcttctccctctgttgaaaattccatttga

SEQ ID NO: 120298 - DNA, 2458 bp, Homo sapiens
  Payload ID: 3580
  Gene Symbol: COASY
  Gene Name: CoA synthase
  Uniprot ID: Q13057
  ENST ID: ENST00000393818
  CDS Start-End: 457-2151
agccagggaagcctccgcggtggtgcaagtggaacccaagccttgaggtttcagtgagtagggggccgacgtgagctttagcgtccccctttagcctccctcttcgattccttgaagaccctggtgcagcttagcaagagggcccaggatttttggatccccagccctgtgacaagggttcctgtccagtttccccctcccaggatttcgactcagttcagcgaagtcaccgccccgtctgagaaatgaggacaccaaggcttagagcacagccccgaggcgccgtctaccaggccccgtcccctcccccggctcctgtcggtcagcactgaaaccccgtccctgctccaggcctccttctctggggtccaaggtcccatacaggcctctgcctcggccgcaggcccttcagtcaccgtcgcctcgtctccctgactgtccgcaggcctgggcagcatggccgtattccggtcgggtctcctggtgctgacgacgccgctggcctccctagcccctcgcctggcctccatcctgacctcggcggcccggctggtgaatcacacactctatgttcacctgcagccgggcatgagcctggagggcccggctcagccccagtccagccccgtgcaggccacgtttgaggttcttgatttcatcacgcacctctatgctggcgccgacgtccacaggcacttggacgtcagaatcctactgaccaatatccgaaccaagagcacctttctccctcccctgcccacctcagtccagaatctcgcccacccgccagaagtcgtgttgacagatttccagaccctggatggaagccagtacaacccggtcaaacagcagctagtgcgttacgccaccagctgttacagctgttgtccgcgactggcctcggtgctgctatactccgattatgggataggagaagtgcccgtggagcccctggatgtccccttaccctccacgatcaggccagcttcccccgtggccgggtctccaaagcagccggtgcgtggctactaccgtggcgctgtcggtggcacgtttgaccgcctgcacaacgcccacaaggtgttgctcagtgtcgcgtgcatcctggcccaggagcagcttgtggtgggagtagcagacaaagatctgttgaagagcaagttgctccctgagctgctccaaccttatacagaacgtgtggaacatctgagtgaattcctggtggacatcaagccctccttgacttttgatgtcatccccctgctggacccctatgggcccgctggctctgacccctccctggagttcctggtggtcagcgaggagacctatcgtggggggatggccatcaaccgcttccgccttgagaatgacctggaggaacttgctttgtaccagatccagctgctgaaggacctcagacatacagagaatgaagaggacaaagtcagctcctccagcttccgccagcgaatgttggggaacctgcttcggcctccatatgaaaggccagagctccccacatgtctctatgtaattgggctgactggcatcagtggctctgggaagagctcaatagctcagcgactgaagggcctgggggcgtttgtcattgacagtgaccacctgggtcatcgggcctatgccccaggtggccctgcctaccagcctgtggtggaggcctttggaacagatattctccataaagatggcatcatcaacaggaaggtcctaggcagccgggtgtttgggaataagaagcagctgaagatactcacggacattatgtggccaattatcgcaaagctggcccgagaggagatggatcgggctgtggctgagggaaagcgtgtgtgtgtgattgatgccgctgtgttgcttgaagccggctggcagaacctggtccatgaggtgtggactgctgtcatcccagagactgaggctgtaagacgcattgtggagagggatggcctcagtgaagccgcggctcaaagccggctgcagagccagatgagcgggcagcagcttgtggaacagagccacgtggtgctcagcaccttgtgggagccgcatatcacccaacgccaggtggagaaagcctgggccctcttgcagaagcgcattcccaagactcatcaggccctcgactgaaaagttctcagtggggccagactggctcctggagctgacaagcgaccccgtggtgaggagaaatgggggccttgatgctcaccctggttcaggcccagaggtccaagctatactgtgcaggacatggccaggcctggtggacacaggaagcctacccaacacgctggtatttggccaacactgaggatgtggttcatgggggagcagtcccctccccactcttgcccatgggtgactcttacccacagctgactagggccagcgcaaatactggaacctgtaacagaattaaaggtgaatgttctga

SEQ ID NO: 120299 - DNA, 2071 bp, Homo sapiens
  Payload ID: 3580
  Gene Symbol: COASY
  Gene Name: CoA synthase
  Uniprot ID: Q13057
  ENST ID: ENST00000421097
  CDS Start-End: 85-1779
cgttagtgcttccgggttgcagccagggaagcctccgcggtggtgcaagtggaacccaagccttgaggtttcagcctgggcagcatggccgtattccggtcgggtctcctggtgctgacgacgccgctggcctccctagcccctcgcctggcctccatcctgacctcggcggcccggctggtgaatcacacactctatgttcacctgcagccgggcatgagcctggagggcccggctcagccccagtccagccccgtgcaggccacgtttgaggttcttgatttcatcacgcacctctatgctggcgccgacgtccacaggcacttggacgtcagaatcctactgaccaatatccgaaccaagagcacctttctccctcccctgcccacctcagtccagaatctcgcccacccgccagaagtcgtgttgacagatttccagaccctggatggaagccagtacaacccggtcaaacagcagctagtgcgttacgccaccagctgttacagctgttgtccgcgactggcctcggtgctgctatactccgattatgggataggagaagtgcccgtggagcccctggatgtccccttaccctccacgatcaggccagcttcccccgtggccgggtctccaaagcagccggtgcgtggctactaccgtggcgctgtcggtggcacgtttgaccgcctgcacaacgcccacaaggtgttgctcagtgtcgcgtgcatcctggcccaggagcagcttgtggtgggagtagcagacaaagatctgttgaagagcaagttgctccctgagctgctccaaccttatacagaacgtgtggaacatctgagtgaattcctggtggacatcaagccctccttgacttttgatgtcatccccctgctggacccctatgggcccgctggctctgacccctccctggagttcctggtggtcagcgaggagacctatcgtggggggatggccatcaaccgcttccgccttgagaatgacctggaggaacttgctttgtaccagatccagctgctgaaggacctcagacatacagagaatgaagaggacaaagtcagctcctccagcttccgccagcgaatgttggggaacctgcttcggcctccatatgaaaggccagagctccccacatgtctctatgtaattgggctgactggcatcagtggctctgggaagagctcaatagctcagcgactgaagggcctgggggcgtttgtcattgacagtgaccacctgggtcatcgggcctatgccccaggtggccctgcctaccagcctgtggtggaggcctttggaacagatattctccataaagatggcatcatcaacaggaaggtcctaggcagccgggtgtttgggaataagaagcagctgaagatactcacggacattatgtggccaattatcgcaaagctggcccgagaggagatggatcgggctgtggctgagggaaagcgtgtgtgtgtgattgatgccgctgtgttgcttgaagccggctggcagaacctggtccatgaggtgtggactgctgtcatcccagagactgaggctgtaagacgcattgtggagagggatggcctcagtgaagccgcggctcaaagccggctgcagagccagatgagcgggcagcagcttgtggaacagagccacgtggtgctcagcaccttgtgggagccgcatatcacccaacgccaggtggagaaagcctgggccctcttgcagaagcgcattcccaagactcatcaggccctcgactgaaaagttctcagtggggccagactggctcctggagctgacaagcgaccccgtggtgaggagaaatgggggccttgatgctcaccctggttcaggcccagaggtccaagctatactgtgcaggacatggccaggcctggtggacacaggaagcctacccaacacgctggtatttggccaacactgaggatgtggttcatgggggagcagtcccctccccactcttgcccatgggtgactcttacccacagctgactagggccagcgcaaatactggaacctgtaacagaattaa

SEQ ID NO: 120300 - DNA, 1976 bp, Homo sapiens
  Payload ID: 3580
  Gene Symbol: COASY
  Gene Name: CoA synthase
  Uniprot ID: Q13057
  ENST ID: ENST00000590958
  CDS Start-End: 126-1907
agtgcttccgggttgcagccagggaagcctccgcggtggtgcaagtggaacccaagccttgaggtttcatttccccctcccaggatttcgactcagttcagcgaagtcaccgccccgtctgagaaatgaggacaccaaggcttagagcacagccccgaggcgccgtctaccaggccccgtcccctcccccggctcctgtcggcctgggcagcatggccgtattccggtcgggtctcctggtgctgacgacgccgctggcctccctagcccctcgcctggcctccatcctgacctcggcggcccggctggtgaatcacacactctatgttcacctgcagccgggcatgagcctggagggcccggctcagccccagtccagccccgtgcaggccacgtttgaggttcttgatttcatcacgcacctctatgctggcgccgacgtccacaggcacttggacgtcagaatcctactgaccaatatccgaaccaagagcacctttctccctcccctgcccacctcagtccagaatctcgcccacccgccagaagtcgtgttgacagatttccagaccctggatggaagccagtacaacccggtcaaacagcagctagtgcgttacgccaccagctgttacagctgttgtccgcgactggcctcggtgctgctatactccgattatgggataggagaagtgcccgtggagcccctggatgtccccttaccctccacgatcaggccagcttcccccgtggccgggtctccaaagcagccggtgcgtggctactaccgtggcgctgtcggtggcacgtttgaccgcctgcacaacgcccacaaggtgttgctcagtgtcgcgtgcatcctggcccaggagcagcttgtggtgggagtagcagacaaagatctgttgaagagcaagttgctccctgagctgctccaaccttatacagaacgtgtggaacatctgagtgaattcctggtggacatcaagccctccttgacttttgatgtcatccccctgctggacccctatgggcccgctggctctgacccctccctggagttcctggtggtcagcgaggagacctatcgtggggggatggccatcaaccgcttccgccttgagaatgacctggaggaacttgctttgtaccagatccagctgctgaaggacctcagacatacagagaatgaagaggacaaagtcagctcctccagcttccgccagcgaatgttggggaacctgcttcggcctccatatgaaaggccagagctccccacatgtctctatgtaattgggctgactggcatcagtggctctgggaagagctcaatagctcagcgactgaagggcctgggggcgtttgtcattgacagtgaccacctgggtcatcgggcctatgccccaggtggccctgcctaccagcctgtggtggaggcctttggaacagatattctccataaagatggcatcatcaacaggaaggtcctaggcagccgggtgtttgggaataagaagcagctgaagatactcacggacattatgtggccaattatcgcaaagctggcccgagaggagatggatcgggctgtggctgagggaaagcgtgtgtgtgtgattgatgccgctgtgttgcttgaagccggctggcagaacctggtccatgaggtgtggactgctgtcatcccagagactgaggctgtaagacgcattgtggagagggatggcctcagtgaagccgcggctcaaagccggctgcagagccagatgagcgggcagcagcttgtggaacagagccacgtggtgctcagcaccttgtgggagccgcatatcacccaacgccaggtggagaaagcctgggccctcttgcagaagcgcattcccaagactcatcaggccctcgactgaaaagttctcagtggggccagactggctcctggagctgacaagcgaccccgtggtgaggagaaatggggg

SEQ ID NO: 120301 - DNA, 742 bp, Homo sapiens
  Payload ID: 3580
  Gene Symbol: COASY
  Gene Name: CoA synthase
  ENST ID: ENST00000586771
  CDS Start-End: 84-742
ttctccgttagtgcttccgggttgcagccagggaagcctccgcggtggtgcaagtggaacccaagccttgaggcctgggcagcatggccgtattccggtcgggtctcctggtgctgacgacgccgctggcctccctagcccctcgcctggcctccatcctgacctcggcggcccggctggtgaatcacacactctatgttcacctgcagccgggcatgagcctggagggcccggctcagccccagtccagccccgtgcaggccacgtttgaggttcttgatttcatcacgcacctctatgctggcgccgacgtccacaggcacttggacgtcagaatcctactgaccaatatccgaaccaagagcacctttctccctcccctgcccacctcagtccagaatctcgcccacccgccagaagtcgtgttgacagatttccagaccctggatggaagccagtacaacccggtcaaacagcagctagtgcgttacgccaccagctgttacagctgttgtccgcgactggcctcggtgctgctatactccgattatgggataggagaagtgcccgtggagcccctggatgtccccttaccctccacgatcaggccagcttcccccgtggccgggtctccaaagcagccggtgcgtggctactaccgtggcgctgtcggtggcacgtttgaccgcctgcacaacgcccacaaggtgttgctcagtgtcgcgtgcatcctggcccagga

SEQ ID NO: 120302 - DNA, 625 bp, Homo sapiens
  Payload ID: 3580
  Gene Symbol: COASY
  Gene Name: CoA synthase
  ENST ID: ENST00000585811
  CDS Start-End: 354-625
gttgcggtttctccgttagtgcttccgggttgcagccagggaagcctccgcggtggtgcaagtggaacccaagccttgaggtttcatttccccctcccaggatttcgactcagttcagcgaagtcaccgccccgtctgagaaatgaggacaccaaggcttagagcacagccccgaggcgccgtctaccaggccccgtcccctcccccggctcctgtcggtcagcactgaaaccccgtccctgctccaggcctccttctctggggtccaaggtcccatacaggcctctgcctcggccgcaggcccttcagtcaccgtcgcctcgtctccctgactgtccgcaggcctgggcagcatggccgtattccggtcgggtctcctggtgctgacgacgccgctggcctccctagcccctcgcctggcctccatcctgacctcggcggcccggctggtgaatcacacactctatgttcacctgcagccgggcatgagcctggagggcccggctcagccccagtccagccccgtgcaggccacgtttgaggttcttgatttcatcacgcacctctatgctggcgccgacgtccacaggcacttggacgtcagaatcctactgaccaatatccg

SEQ ID NO: 120303 - DNA, 551 bp, Homo sapiens
  Payload ID: 3580
  Gene Symbol: COASY
  Gene Name: CoA synthase
  ENST ID: ENST00000587157
  CDS Start-End: 262-551
agtgcttccgggttgcagccagggaagcctccgcggtggtgcaagtggaacccaagccttgaggtttcagtgagtagggggccgacgtgagctttagcgtccccctttagcctccctcttcgattccttgaagaccctggtgcagcttagcaagagggcccaggatttttggatccccagccctgtgacaagggttcctgtccagtttccccctcccaggatttcgactcagttcagcgaagtcaccgccccgtctgagaaatgaggacaccaaggcttagagcacagccccgaggcgccgtctaccaggccccgtcccctcccccggctcctgtcgtccagaatctcgcccacccgccagaagtcgtgttgacagatttccagaccctggatggaagccagtacaacccggtcaaacagcagctagtgcgttacgccaccagctgttacagctgttgtccgcgactggcctcggtgctgctatactccgattatgggataggagaagtgcccgtggagcccctggatgtccccttaccctccacgatcag

SEQ ID NO: 120304 - DNA, 570 bp, Homo sapiens
  Payload ID: 3580
  Gene Symbol: COASY
  Gene Name: CoA synthase
  ENST ID: ENST00000585909
  CDS Start-End: 276-570
gcggtttctccgttagtgcttccgggttgcagccagggaagcctccgcggtggtgcaagtggaacccaagccttgaggtttcagtgagtagggggccgacgtgagctttagcgtccccctttagcctccctcttcgattccttgaagaccctggtgcagcttagcaagagggcccaggatttttggatccccagccctgtgacaagggttcctgtccagtttccccctcccaggatttcgactcagttcagcgaagtcaccgccccgtctgagaaatgaggacaccaaggcttagagcacagccccgaggcgccgtctaccaggccccgtcccctcccccggctcctgtcggcctgggcagcatggccgtattccggtcgggtctcctggtgctgacgacgccgctggcctccctagcccctcgcctggcctccatcctgacctcggcggcccggctggtgaatcacacactctatgttcacctgcagccgggcatgagcctggagggcccggctcagccccagtccagccccgtgcaggccacgtttgaggttcttgatttcatcacgc

SEQ ID NO: 120305 - DNA, 994 bp, Homo sapiens
  Payload ID: 3580
  Gene Symbol: COASY
  Gene Name: CoA synthase
  ENST ID: ENST00000591779
  CDS Start-End: 648-994
gttagtgcttccgggttgcagccagggaagcctccgcggtggtgcaagtggaacccaagccttgaggtttcatccagaatctcgcccacccgccagaagtcgtgttgacagatttccagaccctggatggaagccagtacaacccggtcaaacagcagctagtgcgttacgccaccagctgttacagctgttgtccgcgactggcctcggtgctgctatactccgattatgggataggagaagtgcccgtggagcccctggatgtccccttaccctccacgatcaggccagcttcccccgtggccgggtctccaaagcagccggtgcgtggctactaccgtggcgctgtcggtggcacgtttgaccgcctgcacaacgcccacaaggtgttgctcagtgtcgcgtgcatcctggcccaggagcagcttgtggtgggagtagcagacaaagatctgttgaagagcaagttgctccctgagctgctccaaccttatacagaacgtgtggaacatctgagtgaattcctggtggacatcaagccctccttgacttttgatgtcatccccctgctggacccctatgggcccgctggctctgacccctccctggagttcctggtggtcagcgaggagacctatcgtggggggatggccatcaaccgcttccgccttgagaatgacctggaggaacttgctttgtaccagatccagctgctgaaggacctcagacatacagagaatgaagaggacaaagtcagctcctccagcttccgccagcgaatgttggggaacctgcttcggcctccatatgaaaggccagagctccccacatgtctctatgtaattgggctgactggcatcagtggctctgggaagagctcaatagctcagcgactgaagggcctgggggcgtttgtcattgacagtgaccacctgggtcatcgggcctatgccccaggtggccctgcctaccagcctgtggtggaggcctttgg

SEQ ID NO: 120306 - DNA, 539 bp, Homo sapiens
  Payload ID: 3580
  Gene Symbol: COASY
  Gene Name: CoA synthase
  ENST ID: ENST00000587214
  CDS Start-End: 98-539
agtgcttccgggttgcagccagggaagcctccgcggtggtgcaagtggaacccaagccttgaggtttcagtgagtagggggccgacgcctgggcagcatggccgtattccggtcgggtctcctggtgctgacgacgccgctggcctccctagcccctcgcctggcctccatcctgacctcggcggcccggctggtgaatcacacactctatgttcacctgcagccgggcatgagcctggagggcccggctcagccccagtccagccccgtgcaggccacgtttgaggttcttgatttcatcacgcacctctatgctggcgccgacgtccacaggcacttggacgtcagaatcctactgaccaatatccgaaccaagagcacctttctccctcccctgcccacctcagtccagaatctcgcccacccgccagaagtcgtgttgacagatttccagaccctggatggaagccagtacaacccggtcaaacagcagctagtgcgttacgccaccagctgttacagctgttgtccgcgactgg

SEQ ID NO: 120307 - DNA, 569 bp, Homo sapiens
  Payload ID: 3580
  Gene Symbol: COASY
  Gene Name: CoA synthase
  ENST ID: ENST00000587858
  CDS Start-End: 186-569
agtgcttccgggttgcagccagggaagcctccgcggtggtgcaagtggaacccaagccttgaggtttcacttagcaagagggcccaggatttttggatccccagccctgtgacaagggttcctgtccagtttccccctcccaggatttcgactcagttcagcgaagtcaccgccccgtctgagaaatgaggacaccaaggcttagagcacagccccgaggcgccgtctaccaggccccgtcccctcccccggctcctgtcggcctgggcagcatggccgtattccggtcgggtctcctggtgctgacgacgccgctggcctccctagcccctcgcctggcctccatcctgacctcggcggcccggctggtgaatcacacactctatgttcacctgcagccgggcatgagcctggagggcccggctcagccccagtccagccccgtgcaggccacgtttgaggttcttgatttcatcacgcacctctatgctggcgccgacgtccacaggcacttggacgtcagaatcctactgaccaatatccgaaccaagagcacctttctccctccc

SEQ ID NO: 120308 - DNA, 3330 bp, Homo sapiens
  Payload ID: 3581
  Gene Symbol: CARM1
  Gene Name: coactivator-associated arginine methyltransferase 1
  Uniprot ID: Q86X55
  ENST ID: ENST00000327064
  CDS Start-End: 191-2017
aggcggcgcgtggccggcaggcggcgctgcccggctcggcctcggcctgcacggcggctgcggcggcggtagcggcagcggcggcggcggcggcggcggcggcggcggcggcggcggcggcggcggcagcggcggcggcctgggcccgggcgcagcggcggcggcggcggggcctggagccggatctaagatggcagcggcggcggcggcggtggggccgggcgcgggcggcgcggggtcggcggtcccgggcggcgcggggccctgcgctaccgtgtcggtgttccccggcgcccgcctcctcaccatcggcgacgcgaacggcgagatccagcggcacgcggagcagcaggcgctgcgcctcgaggtgcgcgccggcccggactcggcgggcatcgccctctacagccatgaagatgtgtgtgtctttaagtgctcagtgtcccgagagacagagtgcagccgtgtgggcaagcagtccttcatcatcaccctgggctgcaacagcgtcctcatccagttcgccacacccaacgatttctgttccttctacaacatcctgaaaacctgccggggccacaccctggagcggtctgtgttcagcgagcggacggaggagtcttctgccgtgcagtacttccagttttatggctacctgtcccagcagcagaacatgatgcaggactacgtgcggacaggcacctaccagcgcgccatcctgcaaaaccacaccgacttcaaggacaagatcgttcttgatgttggctgtggctctgggatcctgtcgttttttgccgcccaagctggagcacggaaaatctacgcggtggaggccagcaccatggcccagcacgctgaggtcttggtgaagagtaacaacctgacggaccgcatcgtggtcatcccgggcaaggtggaggaggtgtcactccccgagcaggtggacatcatcatctcggagcccatgggctacatgctcttcaacgagcgcatgctggagagctacctccacgccaagaagtacctgaagcccagcggaaacatgtttcctaccattggtgacgtccaccttgcacccttcacggatgaacagctctacatggagcagttcaccaaggccaacttctggtaccagccatctttccatggagtggacctgtcggccctccgaggtgccgcggtggatgagtatttccggcagcctgtggtggacacatttgacatccggatcctgatggccaagtctgtcaagtacacggtgaacttcttagaagccaaagaaggagatttgcacaggatagaaatcccattcaaattccacatgctgcattcagggctggtccacggcctggctttctggtttgacgttgctttcatcggctccataatgaccgtgtggctgtccacagccccgacagagcccctgacccactggtaccaggtgcggtgcctgttccagtcaccactgttcgccaaggcaggggacacgctctcagggacatgtctgcttattgccaacaaaagacagagctacgacatcagtattgtggcccaggtggaccagaccggctccaagtccagtaacctcctggatctgaaaaaccccttctttagatacacgggcacaacgccctcacccccacccggctcccactacacatctccctcggaaaacatgtggaacacgggcagcacctacaacctcagcagcgggatggccgtggcagggatgccgaccgcctatgacttgagcagtgttattgccagtggctccagcgtgggccacaacaacctgattcctttagccaacacggggattgtcaatcacacccactcccggatgggctccataatgagcacggggattgtccaagggtcctccggcgcccagggcagtggtggtggcagcacgagtgcccactatgcagtcaacagccagttcaccatgggcggccccgccatctccatggcgtcgcccatgtccatcccgaccaacaccatgcactacgggagctaggggcccgccccgcggactgacagcaccaggaaaccaaatgatgtccctgcccgccgcccccgccgggcggctttcccccttgtactggagaagctcgaacacccggtcacagctctctttgctatgggaactgggacacttttttacacgatgttgccgccgtccccaccctaacccccacctcccggccctgagcgtgtgtcgctgccatattttacacaaaatcatgttgtgggagccctcgtcccccctcctgcccgctctaccctgacctgggcttgtcatctgctggaacaggcgccatggggcctgccagccctgcctgccaggtcccttagcacctgtccccctgcctgtctccagtgggaaggtagcctggccaggcggggcctccccttcgacgaccaggcctcggtcacaacggacgtgacatgctgctttttttaattttatttttttatgaaaagaaccagtgtcaatccgcagaccctctgtgaagccaggccggccgggccgagccagcagcccctctccctagactcagaggcgccgcggggaggggtggccccgccgaggcttcaggggccccctccccaccaaagggttcacctcacacttgaatgtacaacccaccccactgtcgggaaggcctccgtcctcggcccctgcctcttgctgctgtcctgtccccgagcccctgcaggtccccccccgcccccccactcaagagttagagcaggtggctgcaggccttgggcccggagggaaggccactgccggccacttggggcagacacagacacctcaaggatctgtcacggaaggcgtcctttttccttgtagctaacgttaggcctgagtagctcccctccatccttgtagacgctccagtccctactactgtgacggcatttccatccctcccctgcccgggaagggaccttgcagggacctctccctccaaaaaaagaaaaaaagaaaaagaaagaaaaaataaatgaggaaacgtgttgcagcacaggcagttttcttctccttctgctcccctgtttctcatacccccaaactcagatgctggagctcaggcccgccgtgtgtgcacccaggcaggagcgggcgctgtccaggctgggccgcccccttggctctccctcctgttccaggggagccataggagggaaagcaggtggcccgggggggatatgggggccccagccctgtcccaaagctccctgctcggctgcccctcgcccgcctttatataaattctctgaatcacctttgcatagaaaataaaagtgtttgctttgtaa

SEQ ID NO: 120309 - DNA, 2722 bp, Homo sapiens
  Payload ID: 3581
  Gene Symbol: CARM1
  Gene Name: coactivator-associated arginine methyltransferase 1
  Uniprot ID: Q86X55
  ENST ID: ENST00000344150
  CDS Start-End: 1-1758
atggcagcggcggcggcggcggtggggccgggcgcgggcggcgcggggtcggcggtcccgggcggcgcggggccctgcgctaccgtgtcggtgttccccggcgcccgcctcctcaccatcggcgacgcgaacggcgagatccagcggcacgcggagcagcaggcgctgcgcctcgaggtgcgcgccggcccggactcggcgggcatcgccctctacagccatgaagatgtgtgtgtctttaagtgctcagtgtcccgagagacagagtgcagccgtgtgggcaagcagtccttcatcatcaccctgggctgcaacagcgtcctcatccagttcgccacacccaacgatttctgttccttctacaacatcctgaaaacctgccggggccacaccctggagcggtctgtgttcagcgagcggacggaggagtcttctgccgtgcagtacttccagttttatggctacctgtcccagcagcagaacatgatgcaggactacgtgcggacaggcacctaccagcgcgccatcctgcaaaaccacaccgacttcaaggacaagatcgttcttgatgttggctgtggctctgggatcctgtcgttttttgccgcccaagctggagcacggaaaatctacgcggtggaggccagcaccatggcccagcacgctgaggtcttggtgaagagtaacaacctgacggaccgcatcgtggtcatcccgggcaaggtggaggaggtgtcactccccgagcaggtggacatcatcatctcggagcccatgggctacatgctcttcaacgagcgcatgctggagagctacctccacgccaagaagtacctgaagcccagcggaaacatgtttcctaccattggtgacgtccaccttgcacccttcacggatgaacagctctacatggagcagttcaccaaggccaacttctggtaccagccatctttccatggagtggacctgtcggccctccgaggtgccgcggtggatgagtatttccggcagcctgtggtggacacatttgacatccggatcctgatggccaagtctgtcaagtacacggtgaacttcttagaagccaaagaaggagatttgcacaggatagaaatcccattcaaattccacatgctgcattcagggctggtccacggcctggctttctggtttgacgttgctttcatcggctccataatgaccgtgtggctgtccacagccccgacagagcccctgacccactggtaccaggtgcggtgcctgttccagtcaccactgttcgccaaggcaggggacacgctctcagggacatgtctgcttattgccaacaaaagacagagctacgacatcagtattgtggcccaggtggaccagaccggctccaagtccagtaacctcctggatctgaaaaaccccttctttagatacacgggcacaacgccctcacccccacccggctcccactacacatctccctcggaaaacatgtggaacacgggcagcacctacaacctcagcagcgggatggccgtggcagggatgccgaccgcctatgacttgagcagtgttattgccagtggctccagcgtgggccacaacaacctgattcctttagggtcctccggcgcccagggcagtggtggtggcagcacgagtgcccactatgcagtcaacagccagttcaccatgggcggccccgccatctccatggcgtcgcccatgtccatcccgaccaacaccatgcactacgggagctaggggcccgccccgcggactgacagcaccaggaaaccaaatgatgtccctgcccgccgcccccgccgggcggctttcccccttgtactggagaagctcgaacacccggtcacagctctctttgctatgggaactgggacacttttttacacgatgttgccgccgtccccaccctaacccccacctcccggccctgagcgtgtgtcgctgccatattttacacaaaatcatgttgtgggagccctcgtcccccctcctgcccgctctaccctgacctgggcttgtcatctgctggaacaggcgccatggggcctgccagccctgcctgccaggtcccttagcacctgtccccctgcctgtctccagtgggaaggtagcctggccaggcggggcctccccttcgacgaccaggcctcggtcacaacggacgtgacatgctgctttttttaattttatttttttatgaaaagaaccagtgtcaatccgcagaccctctgtgaagccaggccggccgggccgagccagcagcccctctccctagactcagaggcgccgcggggaggggtggccccgccgaggcttcaggggccccctccccaccaaagggttcacctcacacttgaatgtacaacccaccccactgtcgggaaggcctccgtcctcggcccctgcctcttgctgctgtcctgtccccgagcccctgcaggtccccccccgcccccccactcaagagttagagcaggtggctgcaggccttgggcccggagggaaggccactgccggccacttggggcagacacagacacctcaaggatctgtcacggaaggcgtcctttttccttgtagctaacgttaggcctgagtagctcccctccatccttgtagacgctccagtccctactactgtgacggcatttccatccctcccctgcccgggaagggaccttgcagggacctctccctccaa

SEQ ID NO: 120310 - DNA, 596 bp, Homo sapiens
  Payload ID: 3581
  Gene Symbol: CARM1
  Gene Name: coactivator-associated arginine methyltransferase 1
  ENST ID: ENST00000590039
  CDS Start-End: 1-336
gcggagcagcaggcgctgcgcctcgaggtgcgcgccggcccggactcggcgggcatcgccctctacagccatgaagatgtgtgtgtctttaagtgctcagtgtcccgagagacagagtgcagccgtgtgggcaagcagtccttcatcatcaccctgggctgcaacagcgtcctcatccagttcgccacacccaacgatttctgttccttctacaacatcctgaaaacctgccggggccacaccctggagcggtctgtgttcagcgagcggacggaggagtcttctgccgtgcagtacttccagatgagaaaactgaggctcagagaggttaagtgacttgctccaagtcacacagctatatgcaacagagccaagatgggaagccaggtctgcctgatgccaaagtctgtgcccctgcccagttttatggctacctgtcccagcagcagaacatgatgcaggactacgtgcggacaggcacctaccagcgcgccatcctgcaaaaccacaccgacttcaaggacaagatcgttcttgatgttggctgtggctctgggatcctgtcgttttttgccgcccaagctggagcacggaaa

SEQ ID NO: 120311 - DNA, 468 bp, Homo sapiens
  Payload ID: 3581
  Gene Symbol: CARM1
  Gene Name: coactivator-associated arginine methyltransferase 1
  ENST ID: ENST00000588947
  CDS Start-End: 108-468
gcggcggcggcggcggcggcggcggcggcggcggcggcggcggcagcggcggcggcctgggcccgggcgcagcggcggcggcggcggggcctggagccggatctaagatggcagcggcggcggcggcggtggggccgggcgcgggcggcgcggggtcggcggtcccgggcggcgcggggccctgcgctaccgtgtcggtgttccccggcgcccgcctcctcaccatcggcgacgcgaacggcgagatccagcggcacgcggagcagcaggcgctgcgcctcgaggtgcgcgccggcccggactcggcgggcatcgccctctacagccatttctgttccttctacaacatcctgaaaacctgccggggccacaccctggagcggtctgtgttcagcgagcggacggaggagtcttctgccgtgcagtacttccagttttatggctacctgtcccagcagcagaacatga

SEQ ID NO: 120312 - DNA, 2240 bp, Homo sapiens
  Payload ID: 3581
  Gene Symbol: CARM1
  Gene Name: coactivator-associated arginine methyltransferase 1
  ENST ID: ENST00000590699
  CDS Start-End: 31-516
gcggcggcggggcctggagccggatctaagatggcagcggcggcggcggcggtggggccgggcgcgggcggcgcggggtcggcggtcccgggcggcgcggggccctgcgctaccgtgtcggtgttccccggcgcccgcctcctcaccatcggcgacgcgaacggcgagatccagcggcacgcggagcagcaggcgctgcgcctcgaggtgcgcgccggcccggactcggcgggcatcgccctctacagccatgaagatgtgtgtgtctttaagtgctcagtgtcccgagagacagagtgcagccgtgtgggcaagcagtccttcatcatcaccctgggctgcaacagcgtcctcatccagttcgccacacccaacgatttctgttccttctacaacatcctgaaaacctgccggggccacaccctggagcggtctgtgttcagcgagcggacggaggagtcttctgccgtgcagtacttccagatgagaaaactgaggctcagagaggttaagtgacttgctccaagtcacacagctatatgcaacagagccaagatgggaagccaggtctgcctgatgccaaagtctgtgcccctgcccaggtgccacgctgcctcccgatcgcccgttgtcttacagagagacaccacacctcacctgcctggcgctctgagttctaggttttatggctacctgtcccagcagcagaacatgatgcaggactacgtgcggacaggcacctaccagcgcgccatcctgcaaaaccacaccgacttcaaggacaagatcgttcttgatgttggctgtggctctgggatcctgtcgttttttgccgcccaagctggagcacggaaaatctacgcggtggaggccagcaccatggcccagcacgctgaggtcttggtgaagagtaacaacctgacggaccgcatcgtggtcatcccgggcaaggtggaggaggtgtcactccccgagcaggtggacatcatcatctcggagcccatgggctacatgctcttcaacgagcgcatgctggagagctacctccacgccaagaagtacctgaagcccagcggaaacatgtttcctaccattggtgacgtccaccttgcacccttcacggatgaacagctctacatggagcagttcaccaaggccaacttctggtaccagccatctttccatggagtggacctgtcggccctccgaggtgccgcggtggatgagtatttccggcagcctgtggtggacacatttgacatccggatcctgatggccaagtctgtcaagtacacggtgaacttcttagaagccaaagaaggagatttgcacaggatagaaatcccattcaaattccacatgctgcattcagggctggtccacggcctggctttctggtttgacgttgctttcatcggctccataatgaccgtgtggctgtccacagccccgacagagcccctgacccactggtaccaggtgcggtgcctgttccagtcaccactgttcgccaaggcaggggacacgctctcagggacatgtctgcttattgccaacaaaagacagagctacgacatcagtattgtggcccaggtggaccagaccggctccaagtccagtaacctcctggatctgaaaaaccccttctttagatacacgggcacaacgccctcacccccacccggctcccactacacatctccctcggaaaacatgtggaacacgggcagcacctacaacctcagcagcgggatggccgtggcagggatgccgaccgcctatgacttgagcagtgttattgccagtggctccagcgtgggccacaacaacctgattcctttagccaacacggggattgtcaatcacacccactcccggatgggctccataatgagcacggggattgtccaaggtaacgagggtggcgggggcagggcccgtgggggccgagctagcgtgtgagtcgccatcctctgtccggccgcccgcctgccctcttgcctgccctttctctctctctgtgactctgcctgggggctgggcgggccagggcagcccctcactgccattgcctgctccacagggtcctccggcgcccagggcagtggtggtggcagcacgagtgcccactatgcagtcaacagccagttcaccatgggcggccccgccatctccatggcgtcgcccatgtccatcccgaccaacaccatgcactacgggagctaggggcccgccccgcg

SEQ ID NO: 120313 - DNA, 2766 bp, Homo sapiens
  Payload ID: 3581
  Gene Symbol: CARM1
  Gene Name: coactivator-associated arginine methyltransferase 1
  ENST ID: ENST00000586221
  CDS Start-End: 1-1030
cgcgaacggcgagatccagcggcacgcggagcagcaggcgctgcgcctcgaggtgcgcgccggcccggactcggcgggcatcgccctctacagccatgaagatgtgtgtgtctttaagtgctcagtgtcccgagagacagagtgcagccgtgtgggcaagcagtccttcatcatcaccctgggctgcaacagcgtcctcatccagttcgccacacccaacgatttctgttccttctacaacatcctgaaaacctgccggggccacaccctggagcggtctgtgttcagcgagcggacggaggagtcttctgccgtgcagtacttccagttttatggctacctgtcccagcagcagaacatgatgcaggactacgtgcggacaggcacctaccagcgcgccatcctgcaaaaccacaccgacttcaaggacaagatcgttcttgatgttggctgtggctctgggatcctgtcgttttttgccgcccaagctggagcacggaaaatctacgcggtggaggccagcaccatggcccagcacgctgaggtcttggtgaagagtaacaacctgacggaccgcatcgtggtcatcccgggcaaggtggaggaggtgtcactccccgagcaggtggacatcatcatctcggagcccatgggctacatgctcttcaacgagcgcatgctggagagctacctccacgccaagaagtacctgaagcccagcggaaacatgtttcctaccattggtgacgtccaccttgcacccttcacggatgaacagctctacatggagcagttcaccaaggccaacttctggtaccagccatctttccatggagtggacctgtcggccctccgaggtgccgcggtggatgagtatttccggcagcctgtggtggacacatttgacatccggatcctgatggccaagtctgtcaagtacacggtgaacttcttagaagccaaagaaggagatttgcacagcgcctgtctggcttccccagcagccactgccctttgccttccaggatagaaatcccattcaaattccacatgctgcattcagggctggtccacggcctggctttctggtttgacgttgctttcatcggctccataatgaccgtgtggctgtccacagccccgacagagcccctgacccactggtaccaggtgcggtgcctgttccagtcaccactgttcgccaaggcaggggacacgctctcagggacatgtctgcttattgccaacaaaagacagagctacgacatcagtattgtggcccaggtggaccagaccggctccaagtccagtaacctcctggatctgaaaaaccccttctttagatacacgggcacaacgccctcacccccacccggctcccactacacatctccctcggaaaacatgtggaacacgggcagcacctacaacctcagcagcgggatggccgtggcagggatgccgaccgcctatgacttgagcagtgttattgccagtggctccagcgtgggccacaacaacctgattcctttagccaacacggggattgtcaatcacacccactcccggatgggctccataatgagcacggggattgtccaagggtcctccggcgcccagggcagtggtggtggcagcacgagtgcccactatgcagtcaacagccagttcaccatgggcggccccgccatctccatggcgtcgcccatgtccatcccgaccaacaccatgcactacgggagctaggggcccgccccgcggactgacagcaccaggaaaccaaatgatgtccctgcccgccgcccccgccgggcggctttcccccttgtactggagaagctcgaacacccggtcacagctctctttgctatgggaactgggacacttttttacacgatgttgccgccgtccccaccctaacccccacctcccggccctgagcgtgtgtcgctgccatattttacacaaaatcatgttgtgggagccctcgtcccccctcctgcccgctctaccctgacctgggcttgtcatctgctggaacaggcgccatggggcctgccagccctgcctgccaggtcccttagcacctgtccccctgcctgtctccagtgggaaggtagcctggccaggcggggcctccccttcgacgaccaggcctcggtcacaacggacgtgacatgctgctttttttaattttatttttttatgaaaagaaccagtgtcaatccgcagaccctctgtgaagccaggccggccgggccgagccagcagcccctctccctagactcagaggcgccgcggggaggggtggccccgccgaggcttcaggggccccctccccaccaaagggttcacctcacacttgaatgtacaacccaccccactgtcgggaaggcctccgtcctcggcccctgcctcttgctgctgtcctgtccccgagcccctgcaggtccccccccgcccccccactcaagagttagagcaggtggctgcaggccttgggcccggagggaaggccactgccggccacttggggcagacacagacacctcaaggatctgtcacggaaggcgtcctttttccttgtagctaacgttaggcctgagtagctcccctccatccttgtagacgctccagtccctactactgtgacggcatttccatccctcccctgcccgggaagggaccttgcagggacctctccctccaaaaaaagaaaaaaagaaaaagaaagaaaaaataaatgaggaaacgtgttgcagcaca

SEQ ID NO: 120314 - DNA, 674 bp, Homo sapiens
  Payload ID: 3581
  Gene Symbol: CARM1
  Gene Name: coactivator-associated arginine methyltransferase 1
  ENST ID: ENST00000586298
  CDS Start-End: 1-531
ctggctttctggtttgacgttgctttcatcggctccatacagagctacgacatcagtattgtggcccaggtggaccagaccggctccaagtccagtaacctcctggatctgaaaaaccccttctttagatacacgggcacaacgccctcacccccacccggctcccactacacatctccctcggaaaacatgtggaacacgggcagcacctacaacctcagcagcgggatggccgtggcagggatgccgaccgcctatgacttgagcagtgttattgccagtggctccagcgtgggccacaacaacctgattcctttagccaacacggggattgtcaatcacacccactcccggatgggctccataatgagcacggggattgtccaagggtcctccggcgcccagggcagtggtggtggcagcacgagtgcccactatgcagtcaacagccagttcaccatgggcggccccgccatctccatggcgtcgcccatgtccatcccgaccaacaccatgcactacgggagctaggggcccgccccgcggactgacagcaccaggaaaccaaatgatgtccctgcccgccgcccccgccgggcggctttcccccttgtactggagaagctcgaacacccggtcacagctctctttgctatgggaactgggacactttt

SEQ ID NO: 120315 - DNA, 601 bp, Homo sapiens
  Payload ID: 3581
  Gene Symbol: CARM1
  Gene Name: coactivator-associated arginine methyltransferase 1
  ENST ID: ENST00000589693
  CDS Start-End: 1-279
gccctctacagccatgaagatgtgtgtgtctttaagtgctcagtgtcccgagagacagagtgcagccgtgtgggcaagcagtccttcatcatcaccctgggctgcaacagcgtcctcatccagttcgccacacccaacgatttctgttccttctacaacatcctgaaaacctgccggggccacaccctggagcggtctgtgttcagcgagcggacggaggagtcttctgccgtgcagtacttccagatgagaaaactgaggctcagagaggttaagtgacttgctccaagtcacacagctatatgcaacagagccaagatgggaagccagttttatggctacctgtcccagcagcagaacatgatgcaggactacgtgcggacaggcacctaccagcgcgccatcctgcaaaaccacaccgacttcaaggacaagatcgttcttgatgttggctgtggctctgggatcctgtcgttttttgccgcccaagctggagcacggaaaatctacgcggtggaggccagcaccatggcccagcacgctgaggtcttggtgaagagtaacaacctgacggaccgcatcgtggtcatcccgggcaagg

SEQ ID NO: 120316 - DNA, 1843 bp, Homo sapiens
  Payload ID: 3582
  Gene Symbol: COTL1
  Gene Name: coactosin-like F-actin binding protein 1
  Uniprot ID: Q14019
  ENST ID: ENST00000262428
  CDS Start-End: 164-592
gtggaagccgccgccgcgctcgcagcttgcaggcgccgcgtagccgtcgccaccgccgccagcccgtgcgccctcggcgcgtacccgccgcgctcccatccccgccgccggccaggggcgcgctcggccgccccggacagtgtcccgctgcggctccgcggcgatggccaccaagatcgacaaagaggcttgccgggcggcgtacaacctggtgcgcgacgacggctcggccgtcatctgggtgacttttaaatatgacggctccaccatcgtccccggcgagcagggagcggagtaccagcacttcatccagcagtgcacagatgacgtccggttgtttgccttcgtgcgcttcaccaccggggatgccatgagcaagaggtccaagtttgccctcatcacgtggatcggtgagaacgtcagcgggctgcagcgcgccaaaaccgggacggacaagaccctggtgaaggaggtcgtacagaatttcgctaaggagtttgtgatcagtgatcggaaggagctggaggaagatttcatcaagagcgagctgaagaaggcggggggagccaattacgacgcccagacggagtaaccccagcccccgccacaccaccccttgccaaagtcatctgcctgctccccgggggagaggaccgccggcctcagctactagcccaccagcccaccagggagaaaagaagccatgagaggcagcgcccgccaccctgtgtccacagcccccaccttcccgcttcccttagaaccctgccgtgtcctatctcatgacgctcatggaacctctttctttgatcttctttttcttttctccccctcttttttgttctaaagaaaagtcattttgatgcaaggtcctgcctgccatcagatccgaggtgcctcctgcagtgaccccttttcctggcatttctcttccacgcgacgaggtctgcctagtgagatctgcatgacctcacgttgctttccagagcccgggcctattttgccatctcagttttcctggaccctgcttcctgtgtaccactgaggggcagctgggccaggagctgtgcccggtgcctgcagccttcataagcacacacgtccattccctactaaggcccagacctcctggtatctgccccgggctccctcatcccacctccatccggagttgcctaagatgcatgtccagcataggcaggattgctcggtggtgagaaggttaggtccggctcagactgaataagaagagataaaatttgccttaaaacttacctggcagtggctttgctgcacggtctgaaaccacctgttcccaccctcttgaccgaaatttccttgtgacacagagaagggcaaaggtctgagcccagagttgacggagggagtatttcagggttcacttcaggggctcccaaagcgacaagatcgttagggagagaggcccagggtggggactgggaatttaaggagagctgggaacggatcccttaggttcaggaagcttctgtgtaagctgcgaggatggcttgggccgaagggttgctctgcccgccgcgctagctgtgagctgagcaaagccctgggctcacagcaccccaaaagcctgtggcttcagtcctgcgtctgcaccacacattcaaaaggatcgttttgttttgtttttaaagaaaggtgagattggcttggttcttcatgagcacatttgatatagctctttttctgtttttccttgctcatttcgttttggggaagaaatctgtactgtattgggattgtaaagaacatctctgcactcagacagtttacagaaataaatgttttttttgtttttcagaaaaca

SEQ ID NO: 120317 - DNA, 1677 bp, Homo sapiens
  Payload ID: 3582
  Gene Symbol: COTL1
  Gene Name: coactosin-like F-actin binding protein 1
  ENST ID: ENST00000564057
  CDS Start-End: 270-491
ctcgcagcttgcaggcgccgcgtagccgtcgccaccgccgccagcccgtgcgccctcggcgcgtacccgccgcgctcccatccccgccgccggccaggggcgcgctcggccgccccggacagtgtcccgctgcggctccgcggcgatggccaccaagatcgacaaagaggcttgccgggcggcgtacaacctggtgcgcgacgacggctcggccgtcatctgatgacgtccggttgtttgccttcgtgcgcttcaccaccggggatgccatgagcaagaggtccaagtttgccctcatcacgtggatcggtgagaacgtcagcgggctgcagcgcgccaaaaccgggacggacaagaccctggtgaaggaggtcgtacagaatttcgctaaggagtttgtgatcagtgatcggaaggagctggaggaagatttcatcaagagcgagctgaagaaggcggggggagccaattacgacgcccagacggagtaaccccagcccccgccacaccaccccttgccaaagtcatctgcctgctccccgggggagaggaccgccggcctcagctactagcccaccagcccaccagggagaaaagaagccatgagaggcagcgcccgccaccctgtgtccacagcccccaccttcccgcttcccttagaaccctgccgtgtcctatctcatgacgctcatggaacctctttctttgatcttctttttcttttctccccctcttttttgttctaaagaaaagtcattttgatgcaaggtcctgcctgccatcagatccgaggtgcctcctgcagtgaccccttttcctggcatttctcttccacgcgacgaggtctgcctagtgagatctgcatgacctcacgttgctttccagagcccgggcctattttgccatctcagttttcctggaccctgcttcctgtgtaccactgaggggcagctgggccaggagctgtgcccggtgcctgcagccttcataagcacacacgtccattccctactaaggcccagacctcctggtatctgccccgggctccctcatcccacctccatccggagttgcctaagatgcatgtccagcataggcaggattgctcggtggtgagaaggttaggtccggctcagactgaataagaagagataaaatttgccttaaaacttacctggcagtggctttgctgcacggtctgaaaccacctgttcccaccctcttgaccgaaatttccttgtgacacagagaagggcaaaggtctgagcccagagttgacggagggagtatttcagggttcacttcaggggctcccaaagcgacaagatcgttagggagagaggcccagggtggggactgggaatttaaggagagctgggaacggatcccttaggttcaggaagcttctgtgtaagctgcgaggatggcttgggccgaagggttgctctgcccgccgcgctagctgtgagctgagcaaagccctgggctcacagcaccccaaaagcctgtggcttcagtcctgcgtctgcaccacacattcaaaaggatcgttttgttttgtttttaaagaaaggtgagattggcttggttcttcatgagcacatttgatatagctctttttctgtttttccttgctcatttcgttttggggaagaaatctgtactgtattgggattg

SEQ ID NO: 120318 - DNA, 531 bp, Homo sapiens
  Payload ID: 3582
  Gene Symbol: COTL1
  Gene Name: coactosin-like F-actin binding protein 1
  ENST ID: ENST00000567786
  CDS Start-End: 1-145
caccatcgtccccggcgagcagggagcggagtaccagcacttcatccagcagtgcacaggctggagtgcagtggtacaatctcagctaactgcaacctccgtctcccgggttcaagagattctcctgcctcagcctcctgagtagctgggattacaggcgcccacgaccacgcctggctaattttttgtaattttagtagagatggggttttcaccattttggccaggctggtctctaacttctgaccttaggtgatctgcccaccttggcctctcaaagtgctgggattacaggcgtgagccactgcgcccggccgacggtgtgggttcgaatccctgaacggctgcttcctggctgtgtggtttggaacgagttccttaatctctgggggtcttggtttcctcacctgcactctcacagtgctgttgcgaggataagtgagtcagtatgtataaaatgctcagaacagtgcctgtacaagctacatgattgtttgcgaaataaataaaaagtacaaaattgtgccaggg

SEQ ID NO: 120319 - DNA, 2023 bp, Homo sapiens
  Payload ID: 3583
  Gene Symbol: F2
  Gene Name: coagulation factor II (thrombin)
  Uniprot ID: P00734
  ENST ID: ENST00000311907
  CDS Start-End: 57-1925
ttaacccagaggggtcaggacagacaattcctcagtgacccaggagctgacacactatggcgcacgtccgaggcttgcagctgcctggctgcctggccctggctgccctgtgtagccttgtgcacagccagcatgtgttcctggctcctcagcaagcacggtcgctgctccagcgggtccggcgagccaacaccttcttggaggaggtgcgcaagggcaacctggagcgagagtgcgtggaggagacgtgcagctacgaggaggccttcgaggctctggagtcctccacggctacggatgtgttctgggccaagtacacagcttgtgagacagcgaggacgcctcgagataagcttgctgcatgtctggaaggtaactgtgctgagggtctgggtacgaactaccgagggcatgtgaacatcacccggtcaggcattgagtgccagctatggaggagtcgctacccacataagcctgaaatcaactccactacccatcctggggccgacctacaggagaatttctgccgcaaccccgacagcagcaccacgggaccctggtgctacactacagaccccaccgtgaggaggcaggaatgcagcatccctgtctgtggccaggatcaagtcactgtagcgatgactccacgctccgaaggctccagtgtgaatctgtcacctccattggagcagtgtgtccctgatcgggggcagcagtaccaggggcgcctggcggtgaccacacatgggctcccctgcctggcctgggccagcgcacaggccaaggccctgagcaagcaccaggacttcaactcagctgtgcagctggtggagaacttctgccgcaacccagacggggatgaggagggcgtgtggtgctatgtggccgggaagcctggcgactttgggtactgcgacctcaactattgtgaggaggccgtggaggaggagacaggagatgggctggatgaggactcagacagggccatcgaagggcgtaccgccaccagtgagtaccagactttcttcaatccgaggacctttggctcgggagaggcagactgtgggctgcgacctctgttcgagaagaagtcgctggaggacaaaaccgaaagagagctcctggaatcctacatcgacgggcgcattgtggagggctcggatgcagagatcggcatgtcaccttggcaggtgatgcttttccggaagagtccccaggagctgctgtgtggggccagcctcatcagtgaccgctgggtcctcaccgccgcccactgcctcctgtacccgccctgggacaagaacttcaccgagaatgaccttctggtgcgcattggcaagcactcccgcaccaggtacgagcgaaacattgaaaagatatccatgttggaaaagatctacatccaccccaggtacaactggcgggagaacctggaccgggacattgccctgatgaagctgaagaagcctgttgccttcagtgactacattcaccctgtgtgtctgcccgacagggagacggcagccagcttgctccaggctggatacaaggggcgggtgacaggctggggcaacctgaaggagacgtggacagccaacgttggtaaggggcagcccagtgtcctgcaggtggtgaacctgcccattgtggagcggccggtctgcaaggactccacccggatccgcatcactgacaacatgttctgtgctggttacaagcctgatgaagggaaacgaggggatgcctgtgaaggtgacagtgggggaccctttgtcatgaagagcccctttaacaaccgctggtatcaaatgggcatcgtctcatggggtgaaggctgtgaccgggatgggaaatatggcttctacacacatgtgttccgcctgaagaagtggatacagaaggtcattgatcagtttggagagtagggggccactcatattctgggctcctggaaccaatcccgtgaaagaattatttttgtgtttctaaaactatggttcccaataaaagtgactctcagcga

SEQ ID NO: 120320 - DNA, 1031 bp, Homo sapiens
  Payload ID: 3583
  Gene Symbol: F2
  Gene Name: coagulation factor II (thrombin)
  ENST ID: ENST00000442468
  CDS Start-End: 59-1031
agcatggtaagggagtgcttgcaggctggaacaggctggaggactggggtgtgggcccatgggctggggtctcctggctggacagagcacacagagctggcccctaatgttcctggctcctcagcaagcacggtcgctgctccagcgggtccggcgagccaacaccttcttggaggaggtgcgcaagggcaacctggagcgagagtgcgtggaggagacgtgcagctacgaggaggccttcgaggctctggagtcctccacggctacggatgtgttctgggccaagtacacagcttgtgagacagcgaggacgcctcgagataagcttgctgcatgtctggaaggtaactgtgctgagggtctgggtacgaactaccgagggcatgtgaacatcacccggtcaggcattgagtgccagctatggaggagtcgctacccacataagcctgaaatcaactccactacccatcctggggccgacctacaggagaatttctgccgcaaccccgacagcagcaccacgggaccctggtgctacactacagaccccaccgtgaggaggcaggaatgcagcatccctgtctgtggccaggatcaagtcactgtagcgatgactccacgctccgaaggctccagtgtgaatctgtcacctccattggagcagtgtgtccctgatcgggggcagcagtaccaggggcgcctggcggtgaccacacatgggctcccctgcctggcctgggccagcgcacaggccaaggccctgagcaagcaccaggacttcaactcagctgtgcagctggtggagaacttctgccgcaacccagacggggatgaggagggcgtgtggtgctatgtggccgggaagcctggcgactttgggtactgcgacctcaactattgtgaggaggccgtggaggaggagacaggagatgggctggatgaggactcagacagggccatcgaagggcgtaccgccaccagtgagtaccagactttcttcaatccgaggacctttggctcgggagaggcag

SEQ ID NO: 120321 - DNA, 1849 bp, Homo sapiens
  Payload ID: 3583
  Gene Symbol: F2
  Gene Name: coagulation factor II (thrombin)
  ENST ID: ENST00000530231
  CDS Start-End: 6-1757
acactatggcgcacgtccgaggcttgcagctgcctggctgcctggccctggctgccctgtgtagccttgtgcacagccagcatgtgttcctggctcctcagcaagcacggtcgctgctccagcgggtccggcgagccaacaccttcttggaggaggtgcgcaagggcaacctggagcgagagtgcgtggaggagacgtgcagctacgaggaggccttcgaggctctggagtcctccacggctacggatgtgttctgggccaagtacacagcttgtgagacagcgaggacgcctcgagataagcttgctgcatgtctggaaggtaactgtgctgagggtctgggtacgaactaccgagggcatgtgaacatcacccggtcaggcattgagtgccagctatggaggagtcgctacccacataagcctgaaatcaactccactacccatcctggggccgacctacaggagaatttctgccgcaaccccgacagcagcaccacgggaccctggtgctacactacagaccccaccgtgaggaggcaggaatgcagcatccctgtctgtggccaggatcaagtcactgtagcgatgactccacgctccgaaggctccagtgtgaatctgtcacctccattggagcagtgtgtccctgatcgggggcagcagtaccaggggcgcctggcggtgaccacacatgggctcccctgcctggcctgggccagcgcacaggccaaggccctgagcaagcaccaggacttcaactcagctgtgcagctggtggagaacttctgccgcaacccagacggggatgaggagggcgtgtggtgctatgtggccgggaagcctggcgactttgggtactgcgacctcaactattgtgaggaggccgtggaggaggagacaggagatgggctggatgaggactcagacagggccatcgaagggcgtaccgccaccagtgagtaccagactttcttcaatccgaggacctttggctcgggagaggcagactgtgggctgcgacctctgttcgagaagaagtcgctggaggacaaaaccgaaagagagctcctggaatcctacatcgacgggcgcattgtggagggctcggatgcagagatcggcatgtcaccttggcaggtgatgcttttccggaagagtccccaggagctgctgtgtggggccagcctcatcagtgaccgctgggtcctcaccgccgcccactgcctcctgtacccgccctgggacaagaacttcaccgagaatgaccttctggtgcgcattggcaagcactcccgcaccaggtacgagcgaaacattgaaaagatatccatgttggaaaagatctacatccaccccagcttgctccaggctggatacaaggggcgggtgacaggctggggcaacctgaaggagacgtggacagccaacgttggtaaggggcagcccagtgtcctgcaggtggtgaacctgcccattgtggagcggccggtctgcaaggactccacccggatccgcatcactgacaacatgttctgtgctggttacaagcctgatgaagggaaacgaggggatgcctgtgaaggtgacagtgggggaccctttgtcatgaagagcccctttaacaaccgctggtatcaaatgggcatcgtctcatggggtgaaggctgtgaccgggatgggaaatatggcttctacacacatgtgttccgcctgaagaagtggatacagaaggtcattgatcagtttggagagtagggggccactcatattctgggctcctggaaccaatcccgtgaaagaattatttttgtgtttctaaaactatggttcccaataaaagtgactct

SEQ ID NO: 120322 - DNA, 3821 bp, Homo sapiens
  Payload ID: 3584
  Gene Symbol: F2R
  Gene Name: coagulation factor II (thrombin) receptor
  Uniprot ID: P25116
  ENST ID: ENST00000319211
  CDS Start-End: 266-1543
agagactctcactgcacgccggagggcgcccttcctcgctcgcgcccgcgcgaccgcgcgccccagtcccgccccgccccgctaaccgccccagacacagcgctcgccgagggtcgcttggaccctgatcttacccgtgggcaccctgcgctctgcctgccgcgaagaccggctccccgacccgcagaagtcaggagagagggtgaagcggagcagcccgaggcggggcagcctcccggagcagcgccgcgcagagcccgggacaatggggccgcggcggctgctgctggtggccgcctgcttcagtctgtgcggcccgctgttgtctgcccgcacccgggcccgcaggccagaatcaaaagcaacaaatgccaccttagatccccggtcatttcttctcaggaaccccaatgataaatatgaaccattttgggaggatgaggagaaaaatgaaagtgggttaactgaatacagattagtctccatcaataaaagcagtcctcttcaaaaacaacttcctgcattcatctcagaagatgcctccggatatttgaccagctcctggctgacactctttgtcccatctgtgtacaccggagtgtttgtagtcagcctcccactaaacatcatggccatcgttgtgttcatcctgaaaatgaaggtcaagaagccggcggtggtgtacatgctgcacctggccacggcagatgtgctgtttgtgtctgtgctcccctttaagatcagctattacttttccggcagtgattggcagtttgggtctgaattgtgtcgcttcgtcactgcagcattttactgtaacatgtacgcctctatcttgctcatgacagtcataagcattgaccggtttctggctgtggtgtatcccatgcagtccctctcctggcgtactctgggaagggcttccttcacttgtctggccatctgggctttggccatcgcaggggtagtgcctctgctcctcaaggagcaaaccatccaggtgcccgggctcaacatcactacctgtcatgatgtgctcaatgaaaccctgctcgaaggctactatgcctactacttctcagccttctctgctgtcttcttttttgtgccgctgatcatttccacggtctgttatgtgtctatcattcgatgtcttagctcttccgcagttgccaaccgcagcaagaagtcccgggctttgttcctgtcagctgctgttttctgcatcttcatcatttgcttcggacccacaaacgtcctcctgattgcgcattactcattcctttctcacacttccaccacagaggctgcctactttgcctacctcctctgtgtctgtgtcagcagcataagctgctgcatcgaccccctaatttactattacgcttcctctgagtgccagaggtacgtctacagtatcttatgctgcaaagaaagttccgatcccagcagttataacagcagtgggcagttgatggcaagtaaaatggatacctgctctagtaacctgaataacagcatatacaaaaagctgttaacttaggaaaagggactgctgggaggttaaaaagaaaagtttataaaagtgaataacctgaggattctattagtccccacccaaactttattgattcacctcctaaaacaacagatgtacgacttgcatacctgctttttatgggagctgtcaagcatgtatttttgtcaattaccagaaagataacaggacgagatgacggtgttattccaagggaatattgccaatgctacagtaataaatgaatgtcacttctggatatagctaggtgacatatacatacttacatgtgtgtatatgtagatgtatgcacacacatatattatttgcagtgcagtatagaataggcactttaaaacactctttccccgcaccccagcaattatgaaaataatctctgattccctgatttaatatgcaaagtctaggttggtagagtttagccctgaacatttcatggtgttcatcaacagtgagagactccatagtttgggcttgtaccacttttgcaaataagtgtattttgaaattgtttgacggcaaggtttaagttattaagaggtaagacttagtactatctgtgcgtagaagttctagtgttttcaattttaaacatatccaagtttgaattcctaaaattatggaaacagatgaaaagcctctgttttgatatgggtagtattttttacattttacacactgtacacataagccaaaactgagcataagtcctctagtgaatgtaggctggctttcagagtaggctattcctgagagctgcatgtgtccgcccccgatggaggactccaggcagcagacacatgccagggccatgtcagacacagattggccagaaaccttcctgctgagcctcacagcagtgagactggggccactacatttgctccatcctcctgggattggctgtgaactgatcatgtttatgagaaactggcaaagcagaatgtgatatcctaggaggtaatgaccatgaaagacttctctacccatcttaaaaacaacgaaagaaggcatggacttctggatgcccatccactgggtgtaaacacatctagtagttgttctgaaatgtcagttctgatatggaagcacccattatgcgctgtggccactccaataggtgctgagtgtacagagtggaataagacagagacctgccctcaagagcaaagtagatcatgcatagagtgtgatgtatgtgtaataaatatgtttcacacaaacaaggcctgtcagctaaagaagtttgaacatttgggttactatttcttgtggttataacttaatgaaaacaatgcagtacaggacatatattttttaaaataagtctgatttaattgggcactatttatttacaaatgttttgctcaatagattgctcaaatcaggttttcttttaagaatcaatcatgtcagtctgcttagaaataacagaagaaaatagaattgacattgaaatctaggaaaattattctataatttccatttacttaagacttaatgagactttaaaagcattttttaacctcctaagtatcaagtatagaaaatcttcatggaattcacaaagtaatttggaaattaggttgaaacatatctcttatcttacgaaaaaatggtagcattttaaacaaaatagaaagttgcaaggcaaatgtttatttaaaagagcaggccaggcgcggtggctcacgcctgtaatcccagcactttgggaggctgaggcgggtggatcacgaggtcaggagatcgagaccatcctggctaacacggtgaaacccgtctctactaaaaatgcaaaaaaaattagccgggcgtggtggcaggcacctgtagtcccagctactcgggaggctgaggcaggagactggcgtgaacccaggaggcggaccttgtagtgagccgagatcgcgccactgtgctccagcctgggcaacagagcaagactccatctcaaaaaataaaaataaataaaaaataaaaaaataaaagagcaaactatttccaaataccatagaataacttacataaaagtaatataactgtattgtaagtagaagctagcactggttttattaatttagtgactattcattttatctaaatcagtgaagatttactgtcattgtttattagtctgtatatattaaaatatgatatcattaatgtacttacaaaatagtatgtcactgtttttatgttcattcttaaaaacataacctgtattaataaatgtgaacatttgcttggtatctctttggaa

SEQ ID NO: 120323 - DNA, 442 bp, Homo sapiens
  Payload ID: 3584
  Gene Symbol: F2R
  Gene Name: coagulation factor II (thrombin) receptor
  ENST ID: ENST00000505600
  CDS Start-End: 110-418
ctgccgcgaagaccggctccccgacccgcagaagtcaggagagagggtgaagcggagcagcccgaggcggggcagcctcccggagcagcgccgcgcagagcccgggacaatggggccgcggcggctgctgctggtggccgcctgcttcagtctgtgcggcccgctgttgtctgcccgcacccgggcccgcaggccagtcacgtttaggtggggcgtgccacccccttcgcgggcccagccgatgcccctttggactcgatcttggagggtgcagcccgcctgccacggggtgttggatatggaggaggatggagcggaagccccctgggggagcctgcagtcctgcgttgcacttgtcattgtgtttctcccaggaccacccccaaaaagaaaagctctcacgttgctccaccaataaacgtttcgatctttaaaatataaa

SEQ ID NO: 120324 - DNA, 2914 bp, Homo sapiens
  Payload ID: 3585
  Gene Symbol: F2RL1
  Gene Name: coagulation factor II (thrombin) receptor-like 1
  Uniprot ID: P55085
  ENST ID: ENST00000296677
  CDS Start-End: 207-1400
ggtcccggggcgtggcctcccgcaggtgagtacgctgctccttcggtttccctgaaacctaacccgccctggggaggcgcgcagcagaggctccgattcggggcaggtgagaggctgactttctctcggtgcgtccagtggagctctgagtttcgaatcggcggcggcggattccccgcgcgcccggcgtcggggcttccaggaggatgcggagccccagcgcggcgtggctgctgggggccgccatcctgctagcagcctctctctcctgcagtggcaccatccaaggaaccagtagatcctctaaaggaagaagccttattggtaaggttgatggcacatcccacgtcactggaaaaggagttacagttgaaacagtcttttctgtggatgagttttctgcatctgtcctcactggaaaactgaccactgtcttccttccaattgtctacacaattgtgtttgtggtgggtttgccaagtaacggcatggccctgtgggtctttcttttccgaactaagaagaagcaccctgctgtgatttacatggccaatctggccttggctgacctcctctctgtcatctggttccccttgaagattgcctatcacatacatggcaacaactggatttatggggaagctctttgtaatgtgcttattggctttttctatggcaacatgtactgttccattctcttcatgacctgcctcagtgtgcagaggtattgggtcatcgtgaaccccatggggcactccaggaagaaggcaaacattgccattggcatctccctggcaatatggctgctgattctgctggtcaccattcctttgtatgtcgtgaagcagaccatcttcattcctgccctgaacatcacgacctgtcatgatgttttgcctgagcagctcttggtgggagacatgttcaattacttcctctctctggccattggggtctttctgttcccagccttcctcacagcctctgcctatgtgctgatgatcagaatgctgcgatcttctgccatggatgaaaactcagagaagaaaaggaagagggccatcaaactcattgtcactgtcctggccatgtacctgatctgcttcactcctagtaaccttctgcttgtggtgcattattttctgattaagagccagggccagagccatgtctatgccctgtacattgtagccctctgcctctctacccttaacagctgcatcgacccctttgtctattactttgtttcacatgatttcagggatcatgcaaagaacgctctcctttgccgaagtgtccgcactgtaaagcagatgcaagtatccctcacctcaaagaaacactccaggaaatccagctcttactcttcaagttcaaccactgttaagacctcctattgagttttccaggtcctcagatgggaattgcacagtaggatgtggaacctgtttaatgttatgaggacgtgtctgttatttcctaatcaaaaaggtctcaccacataccatgtggatgcagcacctctcaggattgctaggagctcccctgtttgcatgagaaaagtagtcccccaaattaacatcagtgtctgtttcagaatctctctactcagatgaccccagaaactgaaccaacagaagcagacttttcagaagatggtgaagacagaaacccagtaacttgcaaaaagtagacttggtgtgaagactcacttctcagctgaaattatatatatacacatatatatattttacatctgggatcatgatagacttgttagggcttcaaggccctcagagatgatcagtccaactgaacgaccttacaaatgaggaaaccaagataaatgagctgccagaatcaggtttccaatcaacagcagtgagttgggattggacagtagaatttcaatgtccagtgagtgaggttcttgtaccacttcatcaaaatcatggatcttggctgggtgcggtgcctcatgcctgtaatcctagcactttgggaggctgaggcaggcaatcacttgaggtcaggagttcgagaccagcctggccatcatggcgaaacctcatctctactaaaaatacaaaagttaaccaggtgtgtggtgcacgtttgtaatcccagttactcaggaggctgaggcacaagaattgagtatcactttaactcaggaggcagaggttgcagtgagccgagattgcaccactgcactccagcttgggtgataaaataaaataaaatagtcgtgaatcttgttcaaaatgcagattcctcagattcaataatgagagctcagactgggaacagggcccaggaatctgtgtggtacaaacctgcatggtgtttatgcacacagagatttgagaaccattgttctgaatgctgcttccatttgacaaagtgccgtgataatttttgaaaagagaagcaaacaatggtgtctcttttatgttcagcttataatgaaatctgtttgttgacttattaggactttgaattatttctttattaaccctctgagtttttgtatgtattattattaaagaaaaatgcaatcaggattttaaacatgtaaatacaaattttgtataacttttgatgacttcagtgaaattttcaggtagtctgagtaatagattgttttgccacttagaatagcatttgccacttagtattttaaaaaataattgttggagtatttattgtcagttttgttcacttgttatctaatacaaaattataaagccttcagagggtttggaccacatctctttggaaaatagtttgcaacatatttaagagatacttgatgccaaaatgactttatacaacgattgtatttgtgacttttaaaaataattattttattgtgtaattgatttataaataacaaaattttttttacaactta

SEQ ID NO: 120325 - DNA, 607 bp, Homo sapiens
  Payload ID: 3585
  Gene Symbol: F2RL1
  Gene Name: coagulation factor II (thrombin) receptor-like 1
  ENST ID: ENST00000514165
  CDS Start-End: 270-607
tgcgcagggaagggggccgggggcgggaccagggcgcgcgttccggtcccggggcgtggcctcccgcaggaaccagtagatcctctaaaggaagaagccttattggtaaggttgatggcacatcccacgtcactggaaaaggagttacagttgaaacagtcttttctgtggatgagttttctgcatctgtcctcactggaaaactgaccactgtcttccttccaattgtctacacaattgtgtttgtggtgggtttgccaagtaacggcatggccctgtgggtctttcttttccgaactaagaagaagcaccctgctgtgatttacatggccaatctggccttggctgacctcctctctgtcatctggttccccttgaagattgcctatcacatacatggcaacaactggatttatggggaagctctttgtaatgtgcttattggctttttctatggcaacatgtactgttccattctcttcatgacctgcctcagtgtgcagaggtattgggtcatcgtgaaccccatggggcactccaggaagaaggcaaacattgccattggcatctccctggcaatatggctgctgattctgctggtcaccat

SEQ ID NO: 120326 - DNA, 3429 bp, Homo sapiens
  Payload ID: 3586
  Gene Symbol: F2RL2
  Gene Name: coagulation factor II (thrombin) receptor-like 2
  Uniprot ID: O00254
  ENST ID: ENST00000296641
  CDS Start-End: 205-1329
atgcttactgaagcatcgagtggattacatcctttccctgcggaggaccagggcaagtttcctgcctgcacggcacaggagagcaaacttctacagacagaccaaggcttccatttgctgctgacacatggaactgaggtgaaattgtgctccatgattttacagatttcataacgtttaagagacgggactcaggtcatcaaaatgaaagccctcatctttgcagctgctggcctcctgcttctgttgcccactttttgtcagagtggcatggaaaatgatacaaacaacttggcaaagccaaccttacccattaagacctttcgtggagctcccccaaattcttttgaagagttccccttttctgccttggaaggctggacaggagccacgattactgtaaaaattaagtgccctgaagaaagtgcttcacatctccatgtgaaaaatgctaccatggggtacctgaccagctccttaagtactaaactgatacctgccatctacctcctggtgtttgtagttggtgtcccggccaatgctgtgaccctgtggatgcttttcttcaggaccagatccatctgtaccactgtattctacaccaacctggccattgcagattttcttttttgtgttacattgccctttaagatagcttatcatctcaatgggaacaactgggtatttggagaggtcctgtgccgggccaccacagtcatcttctatggcaacatgtactgctccattctgctccttgcctgcatcagcatcaaccgctacctggccatcgtccatcctttcacctaccggggcctgcccaagcacacctatgccttggtaacatgtggactggtgtgggcaacagttttcttatatatgctgccatttttcatactgaagcaggaatattatcttgttcagccagacatcaccacctgccatgatgttcacaacacttgcgagtcctcatctcccttccaactctattacttcatctccttggcattctttggattcttaattccatttgtgcttatcatctactgctatgcagccatcatccggacacttaatgcatacgatcatagatggttgtggtatgttaaggcgagtctcctcatccttgtgatttttaccatttgctttgctccaagcaatattattcttattattcaccatgctaactactactacaacaacactgatggcttatattttatatatctcatagctttgtgcctgggtagtcttaatagttgcttagatccattcctttattttctcatgtcaaaaaccagaaatcactccactgcttaccttacaaaatagtgaaatgatcttagagaacaaggacagccatcacagagaacgtctgttttcaagaacaacataagcatagtgcaaggagctccatttccgagctcctaagaaatatgcttcaaaggtcaaacattacaaaagcattagtagtttgtttgtttgtttttgagactgagtctcactttatcacccagactggcgtgcagtggcactatcttggctcattgcaacctctgcctcccaggtcagcctcccaagtagctgggattacaccaccatgcccagctactaaaaatacttgtatttttagtagagacggggtttcaccatgttgaccaggctggtcttgaactcctgacctcaagtgatcttccggcctcagcctcccaaagtgctggattacaggcgtgagccactgagccagccagcattagtaatttttaaaaacactttatcagtattttaaaaatgttaatgcaggagaaaagatatcacaactctatggaaaatgacatttccatttgccttattgctacttcaagctctttaaatcaccatcttccctatttctgtgagtggtattgccatccttgacatttgacatcattttttattctttggtctcttttgactctcatgctggtggctgcctcatcaactgattctatctttgtagggtccctcaccagggtcttttatctagtttcacctttgccttcttttttcctttttttaatagagacagtgtctcgcttcgtcacctggctgaagtgcagtagcctgatcatagctcacttcagcctccaactcctgggctcaagcaatcctgctgtctcagcctcccaagtaactaagactacaggcatgcaccaccatacccaactaattttattttttattttttgcagagatggagtctcactgttgcccaggctggtcttgaactcctggtctcgagtgatcttcctatctcagcctcccaaagtgctgggactacaggcatgagccactacgtccaggccacctctaccttctaaccattctctccactgccagcctaccctccaccacttcacaagtcctgccagattaatcttccttagatatcagttaggatacatcactaaaacatttccactaactccactgtttctataataaatcataaatctttagcctggcattcaaggctaacttgctaatcacacttcccattaaaccttgcttatgatataggcaccaaccaaacctcttgctctgctatatctccactctgcctcagactgaaaagctagtcctaacgtctttgccttaattctgttcattttttcaagtccttgaaggaccattcttccctgattctcaggctagaagtgtcacttttcttatctgtacttccaaagcactttcgtatatttttattatggcatttatatatagttcatttatatttaaattttaattccatgaacaatcaagtaccaagtataatggagaaggtgctcatcctctgccttccttgagcttctgggtgatgccaggcccaagtctttgtggcacccagctccatgctttgaatactatgtggctgaatgaatttttaaaatctcaaagcagttaaacagcaggaaagcccattaacttcgtactgaaaaagcaacatactgtgatgatacgggatgacatcatttcaggttgggcatacaaaaaagtaaggaagctaaactaagactatactcaccaggccatttagaagttttaaataatgcctccactattttttttcttagacatagcttttaatggggaaatggaattttgttattaatacccattatattcctgtaagtaaatgactatttttcccttaactcagtgattagacaggaaggaagacattagtgattagacaggagggaagatattagtgattagacagcagggaagatattagtggtaaagagtgaatgatagtagtgaatataaatggggctgaggaaactttaagcataaaagattcctgagatgactttacaagtctgtacgaatctgccttgactgtatatttcatactgcccaacaaaacaataaaaaacaattttaaatgca

SEQ ID NO: 120327 - DNA, 1387 bp, Homo sapiens
  Payload ID: 3586
  Gene Symbol: F2RL2
  Gene Name: coagulation factor II (thrombin) receptor-like 2
  Uniprot ID: O00254
  ENST ID: ENST00000504899
  CDS Start-End: 120-1178
ggattacatcctttccctgcggaggaccagggcaagtttcctgcctgcacggcacaggagagcaaacttctacagacagaccaaggcttccatttgctgctgacacatggaactgaggcatggaaaatgatacaaacaacttggcaaagccaaccttacccattaagacctttcgtggagctcccccaaattcttttgaagagttccccttttctgccttggaaggctggacaggagccacgattactgtaaaaattaagtgccctgaagaaagtgcttcacatctccatgtgaaaaatgctaccatggggtacctgaccagctccttaagtactaaactgatacctgccatctacctcctggtgtttgtagttggtgtcccggccaatgctgtgaccctgtggatgcttttcttcaggaccagatccatctgtaccactgtattctacaccaacctggccattgcagattttcttttttgtgttacattgccctttaagatagcttatcatctcaatgggaacaactgggtatttggagaggtcctgtgccgggccaccacagtcatcttctatggcaacatgtactgctccattctgctccttgcctgcatcagcatcaaccgctacctggccatcgtccatcctttcacctaccggggcctgcccaagcacacctatgccttggtaacatgtggactggtgtgggcaacagttttcttatatatgctgccatttttcatactgaagcaggaatattatcttgttcagccagacatcaccacctgccatgatgttcacaacacttgcgagtcctcatctcccttccaactctattacttcatctccttggcattctttggattcttaattccatttgtgcttatcatctactgctatgcagccatcatccggacacttaatgcatacgatcatagatggttgtggtatgttaaggcgagtctcctcatccttgtgatttttaccatttgctttgctccaagcaatattattcttattattcaccatgctaactactactacaacaacactgatggcttatattttatatatctcatagctttgtgcctgggtagtcttaatagttgcttagatccattcctttattttctcatgtcaaaaaccagaaatcactccactgcttaccttacaaaatagtgaaatgatcttagagaacaaggacagccatcacagagaacgtctgttttcaagaacaacataagcatagtgcaaggagctccatttccgagctcctaagaaatatgcttcaaaggtcaaacattacaaaagcattagtagtttgtttgtttgtttttgagactgagtctcactttatcacccagactggcgtgcagtggcactatctt

SEQ ID NO: 120328 - DNA, 3473 bp, Homo sapiens
  Payload ID: 3587
  Gene Symbol: F2RL3
  Gene Name: coagulation factor II (thrombin) receptor-like 3
  Uniprot ID: Q96RI0
  ENST ID: ENST00000248076
  CDS Start-End: 331-1488
agatgcttcctgggctggtcagggaccgggggtgctggctgcagctgggacccccccccctgcatcttgctggcctggcacctgggtccctgggaggcgccacactggatatagccacgtggggcagcccggtctccataacccacactccagtcctcccacgggctggctggcaagcggccctggtgggtctgcgggggcaggggcagccttcctggtttatctctaccggcgcgatctgctcgtccgcctcggctccagaagctggggctcagggtccggcgaggcaggaagcctgaggccacagcccagagcagcctgagtgcagtcatgtgggggcgactgctcctgtggcccctggtgctggggttcagcctgtctggcggcacccagacccccagcgtctacgacgagagcgggagcaccggaggtggtgatgacagcacgccctcaatcctgcctgccccccgcggctacccaggccaagtctgtgccaatgacagtgacaccctggagctcccggacagctcacgggcactgcttctgggctgggtgcccaccaggctggtgcccgccctctatgggctggtcctggtggtggggctgccggccaatgggctggcgctgtgggtgctggccacgcaggcacctcggctgccctccaccatgctgctgatgaacctcgcggctgctgacctcctgctggccctggcgctgcccccgcggatcgcctaccacctgcgtggccagcgctggcccttcggggaggccgcctgccgcctggccacggccgcactctatggtcacatgtatggctcagtgctgctgctggccgccgtcagcctggatcgctacctggccctggtgcacccgctgcgggcccgcgccctgcgtggccggcgcctggcccttggactctgcatggctgcttggctcatggcggccgccctggcactgcccctgacactgcagcggcagaccttccggctggcgcgctccgatcgcgtgctctgccatgacgcgctgcccctggacgcacaggcctcccactggcaaccggccttcacctgcctggcgctgttgggctgtttcctgcccctgctggccatgctgctgtgctacggggccaccctgcacacgctggcggccagcggccggcgctacggccacgcgctgaggctgaccgcagtggtgctggcctccgccgtggccttcttcgtgcccagcaacctgctgctgctgctgcattactcggacccgagccccagcgcctggggcaacctctatggtgcctacgtgcccagcctggcgctgagcaccctcaacagctgcgtggatcccttcatctactactacgtgtcggccgagttcagggacaaggtgcgggcagggctcttccaacggtcgccgggggacaccgtggcctccaaggcctctgcggaagggggcagccggggcatgggcacccactcctctttgctccagtgacacaaagtggggaaggctgtactgggtcgaacagggtcccttcccccacttcacgtccttcctgggacctcagaatgtgaccttatttggaaatagggttgttacaactgtcactagcggaggtcactttggagaagggtgggccttacatccagtgtgggtggtgtcctcataagataaggagaggccaggcctggtggctcacgcctgtaatcccagcactttaagaggccaaggcggatggatcacttgagcccaggagttcaacaccagcctgagcaacatggtaaaaccccatctctaccaaaaatacaaaaattagctgggcttggtggctggcgcctgtaatcccagctactcaggagactgaggcagaaggatcgcttgaacctgggaggcagaggttgcagtgagccgagattgcgccactggactccagcctgcgtgacagagagcctgtctctaaattaattaattaattaatttaattcaattttaaaaagacgaaaagtgacggccaggtgcagtggctcacgcctataatctcagcactctgggaggccaagatggaggattgcttgaagccaggagtttgggaccagcctgggcaacatagggggatcccatctctacacacaaaaaaattttttaatgaaccaggcattgtggcatgcgcctatagtcccagccactcaagaggcacaggcgggaggatcacttgagcctgggaggttgtggttgcagtgagctatgattgtaccactgcactccagcctgggcaacagagcaagaccttgtctcaaaaataaacaaactaaaattaaaaaaagaagacgagagatagtgggtgtggtggctcacacctgcaatcccagcactttggaaggccgaggtgggcagatcatctgaggccaggagttcaagaccagcctggctaacatggtgaaatcctatctctaccaaaaatacaaaaattagccaggcgtggtggtgggcacctgtactggggaggtgcccacccagctactggggaggctgagtcaggagaatcgcttgaacctgggaggcggaggttgcggtcagctgagatggtgccactgcactccagcctgggcgaaagagcgactctgtctccaaaaaaaagagaagaggagaggacacagagacacacagagaagaaagccatgtggcggcagaggcagagatgggagtgatgcggacggacacaaactaagggatgccacgatgccaagcacagccaacagccaccagcagccaggagacaggcctgggacgggctctccctcacagcctccagagggaaccagccctgccaccaccttgaccctggacttctggcctgcagaactgtgagacaataaactctcattgttttaagctgcctggcatgtggcactttgtcagggcagcccaggaatctgaaacaggatcaaactctgcttcctgggccctgccagcatctctggctcggctttctgggctggatgcagcccacgacgcactggtgtctgagatggggctggagctggggctggggctgcattccctggagactcactgcaagttcctgcccaggaggctgagggcaccccatcctcagtgcccaatgctgtggccccaccaggcccagagcctggttggccattctcatgcccaccagcttctggctttgggatgtctcttgagcaaccagaatagcacccccaactctgctccccaaaacccatcactagcacggctcagcctcctgctatcccctgactgctggggaccctcgccttccctcctctcacctgcaggctgatccttcttttcactttctgtcaatgtcaccagggataaggtgggacaatggggggtgggggtggacagtgtgtgctggggggttcgggtgctgcagacctggaactcccttctgccaggatgttggcagccggttgtaagccttgcacgggacagaccac

SEQ ID NO: 120329 - DNA, 613 bp, Homo sapiens
  Payload ID: 3587
  Gene Symbol: F2RL3
  Gene Name: coagulation factor II (thrombin) receptor-like 3
  ENST ID: ENST00000599210
  CDS Start-End: 1-342
atgtgggggcgactgctcctgtggcccctggtgctggggttcagcctgtctggcggcacccagacccccagcgtctacgacgagagcgggagcaccggaggtggtgatgcacgccctcaatcctgcctgccccccgcggctacccaggccaagtctgtgccaatgacagtgacaccctggagctcccggacagctcacgggcactgcttctgggctgggtgcccaccaggctggtgcccgccctctatgggctggtcctggtggtggggctgccggccaatgggctggcgctgtgggtgctggccacgcaggcacctcggctgccctccaccatgctgctgatgaacctcgcggctgctgacctcctgctggccctggcgctgcccccgcggatcgcctaccacctgcgtggccagcgctggcccttcggggaggccgcctgccgcctggccacggccgcactctatggtcacatgtatggctcagtgctgctgctggccgccgtcagcctggatcgctacctggccctggtgcacccgctgcgggcccgcgccctgcgtggccggcgcctggcccttggactctgcatggctgcttggctcatggcggccgc

SEQ ID NO: 120330 - DNA, 2287 bp, Homo sapiens
  Payload ID: 3588
  Gene Symbol: F3
  Gene Name: coagulation factor III (thromboplastin, tissue factor)
  Uniprot ID: P13726
  ENST ID: ENST00000334047
  CDS Start-End: 165-1052
gcgccgccggccctttatagcgcgcggggcaccggctccccaagactgcgagctccccgcaccccctcgcactccctctggccggcccagggcgccttcagcccaacctccccagccccacgggcgccacggaacccgctcgatctcgccgccaactggtagacatggagacccctgcctggccccgggtcccgcgccccgagaccgccgtcgctcggacgctcctgctcggctgggtcttcgcccaggtggccggcgcttcaggcactacaaatactgtggcagcatataatttaacttggaaatcaactaatttcaagacaattttggagtgggaacccaaacccgtcaatcaagtctacactgttcaaataagcactaagtcaggagattggaaaagcaaatgcttttacacaacagacacagagtgtgacctcaccgacgagattgtgaaggatgtgaagcagacgtacttggcacgggtcttctcctacccggcagggaatgtggagagcaccggttctgctggggagcctctgtatgagaactccccagagttcacaccttacctggagacaaacctcggacagccaacaattcagagttttgaacaggtgggaacaaaagtgaatgtgaccgtagaagatgaacggactttagtcagaaggaacaacactttcctaagcctccgggatgtttttggcaaggacttaatttatacactttattattggaaatcttcaagttcaggaaagaaaacagccaaaacaaacactaatgagtttttgattgatgtggataaaggagaaaactactgtttcagtgttcaagcagtgattccctcccgaacagttaaccggaagagtacagacagcccggtagagtgtatgggccaggagaaaggggaattcagagaaatattctacatcattggagctgtggtatttgtggtcatcatccttgtcatcatcctggctatatctctacacaagtgtagaaaggcaggagtggggcagagctggaaggagaactccccactgaatgtttcataaaggaagcactgttggagctactgcaaatgctatattgcactgtgaccgagaacttttaagaggatagaatacatggaaacgcaaatgagtatttcggagcatgaagaccctggagttcaaaaaactcttgatatgacctgttattaccattagcattctggttttgacatcagcattagtcactttgaaatgtaacgaatggtactacaaccaattccaagttttaatttttaacaccatggcaccttttgcacataacatgctttagattatatattccgcactcaaggagtaaccaggtcgtccaagcaaaaacaaatgggaaaatgtcttaaaaaatcctgggtggacttttgaaaagcttttttttttttttttttttttttgagacggagtcttgctctgttgcccaggctggagtgcagtagcacgatctcggctcactgcaccctccgtctctcgggttcaagcaattgtctgcctcagcctcccgagtagctgggattacaggtgcgcactaccacgccaagctaatttttgtattttttagtagagatggggtttcaccatcttggccaggctggtcttgaattcctgacctcaggtgatccacccaccttggcctcccaaagtgctagtattatgggcgtgaaccaccatgcccagccgaaaagcttttgaggggctgacttcaatccatgtaggaaagtaaaatggaaggaaattgggtgcatttctaggacttttctaacatatgtctataatatagtgtttaggttcttttttttttcaggaatacatttggaaattcaaaacaattggcaaactttgtattaatgtgttaagtgcaggagacattggtattctgggcaccttcctaatatgctttacaatctgcactttaactgacttaagtggcattaaacatttgagagctaactatatttttataagactactatacaaactacagagtttatgatttaaggtacttaaagcttctatggttgacattgtatatataattttttaaaaaggttttctatatggggattttctatttatgtaggtaatattgttctatttgtatatattgagataatttatttaatatactttaaataaaggtgactgggaattgttactgttgtacttattctatcttccatttattatttatgtacaatttggtgtttgtattagctctactacagtaaatgactgtaaaattgtca

SEQ ID NO: 120331 - DNA, 1879 bp, Homo sapiens
  Payload ID: 3588
  Gene Symbol: F3
  Gene Name: coagulation factor III (thromboplastin, tissue factor)
  Uniprot ID: P13726
  ENST ID: ENST00000370207
  CDS Start-End: 2-718
catggagacccctgcctggccccgggtcccgcgccccgagaccgccgtcgctcggacgctcctgctcggctgggtcttcgcccaggtggccggcgcttcaggcactacaaatactgtggcagcatataatttaacttggaaatcaactaatttcaagacaattttggagtgggaacccaaacccgtcaatcaagtctacactgttcaaataagcactaagtcaggagattggaaaagcaaatgcttttacacaacagacacagagtgtgacctcaccgacgagattgtgaaggatgtgaagcagacgtacttggcacgggtcttctcctacccggcagggaatgtggagagcaccggttctgctggggagcctctgtatgagaactccccagagttcacaccttacctggagacaaacctcggacagccaacaattcagagttttgaacaggtgggaacaaaagtgaatgtgaccgtagaagatgaacggactttagtcagaaggaacaacactttcctaagcctccgggatgtttttggcaaggacttaatttatacactttattattggaaatcttcaagttcaggaaagaaatattctacatcattggagctgtggtatttgtggtcatcatccttgtcatcatcctggctatatctctacacaagtgtagaaaggcaggagtggggcagagctggaaggagaactccccactgaatgtttcataaaggaagcactgttggagctactgcaaatgctatattgcactgtgaccgagaacttttaagaggatagaatacatggaaacgcaaatgagtatttcggagcatgaagaccctggagttcaaaaaactcttgatatgacctgttattaccattagcattctggttttgacatcagcattagtcactttgaaatgtaacgaatggtactacaaccaattccaagttttaatttttaacaccatggcaccttttgcacataacatgctttagattatatattccgcactcaaggagtaaccaggtcgtccaagcaaaaacaaatgggaaaatgtcttaaaaaatcctgggtggacttttgaaaagcttttttttttttttttttttttttgagacggagtcttgctctgttgcccaggctggagtgcagtagcacgatctcggctcactgcaccctccgtctctcgggttcaagcaattgtctgcctcagcctcccgagtagctgggattacaggtgcgcactaccacgccaagctaatttttgtattttttagtagagatggggtttcaccatcttggccaggctggtcttgaattcctgacctcaggtgatccacccaccttggcctcccaaagtgctagtattatgggcgtgaaccaccatgcccagccgaaaagcttttgaggggctgacttcaatccatgtaggaaagtaaaatggaaggaaattgggtgcatttctaggacttttctaacatatgtctataatatagtgtttaggttcttttttttttcaggaatacatttggaaattcaaaacaattggcaaactttgtattaatgtgttaagtgcaggagacattggtattctgggcaccttcctaatatgctttacaatctgcactttaactgacttaagtggcattaaacatttgagagctaactatatttttataagactactatacaaactacagagtttatgatttaaggtacttaaagcttctatggttgacattgtatatataattttttaaaaaggttttctatatggggattttctatttatgtaggtaatattgttctatttgtatatattgagataatttatttaatatactttaaataaaggtgactgggaattgttactgttg

SEQ ID NO: 120332 - DNA, 2780 bp, Homo sapiens
  Payload ID: 3589
  Gene Symbol: F9
  Gene Name: coagulation factor IX
  Uniprot ID: P00740
  ENST ID: ENST00000218099
  CDS Start-End: 8-1393
aaaggttatgcagcgcgtgaacatgatcatggcagaatcaccaggcctcatcaccatctgccttttaggatatctactcagtgctgaatgtacagtttttcttgatcatgaaaacgccaacaaaattctgaatcggccaaagaggtataattcaggtaaattggaagagtttgttcaagggaaccttgagagagaatgtatggaagaaaagtgtagttttgaagaagcacgagaagtttttgaaaacactgaaagaacaactgaattttggaagcagtatgttgatggagatcagtgtgagtccaatccatgtttaaatggcggcagttgcaaggatgacattaattcctatgaatgttggtgtccctttggatttgaaggaaagaactgtgaattagatgtaacatgtaacattaagaatggcagatgcgagcagttttgtaaaaatagtgctgataacaaggtggtttgctcctgtactgagggatatcgacttgcagaaaaccagaagtcctgtgaaccagcagtgccatttccatgtggaagagtttctgtttcacaaacttctaagctcacccgtgctgagactgtttttcctgatgtggactatgtaaattctactgaagctgaaaccattttggataacatcactcaaagcacccaatcatttaatgacttcactcgggttgttggtggagaagatgccaaaccaggtcaattcccttggcaggttgttttgaatggtaaagttgatgcattctgtggaggctctatcgttaatgaaaaatggattgtaactgctgcccactgtgttgaaactggtgttaaaattacagttgtcgcaggtgaacataatattgaggagacagaacatacagagcaaaagcgaaatgtgattcgaattattcctcaccacaactacaatgcagctattaataagtacaaccatgacattgcccttctggaactggacgaacccttagtgctaaacagctacgttacacctatttgcattgctgacaaggaatacacgaacatcttcctcaaatttggatctggctatgtaagtggctggggaagagtcttccacaaagggagatcagctttagttcttcagtaccttagagttccacttgttgaccgagccacatgtcttcgatctacaaagttcaccatctataacaacatgttctgtgctggcttccatgaaggaggtagagattcatgtcaaggagatagtgggggaccccatgttactgaagtggaagggaccagtttcttaactggaattattagctggggtgaagagtgtgcaatgaaaggcaaatatggaatatataccaaggtatcccggtatgtcaactggattaaggaaaaaacaaagctcacttaatgaaagatggatttccaaggttaattcattggaattgaaaattaacagggcctctcactaactaatcactttcccatcttttgttagatttgaatatatacattctatgatcattgctttttctctttacaggggagaatttcatattttacctgagcaaattgattagaaaatggaaccactagaggaatataatgtgttaggaaattacagtcatttctaagggcccagcccttgacaaaattgtgaagttaaattctccactctgtccatcagatactatggttctccactatggcaactaactcactcaattttccctccttagcagcattccatcttcccgatcttctttgcttctccaaccaaaacatcaatgtttattagttctgtatacagtacaggatctttggtctactctatcacaaggccagtaccacactcatgaagaaagaacacaggagtagctgagaggctaaaactcatcaaaaacactactccttttcctctaccctattcctcaatcttttaccttttccaaatcccaatccccaaatcagtttttctctttcttactccctctctcccttttaccctccatggtcgttaaaggagagatggggagcatcattctgttatacttctgtacacagttatacatgtctatcaaacccagacttgcttccgtagtggagacttgcttttcagaacatagggatgaagtaaggtgcctgaaaagtttgggggaaaagtttctttcagagagttaagttattttatatatataatatatatataaaatatataatatacaatataaatatatagtgtgtgtgtatgcgtgtgtgtagacacacacgcatacacacatataatggaagcaataagccattctaagagcttgtatggttatggaggtctgactaggcatgatttcacgaaggcaagattggcatatcattgtaactaaaaaagctgacattgacccagacatattgtactctttctaaaaataataataataatgctaacagaaagaagagaaccgttcgtttgcaatctacagctagtagagactttgaggaagaattcaacagtgtgtcttcagcagtgttcagagccaagcaagaagttgaagttgcctagaccagaggacataagtatcatgtctcctttaactagcataccccgaagtggagaagggtgcagcaggctcaaaggcataagtcattccaatcagccaactaagttgtccttttctggtttcgtgttcaccatggaacattttgattatagttaatccttctatcttgaatcttctagagagttgctgaccaactgacgtatgtttccctttgtgaattaataaactggtgttctggttcat

SEQ ID NO: 120333 - DNA, 1272 bp, Homo sapiens
  Payload ID: 3589
  Gene Symbol: F9
  Gene Name: coagulation factor IX
  Uniprot ID: P00740
  ENST ID: ENST00000394090
  CDS Start-End: 1-1272
atgcagcgcgtgaacatgatcatggcagaatcaccaggcctcatcaccatctgccttttaggatatctactcagtgctgaatgtacagtttttcttgatcatgaaaacgccaacaaaattctgaatcggccaaagaggtataattcaggtaaattggaagagtttgttcaagggaaccttgagagagaatgtatggaagaaaagtgtagttttgaagaagcacgagaagtttttgaaaacactgaaagaacaactgaattttggaagcagtatgttgatgtaacatgtaacattaagaatggcagatgcgagcagttttgtaaaaatagtgctgataacaaggtggtttgctcctgtactgagggatatcgacttgcagaaaaccagaagtcctgtgaaccagcagtgccatttccatgtggaagagtttctgtttcacaaacttctaagctcacccgtgctgagactgtttttcctgatgtggactatgtaaattctactgaagctgaaaccattttggataacatcactcaaagcacccaatcatttaatgacttcactcgggttgttggtggagaagatgccaaaccaggtcaattcccttggcaggttgttttgaatggtaaagttgatgcattctgtggaggctctatcgttaatgaaaaatggattgtaactgctgcccactgtgttgaaactggtgttaaaattacagttgtcgcaggtgaacataatattgaggagacagaacatacagagcaaaagcgaaatgtgattcgaattattcctcaccacaactacaatgcagctattaataagtacaaccatgacattgcccttctggaactggacgaacccttagtgctaaacagctacgttacacctatttgcattgctgacaaggaatacacgaacatcttcctcaaatttggatctggctatgtaagtggctggggaagagtcttccacaaagggagatcagctttagttcttcagtaccttagagttccacttgttgaccgagccacatgtcttcgatctacaaagttcaccatctataacaacatgttctgtgctggcttccatgaaggaggtagagattcatgtcaaggagatagtgggggaccccatgttactgaagtggaagggaccagtttcttaactggaattattagctggggtgaagagtgtgcaatgaaaggcaaatatggaatatataccaaggtatcccggtatgtcaactggattaaggaaaaaacaaagctcacttaa

SEQ ID NO: 120334 - DNA, 7039 bp, Homo sapiens
  Payload ID: 3590
  Gene Symbol: F5
  Gene Name: coagulation factor V (proaccelerin, labile factor)
  ENST ID: ENST00000367796
  CDS Start-End: 203-6892
aggaaaagccccagaaaaagcggagggagtgagagccagaggctgctgctgccgtttgcaagaactgcaggggaggaggacgctgccacccacagcctctagagctcattgcagctgggacagcccggagtgtggttagcagctcggcaagcgctgcccaggtcctggggtggtggcagccagcgggagcaggaaaggaagcatgttcccaggctgcccacgcctctgggtcctggtggtcttgggcaccagctgggtaggctgggggagccaagggacagaagcggcacagctaaggcagttctacgtggctgctcagggcatcagttggagctaccgacctgagcccacaaactcaagtttgaatctttctgtaacttcctttaagaaaattgtctacagagagtatgaaccatattttaagaaagaaaaaccacaatctaccatttcaggacttcttgggcctactttatatgctgaagtcggagacatcataaaagttcactttaaaaataaggcagataagcccttgagcatccatcctcaaggaattaggtacagtaaattatcagaaggtgcttcttaccttgaccacacattccctgcggagaagatggacgacgctgtggctccaggccgagaatacacctatgaatggagtatcagtgaggacagtggacccacccatgatgaccctccatgcctcacacacatctattactcccatgaaaatctgatcgaggatttcaactcggggctgattgggcccctgcttatctgtaaaaaagggaccctaactgagggtgggacacagaagacgtttgacaagcaaatcgtgctactatttgctgtgtttgatgaaagcaagagctggagccagtcatcatccctaatgtacacagtcaatggatatgtgaatgggacaatgccagatataacagtttgtgcccatgaccacatcagctggcatctgctgggaatgagctcggggccagaattattctccattcatttcaacggccaggtcctggagcagaaccatcataaggtctcagccatcacccttgtcagtgctacatccactaccgcaaatatgactgtgggcccagagggaaagtggatcatatcttctctcaccccaaaacatttgcaagctgggatgcaggcttacattgacattaaaaactgcccaaagaaaaccaggaatcttaagaaaataactcgtgagcagaggcggcacatgaagaggtgggaatacttcattgctgcagaggaagtcatttgggactatgcacctgtaataccagcgaatatggacaaaaaatacaggtctcagcatttggataatttctcaaaccaaattggaaaacattataagaaagttatgtacacacagtacgaagatgagtccttcaccaaacatacagtgaatcccaatatgaaagaagatgggattttgggtcctattatcagagcccaggtcagagacacactcaaaatcgtgttcaaaaatatggccagccgcccctatagcatttaccctcatggagtgaccttctcgccttatgaagatgaagtcaactcttctttcacctcaggcaggaacaacaccatgatcagagcagttcaaccaggggaaacctatacttataagtggaacatcttagagtttgatgaacccacagaaaatgatgcccagtgcttaacaagaccatactacagtgacgtggacatcatgagagacatcgcctctgggctaataggactacttctaatctgtaagagcagatccctggacaggcgaggaatacagagggcagcagacatcgaacagcaggctgtgtttgctgtgtttgatgagaacaaaagctggtaccttgaggacaacatcaacaagttttgtgaaaatcctgatgaggtgaaacgtgatgaccccaagttttatgaatcaaacatcatgagcaattttacactttcagctatcaatggctatgtgcctgagagcataactactcttggattctgctttgatgacactgtccagtggcacttctgtagtgtggggacccagaatgaaattttgaccatccacttcactgggcactcattcatctatggaaagaggcatgaggacaccttgaccctcttccccatgcgtggagaatctgtgacggtcacaatggataatgttggaacttggatgttaacttccatgaattctagtccaagaagcaaaaagctgaggctgaaattcagggatgttaaatgtatcccagatgatgatgaagactcatatgagatttttgaacctccagaatctacagtcatggctacacggaaaatgcatgatcgtttagaacctgaagatgaagagagtgatgctgactatgattaccagaacagactggctgcagcattaggaatcaggtcattccgaaactcatcattgaatcaggaagaagaagagttcaatcttactgccctagctctggagaatggcactgaattcgtttcttcaaacacagatataattgttggttcaaattattcttccccaagtaatattagtaagttcactgtcaataaccttgcagaacctcagaaagccccttctcaccaacaagccaccacagctggttccccactgagacacctcattggcaagaactcagttctcaattcttccacagcagagcattccagcccatattctgaagaccctatagaggatcctctacagccagatgtcacagggatacgtctactttcacttggtgctggagaattcaaaagtcaagaacatgctaagcataagggacccaaggtagaaagagatcaagcagcaaagcacaggttctcctggatgaaattactagcacataaagttgggagacacctaagccaagacactggttctccttccggaatgaggccctgggaggaccttcctagccaagacactggttctccttccagaatgaggccctggaaggaccctcctagtgatctgttactcttaaaacaaagtaactcatctaagattttggttgggagatggcatttggcttctgagaaaggtagctatgaaataatccaagatactgatgaagacacagctgttaacaattggctgatcagcccccagaatgcctcacgtgcttggggagaaagcacccctcttgccaacaagcctggaaagcagagtggccacccaaagtttcctagagttagacataaatctctacaagtaagacaggatggaggaaagagtagactgaagaaaagccagtttctcattaagacacgaaaaaagaaaaaagagaagcacacacaccatgctcctttatctccgaggacctttcaccctctaagaagtgaagcctacaacacattttcagaaagaagacttaagcattcgttggtgcttcataaatccaatgaaacatctcttcccacagacctcaatcagacattgccctctatggattttggctggatagcctcacttcctgaccataatcagaattcctcaaatgacactggtcaggcaagctgtcctccaggtctttatcagacagtgcccccagaggaacactatcaaacattccccattcaagaccctgatcaaatgcactctacttcagaccccagtcacagatcctcttctccagagctcagtgaaatgcttgagtatgaccgaagtcacaagtccttccccacagatataagtcaaatgtccccttcctcagaacatgaagtctggcagacagtcatctctccagacctcagccaggtgaccctctctccagaactcagccagacaaacctctctccagacctcagccacacgactctctctccagaactcattcagagaaacctttccccagccctcggtcagatgcccatttctccagacctcagccatacaaccctttctccagacctcagccatacaaccctttctttagacctcagccagacaaacctctctccagaactcagtcagacaaacctttctccagccctcggtcagatgcccctttctccagacctcagccatacaaccctttctctagacttcagccagacaaacctctctccagaactcagccatatgactctctctccagaactcagtcagacaaacctttccccagccctcggtcagatgcccatttctccagacctcagccatacaaccctttctctagacttcagccagacaaacctctctccagaactcagtcaaacaaacctttccccagccctcggtcagatgcccctttctccagaccccagccatacaaccctttctctagacctcagccagacaaacctctctccagaactcagtcagacaaacctttccccagacctcagtgagatgcccctctttgcagatctcagtcaaattccccttaccccagacctcgaccagatgacactttctccagaccttggtgagacagatctttccccaaactttggtcagatgtccctttccccagacctcagccaggtgactctctctccagacatcagtgacaccacccttctcccggatctcagccagatatcacctcctccagaccttgatcagatattctacccttctgaatctagtcagtcattgcttcttcaagaatttaatgagtcttttccttatccagaccttggtcagatgccatctccttcatctcctactctcaatgatacttttctatcaaaggaatttaatccactggttatagtgggcctcagtaaagatggtacagattacattgagatcattccaaaggaagaggtccagagcagtgaagatgactatgctgaaattgattatgtgccctatgatgacccctacaaaactgatgttaggacaaacatcaactcctccagagatcctgacaacattgcagcatggtacctccgcagcaacaatggaaacagaagaaattattacattgctgctgaagaaatatcctgggattattcagaatttgtacaaagggaaacagatattgaagactctgatgatattccagaagataccacatataagaaagtagtttttcgaaagtacctcgacagcacttttaccaaacgtgatcctcgaggggagtatgaagagcatctcggaattcttggtcctattatcagagctgaagtggatgatgttatccaagttcgttttaaaaatttagcatccagaccgtattctctacatgcccatggactttcctatgaaaaatcatcagagggaaagacttatgaagatgactctcctgaatggtttaaggaagataatgctgttcagccaaatagcagttatacctacgtatggcatgccactgagcgatcagggccagaaagtcctggctctgcctgtcgggcttgggcctactactcagctgtgaacccagaaaaagatattcactcaggcttgataggtcccctcctaatctgccaaaaaggaatactacataaggacagcaacatgcctatggacatgagagaatttgtcttactatttatgacctttgatgaaaagaagagctggtactatgaaaagaagtcccgaagttcttggagactcacatcctcagaaatgaaaaaatcccatgagtttcacgccattaatgggatgatctacagcttgcctggcctgaaaatgtatgagcaagagtgggtgaggttacacctgctgaacataggcggctcccaagacattcacgtggttcactttcacggccagaccttgctggaaaatggcaataaacagcaccagttaggggtctggccccttctgcctggttcatttaaaactcttgaaatgaaggcatcaaaacctggctggtggctcctaaacacagaggttggagaaaaccagagagcagggatgcaaacgccatttcttatcatggacagagactgtaggatgccaatgggactaagcactggtatcatatctgattcacagatcaaggcttcagagtttctgggttactgggagcccagattagcaagattaaacaatggtggatcttataatgcttggagtgtagaaaaacttgcagcagaatttgcctctaaaccttggatccaggtggacatgcaaaaggaagtcataatcacagggatccagacccaaggtgccaaacactacctgaagtcctgctataccacagagttctatgtagcttacagttccaaccagatcaactggcagatcttcaaagggaacagcacaaggaatgtgatgtattttaatggcaattcagatgcctctacaataaaagagaatcagtttgacccacctattgtggctagatatattaggatctctccaactcgagcctataacagacctacccttcgattggaactgcaaggttgtgaggtaaatggatgttccacacccctgggtatggaaaatggaaagatagaaaacaagcaaatcacagcttcttcgtttaagaaatcttggtggggagattactgggaacccttccgtgcccgtctgaatgcccagggacgtgtgaatgcctggcaagccaaggcaaacaacaataagcagtggctagaaattgatctactcaagatcaagaagataacggcaattataacacagggctgcaagtctctgtcctctgaaatgtatgtaaagagctataccatccactacagtgagcagggagtggaatggaaaccatacaggctgaaatcctccatggtggacaagatttttgaaggaaatactaataccaaaggacatgtgaagaactttttcaaccccccaatcatttccaggtttatccgtgtcattcctaaaacatggaatcaaagtattgcacttcgcctggaactctttggctgtgatatttactagaattgaacattcaaaaacccctggaagagactctttaagacctcaaaccatttagaatgggcaatgtattttacgctgtgttaaatgttaacagttttccactatttctctttcttttctattagtgaataaaattttatacaagaa

SEQ ID NO: 120335 - DNA, 7024 bp, Homo sapiens
  Payload ID: 3590
  Gene Symbol: F5
  Gene Name: coagulation factor V (proaccelerin, labile factor)
  Uniprot ID: P12259
  ENST ID: ENST00000367797
  CDS Start-End: 203-6877
aggaaaagccccagaaaaagcggagggagtgagagccagaggctgctgctgccgtttgcaagaactgcaggggaggaggacgctgccacccacagcctctagagctcattgcagctgggacagcccggagtgtggttagcagctcggcaagcgctgcccaggtcctggggtggtggcagccagcgggagcaggaaaggaagcatgttcccaggctgcccacgcctctgggtcctggtggtcttgggcaccagctgggtaggctgggggagccaagggacagaagcggcacagctaaggcagttctacgtggctgctcagggcatcagttggagctaccgacctgagcccacaaactcaagtttgaatctttctgtaacttcctttaagaaaattgtctacagagagtatgaaccatattttaagaaagaaaaaccacaatctaccatttcaggacttcttgggcctactttatatgctgaagtcggagacatcataaaagttcactttaaaaataaggcagataagcccttgagcatccatcctcaaggaattaggtacagtaaattatcagaaggtgcttcttaccttgaccacacattccctgcggagaagatggacgacgctgtggctccaggccgagaatacacctatgaatggagtatcagtgaggacagtggacccacccatgatgaccctccatgcctcacacacatctattactcccatgaaaatctgatcgaggatttcaactcggggctgattgggcccctgcttatctgtaaaaaagggaccctaactgagggtgggacacagaagacgtttgacaagcaaatcgtgctactatttgctgtgtttgatgaaagcaagagctggagccagtcatcatccctaatgtacacagtcaatggatatgtgaatgggacaatgccagatataacagtttgtgcccatgaccacatcagctggcatctgctgggaatgagctcggggccagaattattctccattcatttcaacggccaggtcctggagcagaaccatcataaggtctcagccatcacccttgtcagtgctacatccactaccgcaaatatgactgtgggcccagagggaaagtggatcatatcttctctcaccccaaaacatttgcaagctgggatgcaggcttacattgacattaaaaactgcccaaagaaaaccaggaatcttaagaaaataactcgtgagcagaggcggcacatgaagaggtgggaatacttcattgctgcagaggaagtcatttgggactatgcacctgtaataccagcgaatatggacaaaaaatacaggtctcagcatttggataatttctcaaaccaaattggaaaacattataagaaagttatgtacacacagtacgaagatgagtccttcaccaaacatacagtgaatcccaatatgaaagaagatgggattttgggtcctattatcagagcccaggtcagagacacactcaaaatcgtgttcaaaaatatggccagccgcccctatagcatttaccctcatggagtgaccttctcgccttatgaagatgaagtcaactcttctttcacctcaggcaggaacaacaccatgatcagagcagttcaaccaggggaaacctatacttataagtggaacatcttagagtttgatgaacccacagaaaatgatgcccagtgcttaacaagaccatactacagtgacgtggacatcatgagagacatcgcctctgggctaataggactacttctaatctgtaagagcagatccctggacaggcgaggaatacagagggcagcagacatcgaacagcaggctgtgtttgctgtgtttgatgagaacaaaagctggtaccttgaggacaacatcaacaagttttgtgaaaatcctgatgaggtgaaacgtgatgaccccaagttttatgaatcaaacatcatgagcactatcaatggctatgtgcctgagagcataactactcttggattctgctttgatgacactgtccagtggcacttctgtagtgtggggacccagaatgaaattttgaccatccacttcactgggcactcattcatctatggaaagaggcatgaggacaccttgaccctcttccccatgcgtggagaatctgtgacggtcacaatggataatgttggaacttggatgttaacttccatgaattctagtccaagaagcaaaaagctgaggctgaaattcagggatgttaaatgtatcccagatgatgatgaagactcatatgagatttttgaacctccagaatctacagtcatggctacacggaaaatgcatgatcgtttagaacctgaagatgaagagagtgatgctgactatgattaccagaacagactggctgcagcattaggaatcaggtcattccgaaactcatcattgaatcaggaagaagaagagttcaatcttactgccctagctctggagaatggcactgaattcgtttcttcaaacacagatataattgttggttcaaattattcttccccaagtaatattagtaagttcactgtcaataaccttgcagaacctcagaaagccccttctcaccaacaagccaccacagctggttccccactgagacacctcattggcaagaactcagttctcaattcttccacagcagagcattccagcccatattctgaagaccctatagaggatcctctacagccagatgtcacagggatacgtctactttcacttggtgctggagaattcaaaagtcaagaacatgctaagcataagggacccaaggtagaaagagatcaagcagcaaagcacaggttctcctggatgaaattactagcacataaagttgggagacacctaagccaagacactggttctccttccggaatgaggccctgggaggaccttcctagccaagacactggttctccttccagaatgaggccctggaaggaccctcctagtgatctgttactcttaaaacaaagtaactcatctaagattttggttgggagatggcatttggcttctgagaaaggtagctatgaaataatccaagatactgatgaagacacagctgttaacaattggctgatcagcccccagaatgcctcacgtgcttggggagaaagcacccctcttgccaacaagcctggaaagcagagtggccacccaaagtttcctagagttagacataaatctctacaagtaagacaggatggaggaaagagtagactgaagaaaagccagtttctcattaagacacgaaaaaagaaaaaagagaagcacacacaccatgctcctttatctccgaggacctttcaccctctaagaagtgaagcctacaacacattttcagaaagaagacttaagcattcgttggtgcttcataaatccaatgaaacatctcttcccacagacctcaatcagacattgccctctatggattttggctggatagcctcacttcctgaccataatcagaattcctcaaatgacactggtcaggcaagctgtcctccaggtctttatcagacagtgcccccagaggaacactatcaaacattccccattcaagaccctgatcaaatgcactctacttcagaccccagtcacagatcctcttctccagagctcagtgaaatgcttgagtatgaccgaagtcacaagtccttccccacagatataagtcaaatgtccccttcctcagaacatgaagtctggcagacagtcatctctccagacctcagccaggtgaccctctctccagaactcagccagacaaacctctctccagacctcagccacacgactctctctccagaactcattcagagaaacctttccccagccctcggtcagatgcccatttctccagacctcagccatacaaccctttctccagacctcagccatacaaccctttctttagacctcagccagacaaacctctctccagaactcagtcagacaaacctttctccagccctcggtcagatgcccctttctccagacctcagccatacaaccctttctctagacttcagccagacaaacctctctccagaactcagccatatgactctctctccagaactcagtcagacaaacctttccccagccctcggtcagatgcccatttctccagacctcagccatacaaccctttctctagacttcagccagacaaacctctctccagaactcagtcaaacaaacctttccccagccctcggtcagatgcccctttctccagaccccagccatacaaccctttctctagacctcagccagacaaacctctctccagaactcagtcagacaaacctttccccagacctcagtgagatgcccctctttgcagatctcagtcaaattccccttaccccagacctcgaccagatgacactttctccagaccttggtgagacagatctttccccaaactttggtcagatgtccctttccccagacctcagccaggtgactctctctccagacatcagtgacaccacccttctcccggatctcagccagatatcacctcctccagaccttgatcagatattctacccttctgaatctagtcagtcattgcttcttcaagaatttaatgagtcttttccttatccagaccttggtcagatgccatctccttcatctcctactctcaatgatacttttctatcaaaggaatttaatccactggttatagtgggcctcagtaaagatggtacagattacattgagatcattccaaaggaagaggtccagagcagtgaagatgactatgctgaaattgattatgtgccctatgatgacccctacaaaactgatgttaggacaaacatcaactcctccagagatcctgacaacattgcagcatggtacctccgcagcaacaatggaaacagaagaaattattacattgctgctgaagaaatatcctgggattattcagaatttgtacaaagggaaacagatattgaagactctgatgatattccagaagataccacatataagaaagtagtttttcgaaagtacctcgacagcacttttaccaaacgtgatcctcgaggggagtatgaagagcatctcggaattcttggtcctattatcagagctgaagtggatgatgttatccaagttcgttttaaaaatttagcatccagaccgtattctctacatgcccatggactttcctatgaaaaatcatcagagggaaagacttatgaagatgactctcctgaatggtttaaggaagataatgctgttcagccaaatagcagttatacctacgtatggcatgccactgagcgatcagggccagaaagtcctggctctgcctgtcgggcttgggcctactactcagctgtgaacccagaaaaagatattcactcaggcttgataggtcccctcctaatctgccaaaaaggaatactacataaggacagcaacatgcctatggacatgagagaatttgtcttactatttatgacctttgatgaaaagaagagctggtactatgaaaagaagtcccgaagttcttggagactcacatcctcagaaatgaaaaaatcccatgagtttcacgccattaatgggatgatctacagcttgcctggcctgaaaatgtatgagcaagagtgggtgaggttacacctgctgaacataggcggctcccaagacattcacgtggttcactttcacggccagaccttgctggaaaatggcaataaacagcaccagttaggggtctggccccttctgcctggttcatttaaaactcttgaaatgaaggcatcaaaacctggctggtggctcctaaacacagaggttggagaaaaccagagagcagggatgcaaacgccatttcttatcatggacagagactgtaggatgccaatgggactaagcactggtatcatatctgattcacagatcaaggcttcagagtttctgggttactgggagcccagattagcaagattaaacaatggtggatcttataatgcttggagtgtagaaaaacttgcagcagaatttgcctctaaaccttggatccaggtggacatgcaaaaggaagtcataatcacagggatccagacccaaggtgccaaacactacctgaagtcctgctataccacagagttctatgtagcttacagttccaaccagatcaactggcagatcttcaaagggaacagcacaaggaatgtgatgtattttaatggcaattcagatgcctctacaataaaagagaatcagtttgacccacctattgtggctagatatattaggatctctccaactcgagcctataacagacctacccttcgattggaactgcaaggttgtgaggtaaatggatgttccacacccctgggtatggaaaatggaaagatagaaaacaagcaaatcacagcttcttcgtttaagaaatcttggtggggagattactgggaacccttccgtgcccgtctgaatgcccagggacgtgtgaatgcctggcaagccaaggcaaacaacaataagcagtggctagaaattgatctactcaagatcaagaagataacggcaattataacacagggctgcaagtctctgtcctctgaaatgtatgtaaagagctataccatccactacagtgagcagggagtggaatggaaaccatacaggctgaaatcctccatggtggacaagatttttgaaggaaatactaataccaaaggacatgtgaagaactttttcaaccccccaatcatttccaggtttatccgtgtcattcctaaaacatggaatcaaagtattgcacttcgcctggaactctttggctgtgatatttactagaattgaacattcaaaaacccctggaagagactctttaagacctcaaaccatttagaatgggcaatgtattttacgctgtgttaaatgttaacagttttccactatttctctttcttttctattagtgaataaaattttatacaagaa

SEQ ID NO: 120336 - DNA, 2409 bp, Homo sapiens
  Payload ID: 3591
  Gene Symbol: F7
  Gene Name: coagulation factor VII (serum prothrombin conversion accelerator)
  Uniprot ID: P08709
  ENST ID: ENST00000346342
  CDS Start-End: 52-1386
agtcccatggggaatgtcaacaggcaggggcagcactgcagagatttcatcatggtctcccaggccctcaggctcctctgccttctgcttgggcttcagggctgcctggctgcagtcttcgtaacccaggaggaagcccacggcgtcctgcaccggcgccggcgcgccaacgcgttcctggaggagctgcggccgggctccctggagagggagtgcaaggaggagcagtgctccttcgaggaggcccgggagatcttcaaggacgcggagaggacgaagctgttctggatttcttacagtgatggggaccagtgtgcctcaagtccatgccagaatgggggctcctgcaaggaccagctccagtcctatatctgcttctgcctccctgccttcgagggccggaactgtgagacgcacaaggatgaccagctgatctgtgtgaacgagaacggcggctgtgagcagtactgcagtgaccacacgggcaccaagcgctcctgtcggtgccacgaggggtactctctgctggcagacggggtgtcctgcacacccacagttgaatatccatgtggaaaaatacctattctagaaaaaagaaatgccagcaaaccccaaggccgaattgtggggggcaaggtgtgccccaaaggggagtgtccatggcaggtcctgttgttggtgaatggagctcagttgtgtggggggaccctgatcaacaccatctgggtggtctccgcggcccactgtttcgacaaaatcaagaactggaggaacctgatcgcggtgctgggcgagcacgacctcagcgagcacgacggggatgagcagagccggcgggtggcgcaggtcatcatccccagcacgtacgtcccgggcaccaccaaccacgacatcgcgctgctccgcctgcaccagcccgtggtcctcactgaccatgtggtgcccctctgcctgcccgaacggacgttctctgagaggacgctggccttcgtgcgcttctcattggtcagcggctggggccagctgctggaccgtggcgccacggccctggagctcatggtcctcaacgtgccccggctgatgacccaggactgcctgcagcagtcacggaaggtgggagactccccaaatatcacggagtacatgttctgtgccggctactcggatggcagcaaggactcctgcaagggggacagtggaggcccacatgccacccactaccggggcacgtggtacctgacgggcatcgtcagctggggccagggctgcgcaaccgtgggccactttggggtgtacaccagggtctcccagtacatcgagtggctgcaaaagctcatgcgctcagagccacgcccaggagtcctcctgcgagccccatttccctagcccagcagccctggcctgtggagagaaagccaaggctgcgtcgaactgtcctggcaccaaatcccatatattcttctgcagttaatggggtagaggagggcatgggagggagggagaggtggggagggagacagagacagaaacagagagagacagagacagagagagactgagggagagactctgaggacatggagagagactcaaagagactccaagattcaaagagactaatagagacacagagatggaatagaaaagatgagaggcagaggcagacaggcgctggacagaggggcaggggagtgccaaggttgtcctggaggcagacagcccagctgagcctccttacctcccttcagccaagcccacctgcacgtgatctgctggcctcaggctgctgctctgccttcattgctggagacagtagaggcatgaacacacatggatgcacacacacacacgccaatgcacacacacagagatatgcacacacacggatgcacacacagatggtcacacagagatacgcaaacacaccgatgcacacgcacatagagatatgcacacacagatgcacacacagatatacacatggatgcacgcacatgccaatgcacgcacacatcagtgcacacggatgcacagagatatgcacacaccgatgtgcgcacacacagatatgcacacacatggatgagcacacacacaccaatgcgcacacacaccgatgtacacacacagatgcacacacagatgcacacacaccgatgctgactccatgtgtgctgtcctctgaaggcggttgtttagctctcacttttctggttcttatccattatcatcttcacttcagacaattcagaagcatcaccatgcatggtggcgaatgcccccaaactctcccccaaatgtatttctcccttcgctgggtgccgggctgcacagactattccccacctgcttcccagcttcacaataaacggctgcgtctcctccgcacacctgtggtgcctgccaccc

SEQ ID NO: 120337 - DNA, 3109 bp, Homo sapiens
  Payload ID: 3591
  Gene Symbol: F7
  Gene Name: coagulation factor VII (serum prothrombin conversion accelerator)
  Uniprot ID: P08709
  ENST ID: ENST00000375581
  CDS Start-End: 36-1436
tcaacaggcaggggcagcactgcagagatttcatcatggtctcccaggccctcaggctcctctgccttctgcttgggcttcagggctgcctggctgcaggcggggtcgctaaggcctcaggaggagaaacacgggacatgccgtggaagccggggcctcacagagtcttcgtaacccaggaggaagcccacggcgtcctgcaccggcgccggcgcgccaacgcgttcctggaggagctgcggccgggctccctggagagggagtgcaaggaggagcagtgctccttcgaggaggcccgggagatcttcaaggacgcggagaggacgaagctgttctggatttcttacagtgatggggaccagtgtgcctcaagtccatgccagaatgggggctcctgcaaggaccagctccagtcctatatctgcttctgcctccctgccttcgagggccggaactgtgagacgcacaaggatgaccagctgatctgtgtgaacgagaacggcggctgtgagcagtactgcagtgaccacacgggcaccaagcgctcctgtcggtgccacgaggggtactctctgctggcagacggggtgtcctgcacacccacagttgaatatccatgtggaaaaatacctattctagaaaaaagaaatgccagcaaaccccaaggccgaattgtggggggcaaggtgtgccccaaaggggagtgtccatggcaggtcctgttgttggtgaatggagctcagttgtgtggggggaccctgatcaacaccatctgggtggtctccgcggcccactgtttcgacaaaatcaagaactggaggaacctgatcgcggtgctgggcgagcacgacctcagcgagcacgacggggatgagcagagccggcgggtggcgcaggtcatcatccccagcacgtacgtcccgggcaccaccaaccacgacatcgcgctgctccgcctgcaccagcccgtggtcctcactgaccatgtggtgcccctctgcctgcccgaacggacgttctctgagaggacgctggccttcgtgcgcttctcattggtcagcggctggggccagctgctggaccgtggcgccacggccctggagctcatggtcctcaacgtgccccggctgatgacccaggactgcctgcagcagtcacggaaggtgggagactccccaaatatcacggagtacatgttctgtgccggctactcggatggcagcaaggactcctgcaagggggacagtggaggcccacatgccacccactaccggggcacgtggtacctgacgggcatcgtcagctggggccagggctgcgcaaccgtgggccactttggggtgtacaccagggtctcccagtacatcgagtggctgcaaaagctcatgcgctcagagccacgcccaggagtcctcctgcgagccccatttccctagcccagcagccctggcctgtggagagaaagccaaggctgcgtcgaactgtcctggcaccaaatcccatatattcttctgcagttaatggggtagaggagggcatgggagggagggagaggtggggagggagacagagacagaaacagagagagacagagacagagagagactgagggagagactctgaggacatggagagagactcaaagagactccaagattcaaagagactaatagagacacagagatggaatagaaaagatgagaggcagaggcagacaggcgctggacagaggggcaggggagtgccaaggttgtcctggaggcagacagcccagctgagcctccttacctcccttcagccaagcccacctgcacgtgatctgctggcctcaggctgctgctctgccttcattgctggagacagtagaggcatgaacacacatggatgcacacacacacacgccaatgcacacacacagagatatgcacacacacggatgcacacacagatggtcacacagagatacgcaaacacaccgatgcacacgcacatagagatatgcacacacagatgcacacacagatatacacatggatgcacgcacatgccaatgcacgcacacatcagtgcacacggatgcacagagatatgcacacaccgatgtgcgcacacacagatatgcacacacatggatgagcacacacacaccaatgcgcacacacaccgatgtacacacacagatgcacacacagatgcacacacaccgatgctgactccatgtgtgctgtcctctgaaggcggttgtttagctctcacttttctggttcttatccattatcatcttcacttcagacaattcagaagcatcaccatgcatggtggcgaatgcccccaaactctcccccaaatgtatttctcccttcgctgggtgccgggctgcacagactattccccacctgcttcccagcttcacaataaacggctgcgtctcctccgcacacctgtggtgcctgccacccactgggttgcccatgattcatttttggagcccccggtgctcatcctctgagatgctcttttctttcacaattttcaacatcactgaaatgaaccctcacatggaagctattttttaaaaacaaaagctgtttgatagatgtttgaggctgtagctcccaggatcctgtggaattggatgttctctccctgccacagcccttgtcaatgatatttcacagagaccctgggagcacctgctcaagagtcagggacacacgcatcactaaatgcaagttcccaggccctggctgcagtgggaggacctggcaagctgcactcttgctgagtccccagggtggtggaagaagaatgagaaacacatgaacagagaaatggggaggtgacaaacagtgcccccactcagactccggcaagcacggctcagagagtggactcgatgccatccctgcagggccgtcctgggcaccactggcactcacagcagcaaggtgggcaccattggcactcacagcagcaaggcaggcaccagcaacccacctcgggggcactcaggcatcatctacttcagagcagacagggtctatgaactacagccgtgggctgcttccaaggcaccctgctcttgtaaataaagttttatgggaacaca

SEQ ID NO: 120338 - DNA, 564 bp, Homo sapiens
  Payload ID: 3591
  Gene Symbol: F7
  Gene Name: coagulation factor VII (serum prothrombin conversion accelerator)
  ENST ID: ENST00000444337
  CDS Start-End: 4-228
atcatggtctcccaggccctcaggctcctctgccttctgcttgggcttcagggctgcctggctgcaggaggaagcccacggcgtcctgcaccggcgccggcgcgccaacgcgttcctggaggagctgcggccgggctccctggagagggagtgcaaggaggagcagtgctccttcgaggaggcccgggagatcttcaaggacgcggagaggacgtggtgagtggatgatcaccaccagtcctgcctgcaacccttctcagcttactgacaccagcccactccacagatggggaccagtgtgcctcaagtccatgccagaatgggggctcctgcaaggaccagctccagtcctatatctgcttctgcctccctgccttcgagggccggaactgtgagacgcacaaggatgaccagctgatctgtgtgaacgagaacggcggctgtgagcagtactgcagtgaccacacgggcaccaagcgctcctgtcggtgccacgaggggtactctctgctggcagacggggtgtcctgcacacccacagttgaatatccatgtggaaaaata

SEQ ID NO: 120339 - DNA, 2873 bp, Homo sapiens
  Payload ID: 3591
  Gene Symbol: F7
  Gene Name: coagulation factor VII (serum prothrombin conversion accelerator)
  ENST ID: ENST00000541084
  CDS Start-End: 55-1203
gtcagtcccatggggaatgtcaacaggcaggggcagcactgcagagatttcatcatggtctcccaggccctcaggctcctctgccttctgcttgggcttcagggctgcctggctgcagatggggaccagtgtgcctcaagtccatgccagaatgggggctcctgcaaggaccagctccagtcctatatctgcttctgcctccctgccttcgagggccggaactgtgagacgcacaaggatgaccagctgatctgtgtgaacgagaacggcggctgtgagcagtactgcagtgaccacacgggcaccaagcgctcctgtcggtgccacgaggggtactctctgctggcagacggggtgtcctgcacacccacagttgaatatccatgtggaaaaatacctattctagaaaaaagaaatgccagcaaaccccaaggccgaattgtggggggcaaggtgtgccccaaaggggagtgtccatggcaggtcctgttgttggtgaatggagctcagttgtgtggggggaccctgatcaacaccatctgggtggtctccgcggcccactgtttcgacaaaatcaagaactggaggaacctgatcgcggtgctgggcgagcacgacctcagcgagcacgacggggatgagcagagccggcgggtggcgcaggtcatcatccccagcacgtacgtcccgggcaccaccaaccacgacatcgcgctgctccgcctgcaccagcccgtggtcctcactgaccatgtggtgcccctctgcctgcccgaacggacgttctctgagaggacgctggccttcgtgcgcttctcattggtcagcggctggggccagctgctggaccgtggcgccacggccctggagctcatggtcctcaacgtgccccggctgatgacccaggactgcctgcagcagtcacggaaggtgggagactccccaaatatcacggagtacatgttctgtgccggctactcggatggcagcaaggactcctgcaagggggacagtggaggcccacatgccacccactaccggggcacgtggtacctgacgggcatcgtcagctggggccagggctgcgcaaccgtgggccactttggggtgtacaccagggtctcccagtacatcgagtggctgcaaaagctcatgcgctcagagccacgcccaggagtcctcctgcgagccccatttccctagcccagcagccctggcctgtggagagaaagccaaggctgcgtcgaactgtcctggcaccaaatcccatatattcttctgcagttaatggggtagaggagggcatgggagggagggagaggtggggagggagacagagacagaaacagagagagacagagacagagagagactgagggagagactctgaggacatggagagagactcaaagagactccaagattcaaagagactaatagagacacagagatggaatagaaaagatgagaggcagaggcagacaggcgctggacagaggggcaggggagtgccaaggttgtcctggaggcagacagcccagctgagcctccttacctcccttcagccaagcccacctgcacgtgatctgctggcctcaggctgctgctctgccttcattgctggagacagtagaggcatgaacacacatggatgcacacacacacacgccaatgcacacacacagagatatgcacacacacggatgcacacacagatggtcacacagagatacgcaaacacaccgatgcacacgcacatagagatatgcacacacagatgcacacacagatatacacatggatgcacgcacatgccaatgcacgcacacatcagtgcacacggatgcacagagatatgcacacaccgatgtgcgcacacacagatatgcacacacatggatgagcacacacacaccaatgcgcacacacaccgatgtacacacacagatgcacacacagatgcacacacaccgatgctgactccatgtgtgctgtcctctgaaggcggttgtttagctctcacttttctggttcttatccattatcatcttcacttcagacaattcagaagcatcaccatgcatggtggcgaatgcccccaaactctcccccaaatgtatttctcccttcgctgggtgccgggctgcacagactattccccacctgcttcccagcttcacaataaacggctgcgtctcctccgcacacctgtggtgcctgccacccactgggttgcccatgattcatttttggagcccccggtgctcatcctctgagatgctcttttctttcacaattttcaacatcactgaaatgaaccctcacatggaagctattttttaaaaacaaaagctgtttgatagatgtttgaggctgtagctcccaggatcctgtggaattggatgttctctccctgccacagcccttgtcaatgatatttcacagagaccctgggagcacctgctcaagagtcagggacacacgcatcactaaatgcaagttcccaggccctggctgcagtgggaggacctggcaagctgcactcttgctgagtccccagggtggtggaagaagaatgagaaacacatgaacagagaaatggggaggtgacaaacagtgcccccactcagactccggcaagcacggctcagagagtggactcgatgccatccctgcagggccgtcctgggcaccactggcactcacagcagcaaggtgggcaccattggcactcacagcagcaaggcaggcaccagcaacccacctcgggggcactcaggcatcatctacttcagagcagacagggtctatgaactacagccgtgggctgcttccaaggcaccctgctcttgtaaataaagttttatgggaac

SEQ ID NO: 120340 - DNA, 2620 bp, Homo sapiens
  Payload ID: 3592
  Gene Symbol: F8
  Gene Name: coagulation factor VIII, procoagulant component
  Uniprot ID: P00451
  ENST ID: ENST00000330287
  CDS Start-End: 161-811
ggggcgacgtgccctgcgtccccctcggcgggctgccgccgtgcccgcgccggctccccagcccgagcctgccccttgccctgatgaggtgcaaagagcgggatcggaggcggggcctggccgggctgtgagcggcgtatgcaaatcgagggtctcggggatgcggatccaagaccctgggaaggtcttctttggcaatgtggattcatctgggataaaacacaatatttttaaccctccaattattgctcgatacatccgtttgcacccaactcattatagcattcgcagcactcttcgcatggagttgatgggctgtgatttaaatagttgcagcatgccattgggaatggagagtaaagcaatatcagatgcacagattactgcttcatcctactttaccaatatgtttgccacctggtctccttcaaaagctcgacttcacctccaagggaggagtaatgcctggagacctcaggtgaataatccaaaagagtggctgcaagtggacttccagaagacaatgaaagtcacaggagtaactactcagggagtaaaatctctgcttaccagcatgtatgtgaaggagttcctcatctccagcagtcaagatggccatcagtggactctcttttttcagaatggcaaagtaaaggtttttcagggaaatcaagactccttcacacctgtggtgaactctctagacccaccgttactgactcgctaccttcgaattcacccccagagttgggtgcaccagattgccctgaggatggaggttctgggctgcgaggcacaggacctctactgagggtggccactgcagcacctgccactgccgtcacctctccctcctcagctccagggcagtgtccctccctggcttgccttctacctttgtgctaaatcctagcagacactgccttgaagcctcctgaattaactatcatcagtcctgcatttctttggtggggggccaggagggtgcatccaatttaacttaactcttacctattttctgcagctgctcccagattactccttccttccaatataactaggcaaaaagaagtgaggagaaacctgcatgaaagcattcttccctgaaaagttaggcctctcagagtcaccacttcctctgttgtagaaaaactatgtgatgaaactttgaaaaagatatttatgatgttaacatttcaggttaagcctcatacgtttaaaataaaactctcagttgtttattatcctgatcaagcatggaacaaagcatgtttcaggatcagatcaatacaatcttggagtcaaaaggcaaatcatttggacaatctgcaaaatggagagaatacaataactactacagtaaagtctgtttctgcttccttacacatagatataattatgttatttagtcattatgaggggcacattcttatctccaaaactagcattcttaaactgagaattatagatggggttcaagaatccctaagtcccctgaaattatataaggcattctgtataaatgcaaatgtgcatttttctgacgagtgtccatagatataaagccatttggtcttaattctgaccaataaaaaaataagtcaggaggatgcaattgttgaaagctttgaaataaaataacaatgtcttcttgaaatttgtgatggccaagaaagaaaatgatgatgacattaggcttctaaaggacatacatttaatatttctgtggaaatatgaggaaaatccatggttatctgagataggagatacaaactttgtaattctaataatgcactcagtttactctctccctctactaatttcctgctgaaaataacacaacaaaaatgtaacaggggaaattatataccgtgactgaaaactagagtcctacttacatagttgaaatatcaaggaggtcagaagaaaattggactggtgaaaacagaaaaaacactccagtctgccatatcaccacacaataggatcccccttcttgccctccacccccataagattgtgaagggtttactgctccttccatctgcctgaccccttcactatgactacacagaatctcctgatagtaaagggggctggagacaaggataagttatagagcagttggaggaagcatccaaagattgcaacccagggcaaatggaaaacaggagatcctaatatgaaagaaaaatggatcccaatctgagaaaaggcaaaagaatggctacttttttctatgctggagtattttctaataatcctgcttgacccttatctgacctctttggaaactataacatagctgtcacagtatagtcacaatccacaaatgatgcaggtgcaaatggtttatagccctgtgaagttcttaaagtttagaggctaacttacagaaatgaataagttgttttgttttatagcccggtagaggagttaaccccaaaggtgatatggttttatttcctgttatgtttaacttgataatcttattttggcattcttttcccattgactatatacatctctatttctcaaatgttcatggaactagctcttttattttcctgctggtttcttcagtaatgagttaaataaaacattgacacatacaaacaaa

SEQ ID NO: 120341 - DNA, 9059 bp, Homo sapiens
  Payload ID: 3592
  Gene Symbol: F8
  Gene Name: coagulation factor VIII, procoagulant component
  Uniprot ID: P00451
  ENST ID: ENST00000360256
  CDS Start-End: 202-7257
gataaaaaggaagcaatcctatcggttactgcttagtgctgagcacatccagtgggtaaagttccttaaaatgctctgcaaagaaattgggacttttcattaaatcagaaattttacttttttcccctcctgggagctaaagatattttagagaagaattaaccttttgcttctccagttgaacatttgtagcaataagtcatgcaaatagagctctccacctgcttctttctgtgccttttgcgattctgctttagtgccaccagaagatactacctgggtgcagtggaactgtcatgggactatatgcaaagtgatctcggtgagctgcctgtggacgcaagatttcctcctagagtgccaaaatcttttccattcaacacctcagtcgtgtacaaaaagactctgtttgtagaattcacggatcaccttttcaacatcgctaagccaaggccaccctggatgggtctgctaggtcctaccatccaggctgaggtttatgatacagtggtcattacacttaagaacatggcttcccatcctgtcagtcttcatgctgttggtgtatcctactggaaagcttctgagggagctgaatatgatgatcagaccagtcaaagggagaaagaagatgataaagtcttccctggtggaagccatacatatgtctggcaggtcctgaaagagaatggtccaatggcctctgacccactgtgccttacctactcatatctttctcatgtggacctggtaaaagacttgaattcaggcctcattggagccctactagtatgtagagaagggagtctggccaaggaaaagacacagaccttgcacaaatttatactactttttgctgtatttgatgaagggaaaagttggcactcagaaacaaagaactccttgatgcaggatagggatgctgcatctgctcgggcctggcctaaaatgcacacagtcaatggttatgtaaacaggtctctgccaggtctgattggatgccacaggaaatcagtctattggcatgtgattggaatgggcaccactcctgaagtgcactcaatattcctcgaaggtcacacatttcttgtgaggaaccatcgccaggcgtccttggaaatctcgccaataactttccttactgctcaaacactcttgatggaccttggacagtttctactgttttgtcatatctcttcccaccaacatgatggcatggaagcttatgtcaaagtagacagctgtccagaggaaccccaactacgaatgaaaaataatgaagaagcggaagactatgatgatgatcttactgattctgaaatggatgtggtcaggtttgatgatgacaactctccttcctttatccaaattcgctcagttgccaagaagcatcctaaaacttgggtacattacattgctgctgaagaggaggactgggactatgctcccttagtcctcgcccccgatgacagaagttataaaagtcaatatttgaacaatggccctcagcggattggtaggaagtacaaaaaagtccgatttatggcatacacagatgaaacctttaagactcgtgaagctattcagcatgaatcaggaatcttgggacctttactttatggggaagttggagacacactgttgattatatttaagaatcaagcaagcagaccatataacatctaccctcacggaatcactgatgtccgtcctttgtattcaaggagattaccaaaaggtgtaaaacatttgaaggattttccaattctgccaggagaaatattcaaatataaatggacagtgactgtagaagatgggccaactaaatcagatcctcggtgcctgacccgctattactctagtttcgttaatatggagagagatctagcttcaggactcattggccctctcctcatctgctacaaagaatctgtagatcaaagaggaaaccagataatgtcagacaagaggaatgtcatcctgttttctgtatttgatgagaaccgaagctggtacctcacagagaatatacaacgctttctccccaatccagctggagtgcagcttgaggatccagagttccaagcctccaacatcatgcacagcatcaatggctatgtttttgatagtttgcagttgtcagtttgtttgcatgaggtggcatactggtacattctaagcattggagcacagactgacttcctttctgtcttcttctctggatataccttcaaacacaaaatggtctatgaagacacactcaccctattcccattctcaggagaaactgtcttcatgtcgatggaaaacccaggtctatggattctggggtgccacaactcagactttcggaacagaggcatgaccgccttactgaaggtttctagttgtgacaagaacactggtgattattacgaggacagttatgaagatatttcagcatacttgctgagtaaaaacaatgccattgaaccaagaagcttctcccagaattcaagacaccctagcactaggcaaaagcaatttaatgccaccacaattccagaaaatgacatagagaagactgacccttggtttgcacacagaacacctatgcctaaaatacaaaatgtctcctctagtgatttgttgatgctcttgcgacagagtcctactccacatgggctatccttatctgatctccaagaagccaaatatgagactttttctgatgatccatcacctggagcaatagacagtaataacagcctgtctgaaatgacacacttcaggccacagctccatcacagtggggacatggtatttacccctgagtcaggcctccaattaagattaaatgagaaactggggacaactgcagcaacagagttgaagaaacttgatttcaaagtttctagtacatcaaataatctgatttcaacaattccatcagacaatttggcagcaggtactgataatacaagttccttaggacccccaagtatgccagttcattatgatagtcaattagataccactctatttggcaaaaagtcatctccccttactgagtctggtggacctctgagcttgagtgaagaaaataatgattcaaagttgttagaatcaggtttaatgaatagccaagaaagttcatggggaaaaaatgtatcgtcaacagagagtggtaggttatttaaagggaaaagagctcatggacctgctttgttgactaaagataatgccttattcaaagttagcatctctttgttaaagacaaacaaaacttccaataattcagcaactaatagaaagactcacattgatggcccatcattattaattgagaatagtccatcagtctggcaaaatatattagaaagtgacactgagtttaaaaaagtgacacctttgattcatgacagaatgcttatggacaaaaatgctacagctttgaggctaaatcatatgtcaaataaaactacttcatcaaaaaacatggaaatggtccaacagaaaaaagagggccccattccaccagatgcacaaaatccagatatgtcgttctttaagatgctattcttgccagaatcagcaaggtggatacaaaggactcatggaaagaactctctgaactctgggcaaggccccagtccaaagcaattagtatccttaggaccagaaaaatctgtggaaggtcagaatttcttgtctgagaaaaacaaagtggtagtaggaaagggtgaatttacaaaggacgtaggactcaaagagatggtttttccaagcagcagaaacctatttcttactaacttggataatttacatgaaaataatacacacaatcaagaaaaaaaaattcaggaagaaatagaaaagaaggaaacattaatccaagagaatgtagttttgcctcagatacatacagtgactggcactaagaatttcatgaagaaccttttcttactgagcactaggcaaaatgtagaaggttcatatgacggggcatatgctccagtacttcaagattttaggtcattaaatgattcaacaaatagaacaaagaaacacacagctcatttctcaaaaaaaggggaggaagaaaacttggaaggcttgggaaatcaaaccaagcaaattgtagagaaatatgcatgcaccacaaggatatctcctaatacaagccagcagaattttgtcacgcaacgtagtaagagagctttgaaacaattcagactcccactagaagaaacagaacttgaaaaaaggataattgtggatgacacctcaacccagtggtccaaaaacatgaaacatttgaccccgagcaccctcacacagatagactacaatgagaaggagaaaggggccattactcagtctcccttatcagattgccttacgaggagtcatagcatccctcaagcaaatagatctccattacccattgcaaaggtatcatcatttccatctattagacctatatatctgaccagggtcctattccaagacaactcttctcatcttccagcagcatcttatagaaagaaagattctggggtccaagaaagcagtcatttcttacaaggagccaaaaaaaataacctttctttagccattctaaccttggagatgactggtgatcaaagagaggttggctccctggggacaagtgccacaaattcagtcacatacaagaaagttgagaacactgttctcccgaaaccagacttgcccaaaacatctggcaaagttgaattgcttccaaaagttcacatttatcagaaggacctattccctacggaaactagcaatgggtctcctggccatctggatctcgtggaagggagccttcttcagggaacagagggagcgattaagtggaatgaagcaaacagacctggaaaagttccctttctgagagtagcaacagaaagctctgcaaagactccctccaagctattggatcctcttgcttgggataaccactatggtactcagataccaaaagaagagtggaaatcccaagagaagtcaccagaaaaaacagcttttaagaaaaaggataccattttgtccctgaacgcttgtgaaagcaatcatgcaatagcagcaataaatgagggacaaaataagcccgaaatagaagtcacctgggcaaagcaaggtaggactgaaaggctgtgctctcaaaacccaccagtcttgaaacgccatcaacgggaaataactcgtactactcttcagtcagatcaagaggaaattgactatgatgataccatatcagttgaaatgaagaaggaagattttgacatttatgatgaggatgaaaatcagagcccccgcagctttcaaaagaaaacacgacactattttattgctgcagtggagaggctctgggattatgggatgagtagctccccacatgttctaagaaacagggctcagagtggcagtgtccctcagttcaagaaagttgttttccaggaatttactgatggctcctttactcagcccttataccgtggagaactaaatgaacatttgggactcctggggccatatataagagcagaagttgaagataatatcatggtaactttcagaaatcaggcctctcgtccctattccttctattctagccttatttcttatgaggaagatcagaggcaaggagcagaacctagaaaaaactttgtcaagcctaatgaaaccaaaacttacttttggaaagtgcaacatcatatggcacccactaaagatgagtttgactgcaaagcctgggcttatttctctgatgttgacctggaaaaagatgtgcactcaggcctgattggaccccttctggtctgccacactaacacactgaaccctgctcatgggagacaagtgacagtacaggaatttgctctgtttttcaccatctttgatgagaccaaaagctggtacttcactgaaaatatggaaagaaactgcagggctccctgcaatatccagatggaagatcccacttttaaagagaattatcgcttccatgcaatcaatggctacataatggatacactacctggcttagtaatggctcaggatcaaaggattcgatggtatctgctcagcatgggcagcaatgaaaacatccattctattcatttcagtggacatgtgttcactgtacgaaaaaaagaggagtataaaatggcactgtacaatctctatccaggtgtttttgagacagtggaaatgttaccatccaaagctggaatttggcgggtggaatgccttattggcgagcatctacatgctgggatgagcacactttttctggtgtacagcaataagtgtcagactcccctgggaatggcttctggacacattagagattttcagattacagcttcaggacaatatggacagtgggccccaaagctggccagacttcattattccggatcaatcaatgcctggagcaccaaggagcccttttcttggatcaaggtggatctgttggcaccaatgattattcacggcatcaagacccagggtgcccgtcagaagttctccagcctctacatctctcagtttatcatcatgtatagtcttgatgggaagaagtggcagacttatcgaggaaattccactggaaccttaatggtcttctttggcaatgtggattcatctgggataaaacacaatatttttaaccctccaattattgctcgatacatccgtttgcacccaactcattatagcattcgcagcactcttcgcatggagttgatgggctgtgatttaaatagttgcagcatgccattgggaatggagagtaaagcaatatcagatgcacagattactgcttcatcctactttaccaatatgtttgccacctggtctccttcaaaagctcgacttcacctccaagggaggagtaatgcctggagacctcaggtgaataatccaaaagagtggctgcaagtggacttccagaagacaatgaaagtcacaggagtaactactcagggagtaaaatctctgcttaccagcatgtatgtgaaggagttcctcatctccagcagtcaagatggccatcagtggactctcttttttcagaatggcaaagtaaaggtttttcagggaaatcaagactccttcacacctgtggtgaactctctagacccaccgttactgactcgctaccttcgaattcacccccagagttgggtgcaccagattgccctgaggatggaggttctgggctgcgaggcacaggacctctactgagggtggccactgcagcacctgccactgccgtcacctctccctcctcagctccagggcagtgtccctccctggcttgccttctacctttgtgctaaatcctagcagacactgccttgaagcctcctgaattaactatcatcagtcctgcatttctttggtggggggccaggagggtgcatccaatttaacttaactcttacctattttctgcagctgctcccagattactccttccttccaatataactaggcaaaaagaagtgaggagaaacctgcatgaaagcattcttccctgaaaagttaggcctctcagagtcaccacttcctctgttgtagaaaaactatgtgatgaaactttgaaaaagatatttatgatgttaacatttcaggttaagcctcatacgtttaaaataaaactctcagttgtttattatcctgatcaagcatggaacaaagcatgtttcaggatcagatcaatacaatcttggagtcaaaaggcaaatcatttggacaatctgcaaaatggagagaatacaataactactacagtaaagtctgtttctgcttccttacacatagatataattatgttatttagtcattatgaggggcacattcttatctccaaaactagcattcttaaactgagaattatagatggggttcaagaatccctaagtcccctgaaattatataaggcattctgtataaatgcaaatgtgcatttttctgacgagtgtccatagatataaagccatttggtcttaattctgaccaataaaaaaataagtcaggaggatgcaattgttgaaagctttgaaataaaataacaatgtcttcttgaaatttgtgatggccaagaaagaaaatgatgatgacattaggcttctaaaggacatacatttaatatttctgtggaaatatgaggaaaatccatggttatctgagataggagatacaaactttgtaattctaataatgcactcagtttactctctccctctactaatttcctgctgaaaataacacaacaaaaatgtaacaggggaaattatataccgtgactgaaaactagagtcctacttacatagttgaaatatcaaggaggtcagaagaaaattggactggtgaaaacagaaaaaacactccagtctgccatatcaccacacaataggatcccccttcttgccctccacccccataagattgtgaagggtttactgctccttccatctgcctgaccccttcactatgactacacagaatctcctgatagtaaagggggctggagacaaggataagttatagagcagttggaggaagcatccaaagattgcaacccagggcaaatggaaaacaggagatcctaatatgaaagaaaaatggatcccaatctgagaaaaggcaaaagaatggctacttttttctatgctggagtattttctaataatcctgcttgacccttatctgacctctttggaaactataacatagctgtcacagtatagtcacaatccacaaatgatgcaggtgcaaatggtttatagccctgtgaagttcttaaagtttagaggctaacttacagaaatgaataagttgttttgttttatagcccggtagaggagttaaccccaaaggtgatatggttttatttcctgttatgtttaacttgataatcttattttggcattcttttcccattgactatatacatctctatttctcaaatgttcatggaactagctcttttattttcctgctggtttcttcagtaatgagttaaataaaacattgacacatac

SEQ ID NO: 120342 - DNA, 545 bp, Homo sapiens
  Payload ID: 3592
  Gene Symbol: F8
  Gene Name: coagulation factor VIII, procoagulant component
  ENST ID: ENST00000453950
  CDS Start-End: 52-545
atcacagagctcagcgtgcggtgtcacaggccccgcggtcccgcccaacagatgcaccgagatgcgcgtgcgcagaaagcgtcccggggtgccaccagaagatactacctgggtgcagtggaactgtcatgggactatatgcaaagtgatctcggtgagctgcctgtggacgcaagatttcctcctagagtgccaaaatcttttccattcaacacctcagtcgtgtacaaaaagactctgtttgtagaattcacggatcaccttttcaacatcgctaagccaaggccaccctggatgggtctgctaggtcctaccatccaggctgaggtttatgatacagtggtcattacacttaagaacatggcttcccatcctgtcagtcttcatgctgttggtgtatcctactggaaagcttctgagggagctgaatatgatgatcagaccagtcaaagggagaaagaagatgataaagtcttccctggtggaagccatacatatgtctggcaggtcctgaaagagaatggtccaatggcctctgacccact

SEQ ID NO: 120343 - DNA, 791 bp, Homo sapiens
  Payload ID: 3592
  Gene Symbol: F8
  Gene Name: coagulation factor VIII, procoagulant component
  ENST ID: ENST00000423959
  CDS Start-End: 124-791
attcccacggcggcagcggaagagggagggccgggcgcgccgcggctgcttgcagtctccgcaagcggctacatcacagagctcagcgtgcggtgtcacaggccccgcggtcccgcccaacagatgcaccgagatgcgcgtgcgcagaaagcgtcccggggatttcctcctagagtgccaaaatcttttccattcaacacctcagtcgtgtacaaaaagactctgtttgtagaattcacggatcaccttttcaacatcgctaagccaaggccaccctggatgggtctgctaggtcctaccatccaggctgaggtttatgatacagtggtcattacacttaagaacatggcttcccatcctgtcagtcttcatgctgttggtgtatcctactggaaagcttctgagggagctgaatatgatgatcagaccagtcaaagggagaaagaagatgataaagtcttccctggtggaagccatacatatgtctggcaggtcctgaaagagaatggtccaatggcctctgacccactgtgccttacctactcatatctttctcatgtggacctggtaaaagacttgaattcaggcctcattggagccctactagtatgtagagaagggagtctggccaaggaaaagacacagaccttgcacaaatttatactactttttgctgtatttgatgaagggaaaagttggcactcagaaacaaagaactccttgatgcaggatagggatgctgcatctgctcgggcctggcctaaaatgcacacagtcaatggttatgtaaa

SEQ ID NO: 120344 - DNA, 1713 bp, Homo sapiens
  Payload ID: 3593
  Gene Symbol: F8A1
  Gene Name: coagulation factor VIII-associated 1
  Uniprot ID: P23610
  ENST ID: ENST00000610495
  CDS Start-End: 27-1142
gtcgggaagtgcttggggcggcgagcatggcggcagcggctgcaggcctgggcggcggcggcgccggcccgggacccgaggccggggacttcctggcccgctaccggctggtatcgaacaagctgaagaagcggttcctgcggaagccgaacgtggcggaggccggcgagcagttcggacagctgggccgggagctgcgcgcccaggagtgtctgccctacgcggcctggtgccagctggcggtggcgcgctgccagcaggcgctcttccacgggcccggggaggcgctggccctcaccgaggccgcccgcctcttcctgcggcaggagcgcgacgcgcgccagcgcctggtctgccccgccgcctacggggagccgctgcaggccgccgccagcgccctgggcgccgcggtgcgtctgcacctcgagctgggccagccggccgccgccgccgccctctgcctcgagctggccgccgccctgcgcgacctgggccagccggccgccgccgccggtcacttccagcgcgccgcccagctccagctgccccagctgcccctggccgcgctgcaggcgcttggcgaggccgcctcctgccagctgctggcgcgcgactacaccggcgccctggcggtcttcacgcgcatgcagcgcctggcgcgggagcacggcagccacccggtgcagtcactgccgccgcccccgccgccggcaccccagcccgggcccggggcgacgcccgccctaccggccgcgctgcttcctccgaactccggctcggcggcgccctctcccgccgccctgggcgccttctcggacgtgctggtccgctgcgaggtgtcccgcgtgctgctgctgctcctcctgcaaccaccgcccgccaagctgctgccggagcacgcccagaccctggagaagtactcctgggaggcttttgacagccacgggcaggagagcagcggccagcttcccgaggagctctttctgctgctccagtctttggtcatggctacccacgaaaaggacacggaagccatcaagtcgctgcaggtggagatgtggccactgttgactgctgagcagaaccacctccttcacctcgttctgcaagaaaccatctccccctcaggacagggagtctgatccatcccattcacccagtgacttctttttgcccaggcctggactttttgcatcagtcacgttaaccagatgactttgcctgttaccaaacctcatgcatccacgtttgcgtctggggaggaataaaaagacatcgttcccgcttctgcgttttgttattcctactgccgccataggaattatttcgttggctgaacgttaccagcaccccgagaacacattttgatagaatcagagtagaggacatggctgtcttctaaaaagccacgacatgaaaatgacaatccctttcgtctccttcctccgctgcttccacctaacgcagcctcctgcctccgcctttgtttcatagtgaggattttattttgcacggcgccctccctctaaatacctaccctagatgatttcatcctgcccctcacttcttaacatattcctgtgtctttgtaatggccaaatttctccttccactcgtccgcacggtacgtcttcatgggagtcattttattccttacagcttccttgtaaccacagccctaaatccatgataaagctactcttgtactcctca

SEQ ID NO: 120345 - DNA, 1116 bp, Homo sapiens
  Payload ID: 3594
  Gene Symbol: F8A2
  Gene Name: coagulation factor VIII-associated 2
  Uniprot ID: P23610
  ENST ID: ENST00000369505
  CDS Start-End: 1-1116
atggcggcagcggctgcaggcctgggcggcggcggcgccggcccgggacccgaggccggggacttcctggcccgctaccggctggtatcgaacaagctgaagaagcggttcctgcggaagccgaacgtggcggaggccggcgagcagttcggacagctgggccgggagctgcgcgcccaggagtgtctgccctacgcggcctggtgccagctggcggtggcgcgctgccagcaggcgctcttccacgggcccggggaggcgctggccctcaccgaggccgcccgcctcttcctgcggcaggagcgcgacgcgcgccagcgcctggtctgccccgccgcctacggggagccgctgcaggccgccgccagcgccctgggcgccgcggtgcgtctgcacctcgagctgggccagccggccgccgccgccgccctctgcctcgagctggccgccgccctgcgcgacctgggccagccggccgccgccgccggtcacttccagcgcgccgcccagctccagctgccccagctgcccctggccgcgctgcaggcgcttggcgaggccgcctcctgccagctgctggcgcgcgactacaccggcgccctggcggtcttcacgcgcatgcagcgcctggcgcgggagcacggcagccacccggtgcagtcactgccgccgcccccgccgccggcaccccagcccgggcccggggcgacgcccgccctaccggccgcgctgcttcctccgaactccggctcggcggcgccctctcccgccgccctgggcgccttctcggacgtgctggtccgctgcgaggtgtcccgcgtgctgctgctgctcctcctgcaaccaccgcccgccaagctgctgccggagcacgcccagaccctggagaagtactcctgggaggcttttgacagccacgggcaggagagcagcggccagcttcccgaggagctctttctgctgctccagtctttggtcatggctacccacgaaaaggacacggaagccatcaagtcgctgcaggtggagatgtggccactgttgactgctgagcagaaccacctccttcacctcgttctgcaagaaaccatctccccctcaggacagggagtctga

SEQ ID NO: 120346 - DNA, 1759 bp, Homo sapiens
  Payload ID: 3595
  Gene Symbol: F8A3
  Gene Name: coagulation factor VIII-associated 3
  Uniprot ID: P23610
  ENST ID: ENST00000622749
  CDS Start-End: 73-1188
agggcacgtcgccccgccccggcccgcccgccagctgcggcggcgcgtcgggaagtgcttggggcggcgagcatggcggcagcggctgcaggcctgggcggcggcggcgccggcccgggacccgaggccggggacttcctggcccgctaccggctggtatcgaacaagctgaagaagcggttcctgcggaagccgaacgtggcggaggccggcgagcagttcggacagctgggccgggagctgcgcgcccaggagtgtctgccctacgcggcctggtgccagctggcggtggcgcgctgccagcaggcgctcttccacgggcccggggaggcgctggccctcaccgaggccgcccgcctcttcctgcggcaggagcgcgacgcgcgccagcgcctggtctgccccgccgcctacggggagccgctgcaggccgccgccagcgccctgggcgccgcggtgcgtctgcacctcgagctgggccagccggccgccgccgccgccctctgcctcgagctggccgccgccctgcgcgacctgggccagccggccgccgccgccggtcacttccagcgcgccgcccagctccagctgccccagctgcccctggccgcgctgcaggcgcttggcgaggccgcctcctgccagctgctggcgcgcgactacaccggcgccctggcggtcttcacgcgcatgcagcgcctggcgcgggagcacggcagccacccggtgcagtcactgccgccgcccccgccgccggcaccccagcccgggcccggggcgacgcccgccctaccggccgcgctgcttcctccgaactccggctcggcggcgccctctcccgccgccctgggcgccttctcggacgtgctggtccgctgcgaggtgtcccgcgtgctgctgctgctcctcctgcaaccaccgcccgccaagctgctgccggagcacgcccagaccctggagaagtactcctgggaggcttttgacagccacgggcaggagagcagcggccagcttcccgaggagctctttctgctgctccagtctttggtcatggctacccacgaaaaggacacggaagccatcaagtcgctgcaggtggagatgtggccactgttgactgctgagcagaaccacctccttcacctcgttctgcaagaaaccatctccccctcaggacagggagtctgatccatcccattcacccagtgacttctttttgcccaggccgggactttttgcatcagtcacgttaaccagatgactttgcctgttaccaaacctcatgcatccacgtttgcgtctggggaggaataaaaagacatcgttcccgcttctgcgttttgttattcctactgccgccataggaattatttcgttggctgaacgttaccagcaccccgagaacacattttgatagaatcagagtagaggacatggctgtcttctaaaaagccacgacatgaaaatgacaatccctttcgtctccttcctccgctgcttccacccaacgcagcctcctgcctccgcctttgtttcatagtgaggattttattttgcacggcgccctccctctaaatacctaccctagatgatttcatcctgcccctcacttcttaacatattcctgtgtctttgtaatggccaaatttctccttccactcgtccgcacggtacgtcttcatgggagtcattttattccttacagcttccttgtaaccacagccctaaatccatgataaagctactcttgtactcctca

SEQ ID NO: 120347 - DNA, 1509 bp, Homo sapiens
  Payload ID: 3596
  Gene Symbol: F10
  Gene Name: coagulation factor X
  ENST ID: ENST00000375551
  CDS Start-End: 43-1041
gcctgtcccagtgaggacagggacacagtactcggccacaccatggggcgcccactgcacctcgtcctgctcagtgcctccctggctggcctcctgctgctcggggaaagtctgttcatccgcagggagcaggccaacaacatcctggcgagggtcacgagggccaattcctttcttgaagagatgaagaaaggacacctcgaaagagagtgcatggaagagacctgctcatacgaagaggcccgcgaggtctttgaggacagcgacaagacgaatgaattctggaataaatacaaagatggcgaccagtgtgagaccagtccttgccagaaccagggcaaatgtaaagacggcctcggggaatacacctgcacctgtttagaaggattcgaaggcaaaaactgtgaattattcacacggaagctctgcagcctggacaacggggactgtgaccagttctgccacgaggaacagaactctgtggtgtgctcctgcgcccgcgggtacaccctggctgacaacggcaaggcctgcattcccacagggccctacccctgtgggaaacagaccctggaacgcaggaagaggtcagtggcccaggccaccagcagcagcggggaggcccctgacagcatcacatggaagccatatgatgcagccgacctggaccccaccgagaaccccttcgacctgcttgacttcaaccagacgcagcctgagaggggcgacaacaacctcaccaggatcgtgggaggccaggaatgcaaggacggggagtgtccctggcaggccctgctcatcaatgaggaaaacgagggtttctgtggtggaaccattctgagcgagttctacatcctaacggcagcccactgtctctaccaagccaagagattcaaggggaccggaacacggagcaggaggagggcggtgaggcggtgcacgaggtggaggtggtcatcaagcacaaccggttcacaaaggagacctatgacttcgacatcgccgtgctccggctcaagacccccatcaccttccgcatgaacgtggcgcctgcctgcctccccgagcgtgactgggccgagtccacgctgatgacgcagaagacggggattgtgagcggcttcgggcgcacccacgagaagggccggcagtccaccaggctcaagatgctggaggtgccctacgtggaccgcaacagctgcaagctgtccagcagcttcatcatcacccagaacatgttctgtgccggctacgacaccaagcaggaggatgcctgccagggggacagcgggggcccgcacgtcacccgcttcaaggacacctacttcgtgacaggcatcgtcagctggggagagggctgtgcccgtaaggggaagtacgggatctacaccaaggtcaccgccttcctcaagtggatcgacaggtccatgaaaaccaggggcttgcccaaggccaagagccatgccccggaggtcataacgtcctctccattaaagtgagatcccactc

SEQ ID NO: 120348 - DNA, 1517 bp, Homo sapiens
  Payload ID: 3596
  Gene Symbol: F10
  Gene Name: coagulation factor X
  Uniprot ID: P00742
  ENST ID: ENST00000375559
  CDS Start-End: 39-1505
gtcccagtgaggacagggacacagtactcggccacaccatggggcgcccactgcacctcgtcctgctcagtgcctccctggctggcctcctgctgctcggggaaagtctgttcatccgcagggagcaggccaacaacatcctggcgagggtcacgagggccaattcctttcttgaagagatgaagaaaggacacctcgaaagagagtgcatggaagagacctgctcatacgaagaggcccgcgaggtctttgaggacagcgacaagacgaatgaattctggaataaatacaaagatggcgaccagtgtgagaccagtccttgccagaaccagggcaaatgtaaagacggcctcggggaatacacctgcacctgtttagaaggattcgaaggcaaaaactgtgaattattcacacggaagctctgcagcctggacaacggggactgtgaccagttctgccacgaggaacagaactctgtggtgtgctcctgcgcccgcgggtacaccctggctgacaacggcaaggcctgcattcccacagggccctacccctgtgggaaacagaccctggaacgcaggaagaggtcagtggcccaggccaccagcagcagcggggaggcccctgacagcatcacatggaagccatatgatgcagccgacctggaccccaccgagaaccccttcgacctgcttgacttcaaccagacgcagcctgagaggggcgacaacaacctcaccaggatcgtgggaggccaggaatgcaaggacggggagtgtccctggcaggccctgctcatcaatgaggaaaacgagggtttctgtggtggaaccattctgagcgagttctacatcctaacggcagcccactgtctctaccaagccaagagattcaaggtgagggtaggggaccggaacacggagcaggaggagggcggtgaggcggtgcacgaggtggaggtggtcatcaagcacaaccggttcacaaaggagacctatgacttcgacatcgccgtgctccggctcaagacccccatcaccttccgcatgaacgtggcgcctgcctgcctccccgagcgtgactgggccgagtccacgctgatgacgcagaagacggggattgtgagcggcttcgggcgcacccacgagaagggccggcagtccaccaggctcaagatgctggaggtgccctacgtggaccgcaacagctgcaagctgtccagcagcttcatcatcacccagaacatgttctgtgccggctacgacaccaagcaggaggatgcctgccagggggacagcgggggcccgcacgtcacccgcttcaaggacacctacttcgtgacaggcatcgtcagctggggagagggctgtgcccgtaaggggaagtacgggatctacaccaaggtcaccgccttcctcaagtggatcgacaggtccatgaaaaccaggggcttgcccaaggccaagagccatgccccggaggtcataacgtcctctccattaaagtgagatcccactcaa

SEQ ID NO: 120349 - DNA, 1211 bp, Homo sapiens
  Payload ID: 3596
  Gene Symbol: F10
  Gene Name: coagulation factor X
  ENST ID: ENST00000410083
  CDS Start-End: 19-411
acagtactcggccacaccatggggcgcccactgcacctcgtcctgctcagtgcctccctggctggcctcctgctgctcggggaaagtctgttcatccgcagggagcaggccaacaacatcctggcgagggtcacgagggccaattcctttcttgaagagatgaagaaaggacacctcgaaagagagtgcatggaagagacctgctcatacgaagaggcccgcgaggtctttgaggacagcgacaagacgaatgaattctggaataaatacaaagatggcgaccagtgtgagaccagtccttgccagaaccagggcaaatgtaaagacggcctcggggaatacacctgcacctgtttagaaggattcgaaggcaaaaactgtgaattatgcatgttgatctttgcactgtgattactttttcatcaaaagccacacagagggatgtggagtgaccgtaatgtgagtgctgctggggcagggggtaccggccatcccggaggtgtgaggggcaggtacctggagcctggcttctggctacaccgggcactgcaccatgagctccccgtgacccgtgaggttgcccttcaaggcaagtgtacctgtcgcctggctctggccctttgctcaacccaatggccgctttgtggctgacaggcaagtggatgtagctggcacccttgggccagcccagcctccatttctccagctgtccccagagccaacgtgcctctcctttgcagtcacacggaagctctgcagcctggacaacggggactgtgaccagttctgccacgaggaacagaactctgtggtgtgctcctgcgcccgcgggtacaccctggctgacaacggcaaggcctgcattcccacagggccctacccctgtgggaaacagaccctggaacgcaggaagaggtcagtggcccaggccaccagcagcagcggggaggcccctgacagcatcacatggaagccatatgatgcagccgacctggaccccaccgagaaccccttcgacctgcttgacttcaaccagacgcagcctgagaggggcgacaacaacctcaccaggatcgtgggaggccaggaatgcaaggacggggagtgtccctggcaggccctgctcatcaatgaggaaaacgagggtttctgtggtggaaccattctgagcgagttctacatcctaacggcagcccactgtctctaccaag

SEQ ID NO: 120350 - DNA, 1450 bp, Homo sapiens
  Payload ID: 3596
  Gene Symbol: F10
  Gene Name: coagulation factor X
  ENST ID: ENST00000409306
  CDS Start-End: 43-1047
gcctgtcccagtgaggacagggacacagtactcggccacaccatggggcgcccactgcacctcgtcctgctcagtgcctccctggctggcctcctgctgctcggggaaagtctgttcatccgcagggagcaggccaacaacatcctggcgagggtcacgagggccaattcctttcttgaagagatgaagaaaggacacctcgaaagagagtgcatggaagagacctgctcatacgaagaggcccgcgaggtctttgaggacagcgacaagacgaatgaattctggaataaatacaaagatggcgaccagtgtgagaccagtccttgccagaaccagggcaaatgtaaagacggcctcggggaatacacctgcacctgtttagaaggattcgaaggcaaaaactgtgaattattcacacggaagctctgcagcctggacaacggggactgtgaccagttctgccacgaggaacagaactctgtggtgtgctcctgcgcccgcgggtacaccctggctgacaacggcaaggcctgcattcccacagggccctacccctgtgggaaacagaccctggaacgcaggaagaggtcagtggcccaggccaccagcagcagcggggaggcccctgacagcatcacatggaagccatatgatgcagccgacctggaccccaccgagaaccccttcgacctgcttgacttcaaccagacgcagcctgagaggggcgacaacaacctcaccaggatcgtgggaggccaggaatgcaaggacggggagtgtccctggcaggccctgctcatcaatgaggaaaacgagggtttctgtggtggaaccattctgagcgagttctacatcctaacggcagcccactgtctctaccaagccaagagattcaaggtgagggggaccggaacacggagcaggaggagggcggtgaggcggtgcacgaggtggaggtggtcatcaagcacaaccggttcacaaaggagacctatgacttcgacatcgccgtgctccggctcaagacccccatcaccttccgcatgaacgtggcgcctgcctgcctccccgagcgtgactgggccgagtccacgctgatgacgcagaagacggggattgtgagcggcttcgggcgcacccacgagaagggccggcagtccaccaggctcaagatgctggaggtgccctacgtggaccgcaacagctgcaagctgtccagcagcttcatcatcacccagaacatgttctgtgccggctacgacaccaagcaggaggatgcctgccagggggacagcgggggcccgcacgtcacccgcttcaaggacacctacttcgtgacaggcatcgtcagctggggagagggctgtgcccgtaaggggaagtacgggatctacaccaaggtcaccgccttcctcaagtggatcgacaggtccatgaaaaccaggggctt

SEQ ID NO: 120351 - DNA, 670 bp, Homo sapiens
  Payload ID: 3597
  Gene Symbol: F11
  Gene Name: coagulation factor XI
  ENST ID: ENST00000264691
  CDS Start-End: 1-478
ggtagagtcacctaagattttgcgtgtctacagtggcattttaaatcaatctgaaataaaagaggacacatctttctttggggttcaagaaataataatccatgatcagtataaaatggcagaaagcgggtatgatattgccttgttgaaactggaaaccacagtgaattacacagacaaaatacaaaatactctccagaaagccaagatacccttagtgaccaacgaagagtgccagaagagatacagaggacataaaataacccataagatgatctgtgccggctacagggaaggagggaaggacgcttgcaagggagattcgggaggccctctgtcctgcaaacacaatgaggtctggcatctggtaggcatcacgagctggggcgaaggctgtgctcaaagggagcggccaggtgtttacaccaacgtggtcgagtacgtggactggattctggagaaaactcaagcagtgtgaatgggttcccaggggccattggagtccctgaaggacccaggatttgctgggagagggtgttgagttcactgtgccagcatgcttcctccacagtaacacgctgaaggggcttggtgtttgtaagaaaatgctagaagaaaacaaactgtcacaagttgttatgtccaaaactcccgttctatgatcgttgta

SEQ ID NO: 120352 - DNA, 1916 bp, Homo sapiens
  Payload ID: 3597
  Gene Symbol: F11
  Gene Name: coagulation factor XI
  Uniprot ID: P03951
  ENST ID: ENST00000264692
  CDS Start-End: 35-1750
attgcagcaagtaagccaacaaggtcttttcaggatgattttcttatatcaagtggtacatttcattttatttacttcagtttctggtgaatgtgtgactcagttgttgaaggacacctgctttgaaggaggggacattactacggtcttcacaccaagcgccaagtactgccaggtagtctgcacttaccacccaagatgtttactcttcactttcacggcggaatcaccatctgaggatcccacccgatggtttacttgtgtcctgaaagacagtgttacagaaacactgccaagagtgaataggacagcagcgatttctgggtattctttcaagcaatgctcacaccaaataagtaacatttgtctactgaagcacacccaaacagggacaccaaccagaataacgaagctcgataaagtggtgtctggattttcactgaaatcctgtgcactttctaatctggcttgtattagggacattttccctaatacggtgtttgcagacagcaacatcgacagtgtcatggctcccgatgcttttgtctgtggccgaatctgcactcatcatcccggttgcttgttttttaccttcttttcccaggaatggcccaaagaatctcaaagaaatctttgtctccttaaaacatctgagagtggattgcccagtacacgcattaaaaagagcaaagctctttctggtttcagtctacaaagctgcaggcacagcatcccagtgttctgccattcttcattttaccatgacactgatttcttgggagaagaactggatattgttgctgcaaaaagtcacgaggcctgccagaaactgtgcaccaatgccgtccgctgccagttttttacctataccccagcccaagcatcctgcaacgaagggaagggcaagtgttacttaaagctttcttcaaacggatctccaactaaaatacttcacgggagaggaggcatctctggatacacattaaggttgtgtaaaatggataatgagtgtaccaccaaaatcaagcccaggatcgttggaggaactgcgtctgttcgtggtgagtggccgtggcaggtgaccctgcacacaacctcacccactcagagacacctgtgtggaggctccatcattggaaaccagtggatattaacagccgctcactgtttctatggggtagagtcacctaagattttgcgtgtctacagtggcattttaaatcaatctgaaataaaagaggacacatctttctttggggttcaagaaataataatccatgatcagtataaaatggcagaaagcgggtatgatattgccttgttgaaactggaaaccacagtgaattacacagattctcaacgacccatatgcctgccttccaaaggagatagaaatgtaatatacactgattgctgggtgactggatgggggtacagaaaactaagagacaaaatacaaaatactctccagaaagccaagatacccttagtgaccaacgaagagtgccagaagagatacagaggacataaaataacccataagatgatctgtgccggctacagggaaggagggaaggacgcttgcaagggagattcgggaggccctctgtcctgcaaacacaatgaggtctggcatctggtaggcatcacgagctggggcgaaggctgtgctcaaagggagcggccaggtgtttacaccaacgtggtcgagtacgtggactggattctggagaaaactcaagcagtgtgaatgggttcccaggggccattggagtccctgaaggacccaggatttgctgggagagggtgttgagttcactgtgccagcatgcttcctccacagtaacacgctgaaggggcttggtgtttgtaagaaaatgctagaagaaaacaaactgtcacaagttgttatgtcc

SEQ ID NO: 120353 - DNA, 2396 bp, Homo sapiens
  Payload ID: 3597
  Gene Symbol: F11
  Gene Name: coagulation factor XI
  Uniprot ID: P03951
  ENST ID: ENST00000403665
  CDS Start-End: 353-2230
aaatgcagctttggctagcaggcacacaggcaaaatcaagttctacatctgtccctgtgtatgtcacttgtttgaatacgaaataaaattaaaaaaataaattcagtgtattgagaaagcaagcaattctctcaaggtatatttctgacatactaagattttaacgactttcacaaatatgctgtactgagagagaatgttacataacattgagaactagtacaagtaaatattaaagtgaagtgaccatttcctacacaagctcattcagaggaggatgaagaccattttggaggaagaaaagcacccttattaagaattgcagcaagtaagccaacaaggtcttttcaggatgattttcttatatcaagtggtacatttcattttatttacttcagtttctggtgaatgtgtgactcagttgttgaaggacacctgctttgaaggaggggacattactacggtcttcacaccaagcgccaagtactgccaggtagtctgcacttaccacccaagatgtttactcttcactttcacggcggaatcaccatctgaggatcccacccgatggtttacttgtgtcctgaaagacagtgttacagaaacactgccaagagtgaataggacagcagcgatttctgggtattctttcaagcaatgctcacaccaaataagcgcttgcaacaaagacatttatgtggacctagacatgaagggcataaactataacagctcagttgccaagagtgctcaagaatgccaagaaagatgcacggatgacgtccactgccactttttcacgtacgccacaaggcagtttcccagcctggagcatcgtaacatttgtctactgaagcacacccaaacagggacaccaaccagaataacgaagctcgataaagtggtgtctggattttcactgaaatcctgtgcactttctaatctggcttgtattagggacattttccctaatacggtgtttgcagacagcaacatcgacagtgtcatggctcccgatgcttttgtctgtggccgaatctgcactcatcatcccggttgcttgttttttaccttcttttcccaggaatggcccaaagaatctcaaagaaatctttgtctccttaaaacatctgagagtggattgcccagtacacgcattaaaaagagcaaagctctttctggtttcagtctacaaagctgcaggcacagcatcccagtgttctgccattcttcattttaccatgacactgatttcttgggagaagaactggatattgttgctgcaaaaagtcacgaggcctgccagaaactgtgcaccaatgccgtccgctgccagttttttacctataccccagcccaagcatcctgcaacgaagggaagggcaagtgttacttaaagctttcttcaaacggatctccaactaaaatacttcacgggagaggaggcatctctggatacacattaaggttgtgtaaaatggataatgagtgtaccaccaaaatcaagcccaggatcgttggaggaactgcgtctgttcgtggtgagtggccgtggcaggtgaccctgcacacaacctcacccactcagagacacctgtgtggaggctccatcattggaaaccagtggatattaacagccgctcactgtttctatggggtagagtcacctaagattttgcgtgtctacagtggcattttaaatcaatctgaaataaaagaggacacatctttctttggggttcaagaaataataatccatgatcagtataaaatggcagaaagcgggtatgatattgccttgttgaaactggaaaccacagtgaattacacagattctcaacgacccatatgcctgccttccaaaggagatagaaatgtaatatacactgattgctgggtgactggatgggggtacagaaaactaagagacaaaatacaaaatactctccagaaagccaagatacccttagtgaccaacgaagagtgccagaagagatacagaggacataaaataacccataagatgatctgtgccggctacagggaaggagggaaggacgcttgcaagggagattcgggaggccctctgtcctgcaaacacaatgaggtctggcatctggtaggcatcacgagctggggcgaaggctgtgctcaaagggagcggccaggtgtttacaccaacgtggtcgagtacgtggactggattctggagaaaactcaagcagtgtgaatgggttcccaggggccattggagtccctgaaggacccaggatttgctgggagagggtgttgagttcactgtgccagcatgcttcctccacagtaacacgctgaaggggcttggtgtttgtaagaaaatgctagaagaaaacaaactgtcacaagttgttatgtcc

SEQ ID NO: 120354 - DNA, 717 bp, Homo sapiens
  Payload ID: 3597
  Gene Symbol: F11
  Gene Name: coagulation factor XI
  ENST ID: ENST00000452239
  CDS Start-End: 1-632
tgtctggattttcactgaaatcctgtgcactttctaatctggcttgtattagggacattttccctaatacggtgtttgcagacagcaacatcgacagtgtcatggctcccgatgcttttgtctgtggccgaatctgcactcatcatcccggttgcttgttttttaccttcttttcccaggaatggcccaaagaatctcaaagaaatctttgtctccttaaaacatctgagagtggattgcccagtacacgcattaaaaagagcaaagctctttctggtttcagtctacaaagctgcaggcacagcatcccagtgttctgccattcttcattttaccatgacactgatttcttgggagaagaactggatattgttgctgcaaaaagtcacgaggcctgccagaaactgtgcaccaatgccgtccgctgccagttttttacctataccccagcccaagcatcctgcaacgaagggaagggcaagtgttacttaaagctttcttcaaacggatctccaactaaaatacttcacgggagaggaggcatctctggatacacattaaggttgtgtaaaatggataatgagcttagaggcgctccgatgaaaatctctggatggctcaagacttcttaaaaagcaagtcaattacgtcgtatctcatacattctgttttcctcacaataaatttccctaagacaagaaggagcattcggcacca

SEQ ID NO: 120355 - DNA, 1204 bp, Homo sapiens
  Payload ID: 3597
  Gene Symbol: F11
  Gene Name: coagulation factor XI
  ENST ID: ENST00000492972
  CDS Start-End: 98-586
acacaagctcattcagaggaggatgaagaccattttggaggaagaaaagcacccttattaagaattgcagcaagtaagccaacaaggtcttttcaggatgattttcttatatcaagtggtacatttcattttatttacttcagtttctggtgaatgtgtgactcagttgttgaaggacacctgctttgaaggaggggacattactacggtcttcacaccaagcgccaagtactgccaggtagtctgcacttaccacccaagatgtttactcttcactttcacggcggaatcaccatctgaggatcccacccgatggtttacttgtgtcctgaaagacagtgttacagaaacactgccaagagtgaataggacagcagcgatttctgggtattctttcaagcaatgctcacaccaaataagcgcttgcaacaaagacatttatgtggacctagacatgaagggcataaactataacagctcagttgccaagagtgctcaagaatgccaagaaagatgcacggatgacgtccactgccactttttcacgtacgccacaaggcagtttcccagcctggagcatcggtgagtgagtcccaggacattcgagtggtcgatgaaaaacagaatcgtgatttactaaaaagcttttgccatcaactttatgccagaatttattttgaacccctaaaagacatttctataatagtactcctagttttcttcatgaaaaatacacttaaagcctaatttggatgcatttcatttatggtaaggagtctatcttttaataacactgtcagaaaaatatatatacttggctaatttcaaaagcgctacacttttaaattggcacttttgaaacagctgcaattggtatgattgtcagtgcccttcccagtctaaaaaatgttacagtctaacagaataaaaataaaaacctactctctctctctctaaataacagttccttacctaagacaaaatactcatgtaaaaagtcttatcctgctccatactggattttgaaatatttcaaggataaatctatcacataaggatttaaaaattatctgatctctaataaccaaatctgtgttctcatctttaaaaatttactagggaaatagattattaatttgtatattcagaaatatttgagatgatttagattttcatagtaaactgcatttatctggaatcaaca

SEQ ID NO: 120356 - DNA, 2049 bp, Homo sapiens
  Payload ID: 3598
  Gene Symbol: F12
  Gene Name: coagulation factor XII (Hageman factor)
  Uniprot ID: P00748
  ENST ID: ENST00000253496
  CDS Start-End: 50-1897
ctattgatctggactcctggataggcagctggaccaacggacggatgccatgagggctctgctgctcctggggttcctgctggtgagcttggagtcaacactttcgattccaccttgggaagcccccaaggagcataagtacaaagctgaagagcacacagtcgttctcactgtcaccggggagccctgccacttccccttccagtaccaccggcagctgtaccacaaatgtacccacaagggccggccaggccctcagccctggtgtgctaccacccccaactttgatcaggaccagcgatggggatactgtttggagcccaagaaagtgaaagaccactgcagcaaacacagcccctgccagaaaggagggacctgtgtgaacatgccaagcggcccccactgtctctgtccacaacacctcactggaaaccactgccagaaagagaagtgctttgagcctcagcttctccggtttttccacaagaatgagatatggtatagaactgagcaagcagctgtggccagatgccagtgcaagggtcctgatgcccactgccagcggctggccagccaggcctgccgcaccaacccgtgcctccatgggggtcgctgcctagaggtggagggccaccgcctgtgccactgcccggtgggctacaccggagccttctgcgacgtggacaccaaggcaagctgctatgatggccgcgggctcagctaccgcggcctggccaggaccacgctctcgggtgcgccctgtcagccgtgggcctcggaggccacctaccggaacgtgactgccgagcaagcgcggaactggggactgggcggccacgccttctgccggaacccggacaacgacatccgcccgtggtgcttcgtgctgaaccgcgaccggctgagctgggagtactgcgacctggcacagtgccagaccccaacccaggcggcgcctccgaccccggtgtcccctaggcttcatgtcccactcatgcccgcgcagccggcaccgccgaagcctcagcccacgacccggaccccgcctcagtcccagaccccgggagccttgccggcgaagcgggagcagccgccttccctgaccaggaacggcccactgagctgcgggcagcggctccgcaagagtctgtcttcgatgacccgcgtcgttggcgggctggtggcgctacgcggggcgcacccctacatcgccgcgctgtactggggccacagtttctgcgccggcagcctcatcgccccctgctgggtgctgacggccgctcactgcctgcaggaccggcccgcacccgaggatctgacggtggtgctcggccaggaacgccgtaaccacagctgtgagccgtgccagacgttggccgtgcgctcctaccgcttgcacgaggccttctcgcccgtcagctaccagcacgacctggctctgttgcgccttcaggaggatgcggacggcagctgcgcgctcctgtcgccttacgttcagccggtgtgcctgccaagcggcgccgcgcgaccctccgagaccacgctctgccaggtggccggctggggccaccagttcgagggggcggaggaatatgccagcttcctgcaggaggcgcaggtaccgttcctctccctggagcgctgctcagccccggacgtgcacggatcctccatcctccccggcatgctctgcgcagggttcctcgagggcggcaccgatgcgtgccagggtgattccggaggcccgctggtgtgtgaggaccaagctgcagagcgccggctcaccctgcaaggcatcatcagctggggatcgggctgtggtgaccgcaacaagccaggcgtctacaccgatgtggcctactacctggcctggatccgggagcacaccgtttcctgattgctcagggactcatctttccctccttggtgattccgcagtgagagagtggctggggcatggaaggcaagattgtgtcccattcccccagtgcggccagctccgcgccaggatggcgcaggaactcaataaagtgctttgaaaatgctgag

SEQ ID NO: 120357 - DNA, 3999 bp, Homo sapiens
  Payload ID: 3599
  Gene Symbol: F13A1
  Gene Name: coagulation factor XIII, A1 polypeptide
  Uniprot ID: P00488
  ENST ID: ENST00000264870
  CDS Start-End: 267-2465
aagggcgcacctgccgggataacaggccagatgaagtaaatagaaaatcctctgagctcccctactggctccagctgtggagaagggggaggagaaaaccctgtgggacaggggaggagggtgagggctcctcttaggaagttatttaagagccaactgtcttgtctttcccgagtccgtttgaggaagtccccgaggcgcacagagcaagcccacgcgagggcacctctggaggggagcgcctgcaggaccttgtaaagtcaaaaatgtcagaaacttccaggaccgcctttggaggcagaagagcagttccacccaataactctaatgcagcggaagatgacctgcccacagtggagcttcagggcgtggtgccccggggcgtcaacctgcaagagtttcttaatgtcacgagcgttcacctgttcaaggagagatgggacactaacaaggtggaccaccacactgacaagtatgaaaacaacaagctgattgtccgcagagggcagtctttctatgtgcagattgacttcagtcgtccatatgaccccagaagggatctcttcagggtggaatacgtcattggtcgctacccacaggagaacaagggaacctacatcccagtgcctatagtctcagagttacaaagtggaaagtggggggccaagattgtcatgagagaggacaggtctgtgcggctgtccatccagtcttcccccaaatgtattgtggggaaattccgcatgtatgttgctgtctggactccctatggcgtacttcgaaccagtcgaaacccagaaacagacacgtacattctcttcaatccttggtgtgaagatgatgctgtgtatctggacaatgagaaagaaagagaagagtatgtcctgaatgacatcggggtaattttttatggagaggtcaatgacatcaagaccagaagctggagctatggtcagtttgaagatggcatcctggacacttgcctgtatgtgatggacagagcacaaatggacctctctggaagagggaatcccatcaaagtcagccgtgtggggtctgcaatggtgaatgccaaagatgacgaaggtgtcctcgttggatcctgggacaatatctatgcctatggcgtccccccatcggcctggactggaagcgttgacattctattggaataccggagctctgagaatccagtccggtatggccaatgctgggtttttgctggtgtctttaacacatttttacgatgccttggaataccagcaagaattgttaccaattatttctctgcccatgataatgatgccaatttgcaaatggacatcttcctggaagaagatgggaacgtgaattccaaactcaccaaggattcagtgtggaactaccactgctggaatgaagcatggatgacaaggcctgaccttcctgttggatttggaggctggcaagctgtggacagcaccccccaggaaaatagcgatggcatgtatcggtgtggccccgcctcggttcaagccatcaagcacggccatgtctgcttccaatttgatgcaccttttgtttttgcagaggtcaacagcgacctcatttacattacagctaagaaagatggcactcatgtggtggaaaatgtggatgccacccacattgggaaattaattgtgaccaaacaaattggaggagatggcatgatggatattactgatacttacaaattccaagaaggtcaagaagaagagagattggccctagaaactgccctgatgtacggagctaaaaagcccctcaacacagaaggtgtcatgaaatcaaggtccaacgttgacatggactttgaagtggaaaatgctgtgctgggaaaagacttcaagctctccatcaccttccggaacaacagccacaaccgttacaccatcacagcttatctctcagccaacatcaccttctacaccggggtcccgaaggcagaattcaagaaggagacgttcgacgtgacgctggagcccttgtccttcaagaaagaggcggtgctgatccaagccggcgagtacatgggtcagctgctggaacaagcgtccctgcacttctttgtcacagctcgcatcaatgagaccagggatgttctggccaagcaaaagtccaccgtgctaaccatccctgagatcatcatcaaggtccgtggcactcaggtagttggttctgacatgactgtgacagttgagtttaccaatcctttaaaagaaaccctgcgaaatgtctgggtacacctggatggtcctggagtaacaagaccaatgaagaagatgttccgtgaaatccggcccaactccaccgtgcagtgggaagaagtgtgccggccctgggtctctgggcatcggaagctgatagccagcatgagcagtgactccctgagacatgtgtatggcgagctggacgtgcagattcaaagacgaccttccatgtgaatgcacaggaagctgagatgaaccctggcatttggcctcttgtagtcttggctaaggaaattctaacgcaaaaatagctcttgctttgacttaggtgtgaagacccagacaggactgcagagggctccagagtggagatcccacatatttcaaaaacatgcttttccaaacccaggctattcggcaaggaagttagtttttaatctctccaccttccaaagagtgctaagcattagctttaattaagctctcatagctcataagagtaacagtcatcatttatcatcacaaatggctacatctccaaatatcagtgggctctcttaccagggagatttgctcaatacctggcctcatttaaaacaagacttcagattccccactcagccttttgggaataatagcacatgatttgggctctagaattccagtcccctttctcggggtcaggttctaccctccatgtgagaatatttttcccaggactagagcacaacataatttttatttttggcaaagccagaaaaagatctttcattttgcacctgcagccaagcaaatgcctgccaaattttagatttaccttgttagaagaggtggccccatattaacaaattgcatttgtgggaaacttaaccacctacaaggagataagaaagcaggtgcaacactcaagtctattgaataatgtagttttgtgatgcattttatagaatgtgtcacactgtggcctgatcagcaggagccaatatcccttactttaaccctttctgggatgcaatactaggaagtaaagtgaagaatttatctctttagttagtgattatatttcacccatctctcaggaatcatctcctttgcagaatgatgcaggttcaggtcccctttcagagatataataagcccaacaagttgaagaagctggcggatctagtgaccagatatatagaaggactgcagccactgattctctcttgtccttcacatcacccatgttgagacctcagcttggcactcaggtgctgaagggtaatatggactcagccttgcaaatagccagtgctagttctgacccaaccacagaggatgctgacatcatttgtattatgttccaaggctactacagagaaggctgcctgctatgtatttgcaaggctgatttatggtcagaatttccctctgatatgtctagggtgtgatttaggtcagtagactgtgattcttagcaaaaaatgaacagtgataagtatactgggggcaaaatcagaatggaatgctctggtctatataaccacatttctaagcctttgagactgttcctgagccttcagcactaacctatgagggtgagctggtcccctctatatatacatcatacttaactttactaagtaatctcacagcatttgccaagtctcccaatatccaattttaaaatgaaatgcattttgctagacagttaaactggcttaacttagtatattattattaattacaatgtaatagaagcttaaaataaagttaaactgattat

SEQ ID NO: 120358 - DNA, 454 bp, Homo sapiens
  Payload ID: 3599
  Gene Symbol: F13A1
  Gene Name: coagulation factor XIII, A1 polypeptide
  ENST ID: ENST00000445223
  CDS Start-End: 1-308
atgcctatggcgtccccccatcggcctggactggaagcgttgacattctattggaataccggagctctgagaatccagtccggtatggccaatgctgggtttttgctggtgtctttaacacatttttacgatgccttggaataccagcaagaattgttaccaattatttctctgcccatgataatgatgccaatttgcaaatggacatcttcctggaagaagatgggaacgtgaattccaaactcaccaaggattcagtgtggtacccatccattcctgctgctggaatgtctccaaagagcgcctgaagccctcattccactcaagtctcacttgagagtaaaccaaggggagtttgggggtaaaatgtcagaggtcattgtaataacttcttgggaaattaggcagaaagggaaaaaaagtgggaatcatttaataaaccacatagaaaaca

SEQ ID NO: 120359 - DNA, 631 bp, Homo sapiens
  Payload ID: 3599
  Gene Symbol: F13A1
  Gene Name: coagulation factor XIII, A1 polypeptide
  ENST ID: ENST00000451619
  CDS Start-End: 1-443
ccgaggcgcacagagcaagcccacgcgagggcacctctggaggggagcgcctgcaggaccttgtaaagtcaaaaatgtcagaaacttccaggaccgcctttggaggcagaagagcagttccacccaataactctaatgcagcggaagatgacctgcccacagtggagcttcagggcgtggtgccccggggcgtcaacctgcaagagtttcttaatgtcacgagcgttcacctgttcaaggagagatgggacactaacaaggtggaccaccacactgacaagtatgaaaacaacaagctgattgtccgcagagggcagtctttctatgtgcagattgacttcagtcgtccatatgaccccagaagggatctcttcagggtggaatacgtcattggtgagtgccatgtgcaagctccagtcttgacaccatgggttgcattgtagagagaggtgggtacaggcacagttgtgtgatttcctagtgtcatatgtcaacagtggcaggagctggaatgacatccagcccctgaattaccctgtgctctaagactggtctgtatagtgccaaatattgataacttgggcccacccaaggagaaaatctcatataaataaaagtaaaactggtataa

SEQ ID NO: 120360 - DNA, 582 bp, Homo sapiens
  Payload ID: 3599
  Gene Symbol: F13A1
  Gene Name: coagulation factor XIII, A1 polypeptide
  ENST ID: ENST00000414279
  CDS Start-End: 167-582
aaaggaaaccctcccagaccctctgaccaaaggggacgggtggggacttcctggcactgcagggccccttgcctgtccgtttgaggaagtccccgaggcgcacagagcaagcccacgcgagggcacctctggaggggagcgcctgcaggaccttgtaaagtcaaaaatgtcagaaacttccaggaccgcctttggaggcagaagagcagttccacccaataactctaatgcagcggaagatgacctgcccacagtggagcttcagggcgtggtgccccggggcgtcaacctgcaagagtttcttaatgtcacgagcgttcacctgttcaaggagagatgggacactaacaaggtggaccaccacactgacaagtatgaaaacaacaagctgattgtccgcagagggcagtctttctatgtgcagattgacttcagtcgtccatatgaccccagaagggatctcttcagggtggaatacgtcattggtcgctacccacaggagaacaagggaacctacatcccagtgcctatagtctcagagttacaaagtggaaagtggggggccaagattgtcatgagaga

SEQ ID NO: 120361 - DNA, 592 bp, Homo sapiens
  Payload ID: 3599
  Gene Symbol: F13A1
  Gene Name: coagulation factor XIII, A1 polypeptide
  ENST ID: ENST00000431222
  CDS Start-End: 36-592
agatctagggatggggatggggaggagaagtgggaatgggaaattgggagtcagaggggcaagtgggagagaagggcgcacctgccgggataacaggccagatgaatccgtttgaggaagtccccgaggcgcacagagcaagcccacgcgagggcacctctggaggggagcgcctgcaggaccttgtaaagtcaaaaatgtcagaaacttccaggaccgcctttggaggcagaagagcagttccacccaataactctaatgcagcggaagatgacctgcccacagtggagcttcagggcgtggtgccccggggcgtcaacctgcaagagtttcttaatgtcacgagcgttcacctgttcaaggagagatgggacactaacaaggtggaccaccacactgacaagtatgaaaacaacaagctgattgtccgcagagggcagtctttctatgtgcagattgacttcagtcgtccatatgaccccagaagggatctcttcagggtggaatacgtcattggtcgctacccacaggagaacaagggaacctacatcccagtgcctatagtctcagagttacaaagtggaaagtgggg

SEQ ID NO: 120362 - DNA, 2217 bp, Homo sapiens
  Payload ID: 3600
  Gene Symbol: F13B
  Gene Name: coagulation factor XIII, B polypeptide
  Uniprot ID: P05160
  ENST ID: ENST00000367412
  CDS Start-End: 45-2030
agtgcttagaattgttaaaatctttgtgaagcacaccactgaagatgaggttgaaaaacctgacttttatcatcatattgataatctcaggagaactctatgcagaagagaaaccctgtggttttcctcatgtggaaaatggaagaattgcccaatattactatacttttaaaagcttttactttccaatgagcatagacaaaaaattgtcatttttctgcttggctggttataccactgaaagtggaagacaagaagagcaaaccacgtgtacaacagaaggctggtctccagagccaaggtgcttcaaaaaatgcactaagcctgacctgagtaatggttacatctctgatgtaaagttattgtataaaattcaagagaacatgcgttatggttgcgcttcagggtacaaaaccactggagggaaggatgaagaagtggttcaatgtctctctgatggatggtcttctcaaccaacctgtaggaaagaacatgaaacatgtttggctcctgaattatataatggaaattattccacaacacagaaaacattcaaagtgaaggacaaagtacaatacgaatgtgctactggctactacacagctggaggaaagaagacagaggaggtagaatgtctcacatacggatggtctctcacaccaaaatgtaccaaattaaagtgctcttctttaagattaattgaaaatggttattttcatcctgtaaagcaaacctatgaagaaggagatgtcgttcagtttttctgtcatgaaaattattatctaagtggatctgatttaattcaatgctataactttggttggtacccagaatctcctgtatgcgaaggaagaagaaacagatgtcctcctccacctctgcccataaactccaaaattcaaacacattcaacaacttatcgtcatggagaaatagttcatatagaatgtgaacttaattttgagatccatgggtcagcagaaatacgttgtgaagatggaaaatggacagaacctccaaaatgcattgaaggacaggagaaggtagcctgtgaggaaccacccttcattgaaaatggtgcagcaaatttacactctaagatttattacaatggggataaagtgacatatgcatgtaaaagcggctaccttctccatggatcgaatgagataacttgtaatcgtggaaaatggacacttcctcctgagtgtgttgaaaataatgagaattgtaagcatcctcctgttgtaatgaatggggctgttgcagacgggatattggcaagctatgcaacaggatcctcagtggaatatagatgcaatgaatattacttactgaggggatcaaaaatatctcgttgcgaacaaggaaaatggtcatccccacctgtttgcttggaaccatgtactgttaatgtggattacatgaacagaaataacatagaaatgaagtggaaatatgaagggaaagtcttacatggagatttaatagattttgtatgtaaacagggatatgacttatctccattaaccccattgtctgaattatctgtgcagtgcaacagaggagaagtgaaatatcctttatgtactagaaaagaatctaaaggaatgtgcacatctcctcctcttattaaacatggagtcattattagttcaacagtagacacctatgaaaatggctcttcagtagaatacagatgttttgatcaccatttcctagaaggatctagggaggcctattgtttagatggaatgtggactacaccaccattgtgtttagagccatgcacattatcttttactgaaatggaaaagaataatttacttctgaaatgggattttgacaatagaccacacattttgcatggtgaatatattgagtttatttgtagaggagatacttatccagctgaattatatattactggatctatacttagaatgcaatgtgacagagggcagttaaaatatccaagatgtattccaagacaaagcactctgtcttatcaagaacccttaagaacatagaaatgaatggcagaaagaggagtcatatttcaatacatcatgaaattccttataaaatataattttgaggaaataagttaaaaacttcggagtttttccttgcttaaatatttgaatctaaattatttgtgctgaacatttcgttatttataaatgaaaaccaataaatgtctaatttttagtttgt

SEQ ID NO: 120363 - DNA, 4789 bp, Homo sapiens
  Payload ID: 3601
  Gene Symbol: COPA
  Gene Name: coatomer protein complex, subunit alpha
  Uniprot ID: P53621
  ENST ID: ENST00000241704
  CDS Start-End: 231-3905
ccatcttgcctctctgctgagcggaagcccccgttcggctcctgtctgttagcggcctctctaggctaccactgacaccgtctctgtggcccggagcctaagagaccggaagttcgtgtttccaggcgcttccggaaaccgcgggagagggtcgctgacgtggaggcgtccgaagggcagcagggtgtgtcggggctcggattaagacatcggagtcggagacctgagagatgttaaccaaattcgagaccaagagcgcgcgggtcaaagggctcagctttcaccccaaaagaccttggatcctgactagtttacataatggggtcatccagttatgggactatcggatgtgcactctcattgacaagtttgatgaacatgatggtccagtgcgaggcattgacttccataagcagcagccactgttcgtctctggaggagatgactataagattaaggtttggaattacaagcttcggcgctgtcttttcacattgcttgggcacttagattatattcgcaccacgttttttcatcatgaatatccctggattctgagtgcctccgatgatcagaccatccgagtgtggaactggcaatctagaacctgtgtttgtgtgttaacagggcacaaccattatgtgatgtgtgctcagttccaccccacagaagacttggtagtatcagccagcctggaccagactgtgcgcgtttgggatatttctggtctgaggaaaaaaaacctgtcccctggtgcggtggaatcggatgtgagaggaataactggggttgatctatttggaactacagatgcagtggtgaagcatgtactagagggtcacgatcgtggagtaaactgggctgccttccaccccactatgccccttattgtatctggggcagatgatcgtcaagtgaagatctggcgcatgaatgaatcaaaggcatgggaggttgatacctgccggggccattacaacaatgtatcttgtgccgtcttccaccctcgccaagagttgatcctcagcaattctgaggacaagagtattcgagtctgggatatgtctaagcggactggggttcagactttccgcagagaccatgatcgtttctgggtcctagctgctcaccctaaccttaacctctttgcagcaggccatgatggtggtatgattgtgtttaagctggaacgggaacggccagcctatgctgttcatggcaatatgctacactatgtcaaggaccgattcttacgacagctggatttcaacagctccaaagatgtagctgtgatgcagttgcggagtggttccaagtttccagtattcaatatgtcatacaatccagcagaaaatgcagtcctgctttgtacaagagctagcaatctagagaatagtacctatgacctgtacaccatccctaaagatgctgactcccagaatcctgatgcgcctgaagggaaacgatcctcaggcctgacagccgtttgggtcgctcgaaatcggtttgctgtcctagatcggatgcattcgcttctgatcaagaatctgaagaatgagatcaccaaaaaggtacaggtgcccaactgtgatgagatcttctatgctggcacaggcaatctcctgcttcgagatgcggactctatcacactctttgacgtacagcagaagcggactctggcatctgtgaagatttctaaagtgaaatacgttatctggtcagcagacatgtcacatgtagcactactagccaaacacgccattgtgatctgtaaccgcaaactggatgctttatgtaacattcatgagaacattcgtgtcaagagtggggcctgggatgagagtggggtatttatctataccacaagcaaccacatcaaatatgctgtcaccactggggaccacgggatcattcgaactctggatttacccatctatgtcacacgggtgaagggcaacaatgtatactgcctagacagggagtgtcgtccccgggtactcaccattgatcccactgagttcaaattcaagctggccctgatcaacagaaaatatgatgaggtactgcacatggtgaggaatgccaaactagttggccagtctattattgcttatctccagaagaagggctatcctgaagtggcactgcattttgtcaaggatgagaaaactcgctttagtctggcactggagtgtggaaacattgagattgctctggaagcagccaaagcactggatgacaagaactgctgggaaaagctgggagaagtggccctgctgcaggggaaccaccagattgtggaaatgtgctatcagcgtaccaaaaactttgacaaactttccttcctgtatcttatcactggcaacttagaaaaacttcgcaagatgatgaagattgctgagatcagaaaggacatgagtggccactatcagaatgccctatacctgggtgatgtgtcagagcgtgtgcggatcctgaagaactgtggacagaagtccctggcctatctcacagctgctacccatggcttagatgaagaagctgagagcctaaaggagacatttgacccagagaaggagacaatcccagacattgaccctaatgccaagctgctccagccacctgcacctatcatgccattggataccaattggcctttattgactgtatccaaaggattttttgaaggcaccattgccagcaaagggaagggaggagcactggctgctgacattgacattgacactgttggtacagagggctggggagaggatgcagagctgcagttggatgaagatgggtttgtggaggctacagaaggtttgggggatgatgctcttggcaagggacaggaagaaggaggtggctgggatgtagaagaagatctggagctccctcctgagctggatatatcccctggggcagctggtggggctgaagatggtttctttgtgcccccaaccaagggaacaagtccaactcagatctggtgtaataactctcagcttccagttgatcacatcctggcaggctctttcgaaacagccatgcggctccttcatgaccaagtaggggtaatccagtttggcccctacaagcaactgttcctacagacatacgcccgaggccgcacaacctatcaggctctgccctgcctaccctccatgtatggctatcctaatcgcaactggaaggatgcagggctgaagaatggtgtaccagctgtgggcctgaagcttaatgacctcatccaacggttgcagctgtgctaccagctcaccacagttggcaaatttgaggaggctgtggaaaaattccgttccatccttctcagtgtgccacttcttgttgtggacaataaacaagagattgcagaggcccagcagctcatcaccatttgccgtgagtacattgtgggtttgtccgtggagacagaaaggaagaagctgcccaaagagactctagaacagcagaagcgcatctgtgagatggcagcctatttcacccactcaaacctgcagcctgtgcacatgatcctggtgctgcgtacagccctcaatctgttcttcaagctcaagaacttcaagacagctgccacctttgctcggcgcctactagaactcgggcccaagcctgaggtggcccaacagacccgaaaaatcctgtctgcctgtgagaagaatcccacagatgcctaccagctcaattatgacatgcacaacccctttgacatttgtgctgcatcatatcggcccatctaccgtggaaagccagtagaaaagtgtccactcagtggggcctgctattcccctgagttcaaaggtcaaatctgcagggtcaccacagtgacagagattggcaaagatgtgattggtttaaggatcagtcctctgcagtttcgctaaggccccctttgtgtgcatgggtcagtcaccatatgttccccccagagaatgtgtctatatcctccttctaacagcaccttccccctgcagctactcttcagatctggctctctgtaccctaaaacctagtatctttttctcttctatggaaaatccgaaggtctaaacttgacttttttgaggtcttctcaacttgactacagttgtgctcataattgtccttgcctttccagcttaattattttaaggaacaaatgaaaactctgggctgggtggagtggctcatacctgtaatcccagcactttgggaggctacggtgggcagatcatctgaggccaggagttcgagacctgcctggccaacatggcaacaccccgtctctaataaaaatataaaaattagcctggcatggtagcatgcgcctatagtcccagctgctcaggaggctgaggcatgagaatcgcttgaacctaggaggtggaggttgcattcaactgagatcataccacttcattccagcctgggtgacagagcaagactctgtctcaaaaaaaaaaaaaaggaaaactctgtgatggacatttgtttagtaaatcccttcagtatttatccctcctttccccacagcagctttctttcctgtcaactagaaaggagcaggatgtaataaatacattttggtgtgactaggccacaccaactcttaatcatctcccattttccttagacatttaaatttcaaggcaggtaccctctgtgtactcagaaatttgaagaagttatttggttttccaaaatgcacactgcgggttattgatttgttctttacaactattgttctcatatttctcacactaaataaatctctatgagagcttcttga

SEQ ID NO: 120364 - DNA, 4664 bp, Homo sapiens
  Payload ID: 3601
  Gene Symbol: COPA
  Gene Name: coatomer protein complex, subunit alpha
  Uniprot ID: P53621
  ENST ID: ENST00000368069
  CDS Start-End: 79-3780
cgctgacgtggaggcgtccgaagggcagcagggtgtgtcggggctcggattaagacatcggagtcggagacctgagagatgttaaccaaattcgagaccaagagcgcgcgggtcaaagggctcagctttcaccccaaaagaccttggatcctgactagtttacataatggggtcatccagttatgggactatcggatgtgcactctcattgacaagtttgatgaacatgatggtccagtgcgaggcattgacttccataagcagcagccactgttcgtctctggaggagatgactataagattaaggtttggaattacaagcttcggcgctgtcttttcacattgcttgggcacttagattatattcgcaccacgttttttcatcatgaatatccctggattctgagtgcctccgatgatcagaccatccgagtgtggaactggcaatctagaacctgtgtttgtgtgttaacagggcacaaccattatgtgatgtgtgctcagttccaccccacagaagacttggtagtatcagccagcctggaccagactgtgcgcgtttgggatatttctggtctgaggaaaaaaaacctgtcccctggtgcggtggaatcggatgtgagaggaataactggggttgatctatttggaactacagatgcagtggtgaagcatgtactagagggtcacgatcgtggagtaaactgggctgccttccaccccactatgccccttattgtatctggggcagatgatcgtcaagtgaagatctggcgcatgaatgaatcaaaggcatgggaggttgatacctgccggggccattacaacaatgtatcttgtgccgtcttccaccctcgccaagagttgatcctcagcaattctgaggacaagagtattcgagtctgggatatgtctaagcggactggggttcagactttccgcagagaccatgatcgtttctgggtcctagctgctcaccctaaccttaacctctttgcagcaggccatgatggtggtatgattgtgtttaagctggaacgggaacggccagcctatgctgttcatggcaatatgctacactatgtcaaggaccgattcttacgacagctggatttcaacagctccaaagatgtagctgtgatgcagttgcggagtggttccaagtttccagtattcaatatgtcatacaatccagcagaaaatgcagtcctgctttgtacaagagctagcaatctagagaatagtacctatgacctgtacaccatccctaaagatgctgactcccagaatcctgatgcgcctgaagggaaacgatcctcaggcctgacagccgtttgggtcgctcgaaatcggtttgctgtcctagatcggatgcattcgcttctgatcaagaatctgaagaatgagatcaccaaaaaggtacaggtgcccaactgtgatgagatcttctatgctggcacaggcaatctcctgcttcgagatgcggactctatcacactctttgacgtacagcagaagcggactctggcatctgtgaagatttctaaagtgaaatacgttatctggtcagcagacatgtcacatgtagcactactagccaaacacgaacactcatgccctttgcctcttacagccattgtgatctgtaaccgcaaactggatgctttatgtaacattcatgagaacattcgtgtcaagagtggggcctgggatgagagtggggtatttatctataccacaagcaaccacatcaaatatgctgtcaccactggggaccacgggatcattcgaactctggatttacccatctatgtcacacgggtgaagggcaacaatgtatactgcctagacagggagtgtcgtccccgggtactcaccattgatcccactgagttcaaattcaagctggccctgatcaacagaaaatatgatgaggtactgcacatggtgaggaatgccaaactagttggccagtctattattgcttatctccagaagaagggctatcctgaagtggcactgcattttgtcaaggatgagaaaactcgctttagtctggcactggagtgtggaaacattgagattgctctggaagcagccaaagcactggatgacaagaactgctgggaaaagctgggagaagtggccctgctgcaggggaaccaccagattgtggaaatgtgctatcagcgtaccaaaaactttgacaaactttccttcctgtatcttatcactggcaacttagaaaaacttcgcaagatgatgaagattgctgagatcagaaaggacatgagtggccactatcagaatgccctatacctgggtgatgtgtcagagcgtgtgcggatcctgaagaactgtggacagaagtccctggcctatctcacagctgctacccatggcttagatgaagaagctgagagcctaaaggagacatttgacccagagaaggagacaatcccagacattgaccctaatgccaagctgctccagccacctgcacctatcatgccattggataccaattggcctttattgactgtatccaaaggattttttgaaggcaccattgccagcaaagggaagggaggagcactggctgctgacattgacattgacactgttggtacagagggctggggagaggatgcagagctgcagttggatgaagatgggtttgtggaggctacagaaggtttgggggatgatgctcttggcaagggacaggaagaaggaggtggctgggatgtagaagaagatctggagctccctcctgagctggatatatcccctggggcagctggtggggctgaagatggtttctttgtgcccccaaccaagggaacaagtccaactcagatctggtgtaataactctcagcttccagttgatcacatcctggcaggctctttcgaaacagccatgcggctccttcatgaccaagtaggggtaatccagtttggcccctacaagcaactgttcctacagacatacgcccgaggccgcacaacctatcaggctctgccctgcctaccctccatgtatggctatcctaatcgcaactggaaggatgcagggctgaagaatggtgtaccagctgtgggcctgaagcttaatgacctcatccaacggttgcagctgtgctaccagctcaccacagttggcaaatttgaggaggctgtggaaaaattccgttccatccttctcagtgtgccacttcttgttgtggacaataaacaagagattgcagaggcccagcagctcatcaccatttgccgtgagtacattgtgggtttgtccgtggagacagaaaggaagaagctgcccaaagagactctagaacagcagaagcgcatctgtgagatggcagcctatttcacccactcaaacctgcagcctgtgcacatgatcctggtgctgcgtacagccctcaatctgttcttcaagctcaagaacttcaagacagctgccacctttgctcggcgcctactagaactcgggcccaagcctgaggtggcccaacagacccgaaaaatcctgtctgcctgtgagaagaatcccacagatgcctaccagctcaattatgacatgcacaacccctttgacatttgtgctgcatcatatcggcccatctaccgtggaaagccagtagaaaagtgtccactcagtggggcctgctattcccctgagttcaaaggtcaaatctgcagggtcaccacagtgacagagattggcaaagatgtgattggtttaaggatcagtcctctgcagtttcgctaaggccccctttgtgtgcatgggtcagtcaccatatgttccccccagagaatgtgtctatatcctccttctaacagcaccttccccctgcagctactcttcagatctggctctctgtaccctaaaacctagtatctttttctcttctatggaaaatccgaaggtctaaacttgacttttttgaggtcttctcaacttgactacagttgtgctcataattgtccttgcctttccagcttaattattttaaggaacaaatgaaaactctgggctgggtggagtggctcatacctgtaatcccagcactttgggaggctacggtgggcagatcatctgaggccaggagttcgagacctgcctggccaacatggcaacaccccgtctctaataaaaatataaaaattagcctggcatggtagcatgcgcctatagtcccagctgctcaggaggctgaggcatgagaatcgcttgaacctaggaggtggaggttgcattcaactgagatcataccacttcattccagcctgggtgacagagcaagactctgtctcaaaaaaaaaaaaaaggaaaactctgtgatggacatttgtttagtaaatcccttcagtatttatccctcctttccccacagcagctttctttcctgtcaactagaaaggagcaggatgtaataaatacattttggtgtgactaggccacaccaactcttaatcatctcccattttccttagacatttaaatttcaaggcaggtaccctctgtgtactcagaaatttgaagaagttatttggttttccaaaatgcacactgcgggttattgatttgttctttacaactattgttctcatatttctcacactaaataaatctctatgagagcttcttga

SEQ ID NO: 120365 - DNA, 3481 bp, Homo sapiens
  Payload ID: 3602
  Gene Symbol: COPB1
  Gene Name: coatomer protein complex, subunit beta 1
  Uniprot ID: P53618
  ENST ID: ENST00000249923
  CDS Start-End: 302-3163
agccaaggactctggagccgccgccgccgctgctgcggttcatagccggagtagacggagccgcagtagacggatccgcggctgcaccaaaccactgcccctcggagcctggtagtgggccacaagcccccagtcccagaggcgtggtgggtcgggcagagtcggaagaactggctttctagctggaagatgcggaaggggagcgactaggccgcttgcgtctgggcctggcagaagggaccggattttctggcatccttaaatcttgtgtcaaggattggttataatataaccagaaaccatgacggcggctgagaacgtatgctacacgttaattaacgtgccaatggattcagaaccaccatctgaaattagcttaaaaaatgatctagaaaaaggagatgtaaagtcaaagactgaagctttgaagaaagtaatcattatgattctgaatggtgaaaaacttcctggacttctgatgaccatcattcgttttgtgctacctcttcaggatcacactatcaagaaattacttctggtattttgggaaattgttcctaaaacaactccagatgggagacttttacatgagatgatccttgtatgtgatgcatacagaaaggatcttcaacatcctaatgaatttattcgaggatctactcttcgttttctttgcaaattgaaagaagcagaattgctagaacctttaatgccagctattcgtgcatgtttggagcatcgacacagctatgttagaagaaatgctgttttggccatctataccatctatagaaattttgaacatcttatacctgatgctcctgaactgatacatgattttctggtgaatgagaaggatgcaagttgcaaaaggaatgcatttatgatgctaattcatgcagatcaggatcgagctttggattacttaagtacttgcattgatcaagttcaaacatttggagacattctgcagctggttattgttgaactgatttataaggtctgtcatgctaatccatcagaaagagctcgttttattcgctgcatctataacttattacagtcatccagccctgctgtaaaatatgaagctgctgggacattagtgacactctctagtgcaccaactgcaatcaaggctgctgctcagtgttacattgatttaattattaaggagagcgacaacaatgtaaaactcatagttttggatcgcttgatagaattaaaagagcatcctgctcatgaacgagtactacaggatctggttatggatatcctaagagtattgagcacaccagacttagaagtacgaaagaaaactctgcagttagcactggatcttgtctcttctagaaatgttgaagagctggttattgtcctgaagaaggaagtgataaaaacaaataatgtgtctgagcatgaagatactgacaaatacagacaactcctagtgcgaacattgcattcctgttctgtccgatttccagatatggctgcaaatgttattcctgtgttaatggaatttctcagtgacaacaacgaagcagcagctgctgatgtcttggagtttgttcgtgaagccattcagcgctttgataacctgagaatgcttattgttgagaagatgcttgaagtctttcatgctattaaatctgtcaagatttaccgaggagcattatggatcctgggagaatactgtagtaccaaggaagacattcagagtgtgatgactgagatccgcaggtcccttggagagatcccaattgtagagtcagaaataaagaaagaagctggtgaattaaaacctgaagaagaaataactgtagggccagttcagaaattggttactgaaatgggtacctatgcaactcagagtgcccttagcagttctagacccaccaagaaagaggaagacagacctcccttgagaggattccttctggatggagatttctttgttgctgcctcccttgccacaactctgaccaagattgcattgcgctatgtagctttggttcaggagaagaaaaagcaaaattcttttgttgctgaggctatgttgctcatggctactatcctgcatttgggaaaatcctctcttcctaagaagccaattactgatgatgatgtggatcgaatttccctgtgcctcaaggtcttgtctgaatgttcacctttaatgaatgacattttcaataaggaatgcagacagtccctttctcacatgttatctgctaaactagaagaagagaaattatcccaaaagaaagaatctgaaaagaggaatgtgacagtacagcctgatgaccccatttccttcatgcaactaactgctaagaatgaaatgaactgcaaggaagatcagtttcagctgagtttactggcagcaatgggtaacacacagaggaaagaggcagcagatcccctagcatctaaacttaacaaggtcacccaattgacaggtttctcagatcctgtatatgcagaagcttacgttcatgtcaaccaatatgatattgtcctggatgtacttgttgtgaaccaaaccagtgatactttgcagaattgcacattagaactagctacactaggggatctgaaacttgtggaaaagccgtctcctttgactcttgctcctcatgacttcgcaaatattaaagctaacgtcaaagtagcatcaacagaaaatggaataatttttggtaatatagtttatgatgtctctggagcagcaagtgacagaaattgtgtggttctcagtgatattcacatcgacatcatggactatatccagcctgcaacttgcactgatgcagaattccgtcagatgtgggccgaatttgaatgggaaaacaaagtgacagttaacaccaacatggttgatttaaatgactacttacagcacatattaaagtcaaccaatatgaaatgcctgactccagaaaaggccctttctggttactgtggctttatggcagccaacctttatgctcgttccatatttggtgaagatgcacttgcaaatgtcagcattgagaagccaattcaccagggaccagatgctgctgttaccggccatataagaattcgtgcaaagagccagggaatggccttaagtcttggagataaaatcaacttgtcacagaagaaaactagtatataaaaataaacaaaaagtccttgaagctttacagttaatttaggtatgggcttactggactccaacatcttttgtactctttcatgcttatatagaatctgagttcatgctgaatacttttcagccaataatttatagcctttcccttaaatcaagattgagtttaaaattatagtttgtcttttgtcttaacagttctgaatgctgtcctcaaagtatataatgtttcatgtaccaagacccttttcacagtacaataaacagatctattcataaatttttgttattttataaataaatgattacataattttagttata

SEQ ID NO: 120366 - DNA, 3382 bp, Homo sapiens
  Payload ID: 3602
  Gene Symbol: COPB1
  Gene Name: coatomer protein complex, subunit beta 1
  Uniprot ID: P53618
  ENST ID: ENST00000439561
  CDS Start-End: 247-3108
aggtggctgtggcttcggtcgttaccccacccccttccacgtcagccaaggactctggagccgccgccgccgctgctgcggttcatagccggagtagacggagccgcagtagacggatccgcggctgcaccaaaccactgcccctcggagcctggtagtgggccacaagcccccagtcccagaggcgtgattttctggcatccttaaatcttgtgtcaaggattggttataatataaccagaaaccatgacggcggctgagaacgtatgctacacgttaattaacgtgccaatggattcagaaccaccatctgaaattagcttaaaaaatgatctagaaaaaggagatgtaaagtcaaagactgaagctttgaagaaagtaatcattatgattctgaatggtgaaaaacttcctggacttctgatgaccatcattcgttttgtgctacctcttcaggatcacactatcaagaaattacttctggtattttgggaaattgttcctaaaacaactccagatgggagacttttacatgagatgatccttgtatgtgatgcatacagaaaggatcttcaacatcctaatgaatttattcgaggatctactcttcgttttctttgcaaattgaaagaagcagaattgctagaacctttaatgccagctattcgtgcatgtttggagcatcgacacagctatgttagaagaaatgctgttttggccatctataccatctatagaaattttgaacatcttatacctgatgctcctgaactgatacatgattttctggtgaatgagaaggatgcaagttgcaaaaggaatgcatttatgatgctaattcatgcagatcaggatcgagctttggattacttaagtacttgcattgatcaagttcaaacatttggagacattctgcagctggttattgttgaactgatttataaggtctgtcatgctaatccatcagaaagagctcgttttattcgctgcatctataacttattacagtcatccagccctgctgtaaaatatgaagctgctgggacattagtgacactctctagtgcaccaactgcaatcaaggctgctgctcagtgttacattgatttaattattaaggagagcgacaacaatgtaaaactcatagttttggatcgcttgatagaattaaaagagcatcctgctcatgaacgagtactacaggatctggttatggatatcctaagagtattgagcacaccagacttagaagtacgaaagaaaactctgcagttagcactggatcttgtctcttctagaaatgttgaagagctggttattgtcctgaagaaggaagtgataaaaacaaataatgtgtctgagcatgaagatactgacaaatacagacaactcctagtgcgaacattgcattcctgttctgtccgatttccagatatggctgcaaatgttattcctgtgttaatggaatttctcagtgacaacaacgaagcagcagctgctgatgtcttggagtttgttcgtgaagccattcagcgctttgataacctgagaatgcttattgttgagaagatgcttgaagtctttcatgctattaaatctgtcaagatttaccgaggagcattatggatcctgggagaatactgtagtaccaaggaagacattcagagtgtgatgactgagatccgcaggtcccttggagagatcccaattgtagagtcagaaataaagaaagaagctggtgaattaaaacctgaagaagaaataactgtagggccagttcagaaattggttactgaaatgggtacctatgcaactcagagtgcccttagcagttctagacccaccaagaaagaggaagacagacctcccttgagaggattccttctggatggagatttctttgttgctgcctcccttgccacaactctgaccaagattgcattgcgctatgtagctttggttcaggagaagaaaaagcaaaattcttttgttgctgaggctatgttgctcatggctactatcctgcatttgggaaaatcctctcttcctaagaagccaattactgatgatgatgtggatcgaatttccctgtgcctcaaggtcttgtctgaatgttcacctttaatgaatgacattttcaataaggaatgcagacagtccctttctcacatgttatctgctaaactagaagaagagaaattatcccaaaagaaagaatctgaaaagaggaatgtgacagtacagcctgatgaccccatttccttcatgcaactaactgctaagaatgaaatgaactgcaaggaagatcagtttcagctgagtttactggcagcaatgggtaacacacagaggaaagaggcagcagatcccctagcatctaaacttaacaaggtcacccaattgacaggtttctcagatcctgtatatgcagaagcttacgttcatgtcaaccaatatgatattgtcctggatgtacttgttgtgaaccaaaccagtgatactttgcagaattgcacattagaactagctacactaggggatctgaaacttgtggaaaagccgtctcctttgactcttgctcctcatgacttcgcaaatattaaagctaacgtcaaagtagcatcaacagaaaatggaataatttttggtaatatagtttatgatgtctctggagcagcaagtgacagaaattgtgtggttctcagtgatattcacatcgacatcatggactatatccagcctgcaacttgcactgatgcagaattccgtcagatgtgggccgaatttgaatgggaaaacaaagtgacagttaacaccaacatggttgatttaaatgactacttacagcacatattaaagtcaaccaatatgaaatgcctgactccagaaaaggccctttctggttactgtggctttatggcagccaacctttatgctcgttccatatttggtgaagatgcacttgcaaatgtcagcattgagaagccaattcaccagggaccagatgctgctgttaccggccatataagaattcgtgcaaagagccagggaatggccttaagtcttggagataaaatcaacttgtcacagaagaaaactagtatataaaaataaacaaaaagtccttgaagctttacagttaatttaggtatgggcttactggactccaacatcttttgtactctttcatgcttatatagaatctgagttcatgctgaatacttttcagccaataatttatagcctttcccttaaatcaagattgagtttaaaattatagtttgtcttttgtcttaacagttctgaatgctgtcctcaaagtatataatgtttcatgtaccaagacccttttcacagtacaataaacagatctattcataaa

SEQ ID NO: 120367 - DNA, 729 bp, Homo sapiens
  Payload ID: 3602
  Gene Symbol: COPB1
  Gene Name: coatomer protein complex, subunit beta 1
  ENST ID: ENST00000529866
  CDS Start-End: 318-729
cttccacgtcagccaaggactctggagccgccgccgccgctgctgcggttcatagccggagtagacggagccgcagtagacggatccgcggctgcaccaaaccactgcccctcggagcctggtagtgggccacaagcccccagtcccagaggcgtggtgggtcgggcagagtcggaagaactggctttctagctggaagatgcggaaggggagcgactaggccgcttgcgtctgggcctggcagaagggaccgggtggggattttctggcatccttaaatcttgtgtcaaggattggttataatataaccagaaaccatgacggcggctgagaacgtatgctacacgttaattaacgtgccaatggattcagaaccaccatctgaaattagcttaaaaaatgatctagaaaaaggagatgtaaagtcaaagactgaagctttgaagaaagtaatcattatgattctgaatggtgaaaaacttcctggacttctgatgaccatcattcgttttgtgctacctcttcaggatcacactatcaagaaattacttctggtattttgggaaattgttcctaaaacaactccagatgggagacttttacatgagatgatccttgtatgtgatgcatacagaaaggatcttcaacatcctaatgaatttattcgaggatctactcttcgttttctttgcaaattgaaagaagcagaattgctagaacctttaatgc

SEQ ID NO: 120368 - DNA, 1584 bp, Homo sapiens
  Payload ID: 3602
  Gene Symbol: COPB1
  Gene Name: coatomer protein complex, subunit beta 1
  ENST ID: ENST00000534234
  CDS Start-End: 128-1584
atagccggagtagacggagccgcagtagacggatccgcggctgcaccaaaccactgcccctcggagcctgattttctggcatccttaaatcttgtgtcaaggattggttataatataaccagaaaccatgacggcggctgagaacgtatgctacacgttaattaacgtgccaatggattcagaaccaccatctgaaattagcttaaaaaatgatctagaaaaaggagatgtaaagtcaaagactgaagctttgaagaaagtaatcattatgattctgaatggtgaaaaacttcctggacttctgatgaccatcattcgttttgtgctacctcttcaggatcacactatcaagaaattacttctggtattttgggaaattgttcctaaaacaactccagatgggagacttttacatgagatgatccttgtatgtgatgcatacagaaaggatcttcaacatcctaatgaatttattcgaggatctactcttcgttttctttgcaaattgaaagaagcagaattgctagaacctttaatgccagctattcgtgcatgtttggagcatcgacacagctatgttagaagaaatgctgttttggccatctataccatctatagaaattttgaacatcttatacctgatgctcctgaactgatacatgattttctggtgaatgagaaggatgcaagttgcaaaaggaatgcatttatgatgctaattcatgcagatcaggatcgagctttggattacttaagtacttgcattgatcaagttcaaacatttggagacattctgcagctggttattgttgaactgatttataaggtctgtcatgctaatccatcagaaagagctcgttttattcgctgcatctataacttattacagtcatccagccctgctgtaaaatatgaagctgctgggacattagtgacactctctagtgcaccaactgcaatcaaggctgctgctcagtgttacattgatttaattattaaggagagcgacaacaatgtaaaactcatagttttggatcgcttgatagaattaaaagagcatcctgctcatgaacgagtactacaggatctggttatggatatcctaagagtattgagcacaccagacttagaagtacgaaagaaaactctgcagttagcactggatcttgtctcttctagaaatgttgaagagctggttattgtcctgaagaaggaagtgataaaaacaaataatgtgtctgagcatgaagatactgacaaatacagacaactcctagtgcgaacattgcattcctgttctgtccgatttccagatatggctgcaaatgttattcctgtgttaatggaatttctcagtgacaacaacgaagcagcagctgctgatgtcttggagtttgttcgtgaagccattcagcgctttgataacctgagaatgcttattgttgagaagatgcttgaagtctttcatgctattaaatctgtcaagatttaccgaggagcattatggatcctgggagaatactgtagtaccaaggaagacattcagagtgtgatgactgagatccgcaggtcccttggagaggt

SEQ ID NO: 120369 - DNA, 576 bp, Homo sapiens
  Payload ID: 3602
  Gene Symbol: COPB1
  Gene Name: coatomer protein complex, subunit beta 1
  ENST ID: ENST00000534771
  CDS Start-End: 181-576
aaaatacgtggtttcattgctctgcggcctaatcaaaccctggacaagagaagaggaagaaaataggatatacttgcagcgcgcaagcgctgcacaaagaaagcatgtcctctctgagtcgccattttctggcatccttaaatcttgtgtcaaggattggttataatataaccagaaaccatgacggcggctgagaacgtatgctacacgttaattaacgtgccaatggattcagaaccaccatctgaaattagcttaaaaaatgatctagaaaaaggagatgtaaagtcaaagactgaagctttgaagaaagtaatcattatgattctgaatggtgaaaaacttcctggacttctgatgaccatcattcgttttgtgctacctcttcaggatcacactatcaagaaattacttctggtattttgggaaattgttcctaaaacaactccagatgggagacttttacatgagatgatccttgtatgtgatgcatacagaaaggatcttcaacatcctaatgaatttattcgaggatctactcttcgttttctttgcaaattgaaagaagcagaattg

SEQ ID NO: 120370 - DNA, 3360 bp, Homo sapiens
  Payload ID: 3603
  Gene Symbol: COPB2
  Gene Name: coatomer protein complex, subunit beta 2 (beta prime)
  Uniprot ID: P35606
  ENST ID: ENST00000333188
  CDS Start-End: 183-2903
ggaaacgacggccctgcgcgcagtttgcgcaggcgctccggccctggcctctgactatcgcgagaatcggctcccggaagttccacgtcagtcagtctgacggtcagtggatcggtgggtttatctcaaggcctgagtagccggtaacaaacgagggttcccgggattggaccgacgcagccatgcctctgcgacttgatatcaaaagaaagctaactgctagatctgatcgagttaagagtgtggatctgcatcctacagagccatggatgttggcaagtctttacaatggcagtgtgtgtgtttggaatcatgaaacacagacactggtgaagacatttgaagtatgtgatcttcctgttcgagctgcaaagtttgttgcaaggaagaattgggttgtgacaggagcggatgacatgcagattagagtgttcaattacaatactctggagagagttcatatgtttgaagcacactcagactacattcgctgtattgctgttcatccaacccagcctttcattctaactagcagtgatgacatgcttattaagctctgggactgggataaaaaatggtcttgctcacaagtgtttgaaggacacacccattatgttatgcagattgtgatcaaccccaaagataacaatcagtttgccagtgcctctttggacaggactatcaaggtgtggcagttgggctcttcgtcaccaaacttcactttggaaggacatgagaaaggcgtgaattgcattgattactacagtggtggggacaagccatacctcatttcaggtgcagatgaccgtcttgttaaaatatgggattatcagaataaaacatgtgtgcagacactggaaggacatgcccaaaatgtgtcttgtgccagctttcatcctgagttgccaatcattatcacaggttcagaagatggaacagtacgtatttggcattcaagcacctaccggcttgagagcacactgaattatggaatggagagggtatggtgcgtggccagtctaagagggtcaaacaatgtcgctttgggctatgatgaagggagcatcattgttaagcttggtcgggaggaacctgccatgtccatggatgccaatggaaagataatttgggccaagcattcagaagtccagcaggccaacctaaaagcaatgggagatgctgaaattaaagatggtgaaagattgccactggcagtaaaggatatgggcagttgtgaaatataccctcagactattcagcacaatcctaatgggcggtttgtggtggtgtgtggtgatggggagtatatcatctacacagcaatggcattgagaaacaagagctttggatctgctcaggagtttgcatgggcccacgattcttcagagtatgcaataagagagagcaacagcattgtaaagatatttaagaactttaaggaaaaaaaatcatttaaaccagattttggagcagaaagtatctacggcggcttcttattgggagtcagatctgtaaatggcttagccttctatgactgggacaatacagaactcatacgaagaattgaaattcagcccaaacatattttctggtctgactctggagagctagtctgtattgctactgaggaatcattttttatccttaagtatctgtcagaaaaagtcttggctgcacaggaaacacatgagggagttactgaagatggcattgaagatgcctttgaggttcttggtgagattcaggaaattgtgaaaacagggctttgggtaggcgattgcttcatttacacaagttctgtgaacagattaaattattatgttggaggagaaatagtcaccattgcccacttggacaggacgatgtatctcctaggctacattcctaaagacaacaggctttatctgggggataaagaattgaacatcattagctattccctgctggtttcagtcctggaataccagacagctgtcatgcggagggactttagcatggctgataaggtccttcctaccattccaaaagaacagaggaccagagttgcacactttttggaaaagcagggcttcaagcagcaagctcttacagtatccacagatcctgagcatcgttttgagcttgctcttcagcttggagagttaaaaattgcataccagttagcagtggaagcagagtcagaacagaagtggaaacaacttgctgaacttgccattagtaaatgtcagtttggcctagcccaggagtgcctgcatcatgcacaggattatgggggcctgctgcttttggccactgcctctggaaatgctaatatggtgaacaagctagcagagggtgcggagagagatggcaaaaataatgtggcattcatgagctactttttacagggcaaggttgatgcctgcctagagctcttaattagaactggacggctgccagaagctgccttcttggcccgaacttacttacccagtcaggtttcaagggtagtgaaactctggagagagaatctctcaaaagtcaatcagaaagcagcagaatcccttgctgacccaacagagtatgaaaacctgttccctggattaaaagaagcctttgttgttgaagaatgggtgaaggaaacacatgctgatctgtggccagccaaacaatacccacttgtcacgccaaatgaagagagaaatgtcatggaagagggaaaagactttcagccctcaagatctacagctcaacaggaacttgatgggaaacctgcttctcctactccggttattgtggcctcccacacagccaacaaagaagaaaagagtttactcgaactagaagtagatttggataatttggaattagaagatattgacacaacagatatcaatctggatgaagatattttggatgattgactgtaatgctttccatttacctgactaaacagatcattattatatataggtattgattgctaccctgaccacagtgctttggactatgagaaacttcttagatttttatatgtaaatgctgtggaccactgggagcacaatgcccacatcatcttaagaagagtttatgtgcagcatttaaatcactgtgttttccttgttaactaaaacagacatgggctttgatttttttcatactattagaccatatctcataaaaccttttgaattaatgaaggtacttgtttcctttctcaataatgaaaataggcttctagttttagaaggctgagccgaaactacaccttgcctagggatcagccccactgtcttttctttgtataactaaatctgcattttcaaatgttgtcaatcacatttttcttagagctgaatatccaggctgtaattctctaaa

SEQ ID NO: 120371 - DNA, 3034 bp, Homo sapiens
  Payload ID: 3603
  Gene Symbol: COPB2
  Gene Name: coatomer protein complex, subunit beta 2 (beta prime)
  Uniprot ID: P35606
  ENST ID: ENST00000507777
  CDS Start-End: 131-2764
atcgcgagaatcggctcccggaagttccacgtcagtcagtctgacgcctctgcgacttgatatcaaaagaaagctaactgctagatctgatcgagttaagagtgtggatctgcatcctacagagccatggatgttggcaagtctttacaatggcagtgtgtgtgtttggaatcatgaaacacagacactggtgaagacatttgaagtatgtgatcttcctgttcgagctgcaaagtttgttgcaaggaagaattgggttgtgacaggagcggatgacatgcagattagagtgttcaattacaatactctggagagagttcatatgtttgaagcacactcagactacattcgctgtattgctgttcatccaacccagcctttcattctaactagcagtgatgacatgcttattaagctctgggactgggataaaaaatggtcttgctcacaagtgtttgaaggacacacccattatgttatgcagattgtgatcaaccccaaagataacaatcagtttgccagtgcctctttggacaggactatcaaggtgtggcagttgggctcttcgtcaccaaacttcactttggaaggacatgagaaaggcgtgaattgcattgattactacagtggtggggacaagccatacctcatttcaggtgcagatgaccgtcttgttaaaatatgggattatcagaataaaacatgtgtgcagacactggaaggacatgcccaaaatgtgtcttgtgccagctttcatcctgagttgccaatcattatcacaggttcagaagatggaacagtacgtatttggcattcaagcacctaccggcttgagagcacactgaattatggaatggagagggtatggtgcgtggccagtctaagagggtcaaacaatgtcgctttgggctatgatgaagggagcatcattgttaagcttggtcgggaggaacctgccatgtccatggatgccaatggaaagataatttgggccaagcattcagaagtccagcaggccaacctaaaagcaatgggagatgctgaaattaaagatggtgaaagattgccactggcagtaaaggatatgggcagttgtgaaatataccctcagactattcagcacaatcctaatgggcggtttgtggtggtgtgtggtgatggggagtatatcatctacacagcaatggcattgagaaacaagagctttggatctgctcaggagtttgcatgggcccacgattcttcagagtatgcaataagagagagcaacagcattgtaaagatatttaagaactttaaggaaaaaaaatcatttaaaccagattttggagcagaaagtatctacggcggcttcttattgggagtcagatctgtaaatggcttagccttctatgactgggacaatacagaactcatacgaagaattgaaattcagcccaaacatattttctggtctgactctggagagctagtctgtattgctactgaggaatcattttttatccttaagtatctgtcagaaaaagtcttggctgcacaggaaacacatgagggagttactgaagatggcattgaagatgcctttgaggttcttggtgagattcaggaaattgtgaaaacagggctttgggtaggcgattgcttcatttacacaagttctgtgaacagattaaattattatgttggaggagaaatagtcaccattgcccacttggacaggacgatgtatctcctaggctacattcctaaagacaacaggctttatctgggggataaagaattgaacatcattagctattccctgctggtttcagtcctggaataccagacagctgtcatgcggagggactttagcatggctgataaggtccttcctaccattccaaaagaacagaggaccagagttgcacactttttggaaaagcagggcttcaagcagcaagctcttacagtatccacagatcctgagcatcgttttgagcttgctcttcagcttggagagttaaaaattgcataccagttagcagtggaagcagagtcagaacagaagtggaaacaacttgctgaacttgccattagtaaatgtcagtttggcctagcccaggagtgcctgcatcatgcacaggattatgggggcctgctgcttttggccactgcctctggaaatgctaatatggtgaacaagctagcagagggtgcggagagagatggcaaaaataatgtggcattcatgagctactttttacagggcaaggttgatgcctgcctagagctcttaattagaactggacggctgccagaagctgccttcttggcccgaacttacttacccagtcaggtttcaagggtagtgaaactctggagagagaatctctcaaaagtcaatcagaaagcagcagaatcccttgctgacccaacagagtatgaaaacctgttccctggattaaaagaagcctttgttgttgaagaatgggtgaaggaaacacatgctgatctgtggccagccaaacaatacccacttgtcacgccaaatgaagagagaaatgtcatggaagagggaaaagactttcagccctcaagatctacagctcaacaggaacttgatgggaaacctgcttctcctactccggttattgtggcctcccacacagccaacaaagaagaaaagagtttactcgaactagaagtagatttggataatttggaattagaagatattgacacaacagatatcaatctggatgaagatattttggatgattgactgtaatgctttccatttacctgactaaacagatcattattatatataggtattgattgctaccctgaccacagtgctttggactatgagaaacttcttagatttttatatgtaaatgctgtggaccactgggagcacaatgcccacatcatcttaagaagagtttatgtgcagcatttaaatcactgtgttttccttgttaactaaaacagacatgggctttgatttttttcatactattagaccatatctcataaaaccttttgaatt

SEQ ID NO: 120372 - DNA, 635 bp, Homo sapiens
  Payload ID: 3603
  Gene Symbol: COPB2
  Gene Name: coatomer protein complex, subunit beta 2 (beta prime)
  ENST ID: ENST00000514508
  CDS Start-End: 405-635
agaatcggctcccggaagttccacgtcagtcagtctgacggtcagtggatcggtgggtttatctcaaggcctgagtagccggtaacaaacgagggttcccgggattggaccgacgcagccatgctgggcatggtagcatgcgcctgtagtcccagctacttgggaggctgaggcaggagaatcgcttgaacccgggaagcagaggtttcagtgagcagagatcagcgccactgcactccagcctggacgacagagcgagacttcgccactgcactccagcctggacgacagagcgagacttcgtctcaaaaagaaaaaaacctctgcgacttgatatcaaaagaaagctaactgctagatctgatcgagttaagagtgtggatctgcatcctacagagccatggatgttggcaagtctttacaatggcagtgtgtgtgtttggaatcatgaaacacagacactggtgaagacatttgaagtatgtgatcttcctgttcgagctgcaaagtttgttgcaaggaagaattgggttgtgacaggagcggatgacatgcagattagagtgttcaattacaatactctggagagagttcatatgtttgaagcacactcagactacattcgctgtattgct

SEQ ID NO: 120373 - DNA, 629 bp, Homo sapiens
  Payload ID: 3603
  Gene Symbol: COPB2
  Gene Name: coatomer protein complex, subunit beta 2 (beta prime)
  ENST ID: ENST00000512153
  CDS Start-End: 297-629
gactatcgcgagaatcggctcccggaagttccacgtcagtcagtctgacggtcagtggatcggtgggtttatctcaaggcctgagtagccggtaacaaacgagggttcccgggattggaccgacgcagccatggtaggtccagatcccgtagaagggagcggggtcccataggttacggccgattcctggagcttctggactgagggccgcgcctctgcgacttgatatcaaaagaaagctaactgctagatctgatcgagttaagagtgtggatctgcatcctacagagccatggatgttggcaagtctttacaatggcagtgtgtgtgtttggaatcatgaaacacagacactggtgaagacatttgaagtatgtgatcttcctgttcgagctgcaaagtttgttgcaaggaagaattgggttgtgacaggagcggatgacatgcagattagagtgttcaattacaatactctggagagagttcatatgtttgaagcacactcagactacattcgctgtattgctgttcatccaacccagcctttcattctaactagcagtgatgacatgcttattaagctctgggactgggataaaaaatggtcttgctcacaagtgtttgaagga

SEQ ID NO: 120374 - DNA, 565 bp, Homo sapiens
  Payload ID: 3603
  Gene Symbol: COPB2
  Gene Name: coatomer protein complex, subunit beta 2 (beta prime)
  ENST ID: ENST00000512309
  CDS Start-End: 1-534
tacacagcaatggcattgagaaacaagagctttggatctgctcaggagtttgcatgggcccacgattcttcagagtatgcaataagagagagcaacagcattgtaaagatatttaagaactttaaggaaaaaaaatcatttaaaccagattttggagcagaaagtatctacggcggcttcttattgggagtcagatctgtaaatggcttagccttctatgactgggacaatacagaactcatacgaagaattgaaattcagcccaaacatattttctggtctgactctggagagctagtctgtattgctactgaggaatcattttttatccttaagtatctgtcagaaaaagtcttggctgcacaggaaacacatgagggagttactgaagatggcattgaagatgcctttgaggttcttggtgagattcaggaaattgtgaaaacagggctttgggtagatttggataatttggaattagaagatattgacacaacagatatcaatctggatgaagatattttggatgattgactgtaatgctttccatttacctgactaaaca

SEQ ID NO: 120375 - DNA, 548 bp, Homo sapiens
  Payload ID: 3603
  Gene Symbol: COPB2
  Gene Name: coatomer protein complex, subunit beta 2 (beta prime)
  ENST ID: ENST00000515006
  CDS Start-End: 91-548
cagtctgacggtcagtggatcggtgggtttatctcaaggcctgagtagccggtaacaaacgagggttcccgggattggaccgacgcagccatgcctctgcgacttgatatcaaaagaaagctaactgctagatctgatcgagttaagagtgtggatctgcatcctacagagccatggatgttggcaagtctttacaatggcagtgtgtgtgtttggaatcatgaaacacagacactggtgaagacatttgaagtatgtgatcttcctgttcgagctgcaaagtttgttgcaaggaagaattgggttgtgacaggagcggatgacatgcagattagagtgttcaattacaatactctggagagagttcatatgtttgaagcacactcagactacattcgctgtattgctgttcatccaacccagcctttcattctaactagcagtggacacacccattatgttatgcagattgtgatcaaccccaaagataacaatcagtttgccagtgcctctttggacaggactatcaaggtgtggcagttgggctc

SEQ ID NO: 120376 - DNA, 729 bp, Homo sapiens
  Payload ID: 3603
  Gene Symbol: COPB2
  Gene Name: coatomer protein complex, subunit beta 2 (beta prime)
  ENST ID: ENST00000513274
  CDS Start-End: 462-729
acgtcagtcagtctgacggtcagtggatcggtgggtttatctcaaggcctgagtagccggtaacaaacgagggttcccgggattggaccgacgcagccatggtaggtccagatcccgtagaagggagcggggtcccataggttacggccgattcctggagcttctggactgagggccgcgctgggcatggtagcatgcgcctgtagtcccagctacttgggaggctgaggcaggagaatcgcttgaacccgggaagcagaggtttcagtgagcagagatcagcgccactgcactccagcctggacgacagagcgagacttcgccactgcactccagcctggacgacagagcgagacttcgtctcaaaaagaaaaaaacctctgcgacttgatatcaaaagaaagctaactgctagatctgatcgagttaagagtgtggatctgcatcctacagagccatggatgttggcaagtctttacaatggcagtgtgtgtgtttggaatcatgaaacacagacactggtgaagacatttgaagtatgtgatcttcctgttcgagctgcaaagtttgttgcaaggaagaattgggttgtgacaggagcggatgacatgcagattagagtgttcaattacaatactctggagagagttcatatgtttgaagcacactcagactacattcgctgtattgctgttcatccaacccagcctttcattctaactagcagtg

SEQ ID NO: 120377 - DNA, 433 bp, Homo sapiens
  Payload ID: 3603
  Gene Symbol: COPB2
  Gene Name: coatomer protein complex, subunit beta 2 (beta prime)
  ENST ID: ENST00000503326
  CDS Start-End: 1-355
ccttgctgacccaacagagtatgaaaacctgttccctggattaaaagaagcctttgttgttgaagaatgggtgaaggaaacacatgctgatctgtggccagccaaacaatacccacttgtcacgccaaatgaagagagaaatgtcatggaagagggaaaagactttcagccctcaagatctacagctcaacaggaacttgatgggaaacctgcttctcctactccggttattgtggcctcccacacagccaacaaagaagaaaagcagcctgatccttggccccttgagccgactggccatctggatggagcacgtgatacagctggaccaagttggttgcatcatcgattctgagaatgaaagggtttaatgttatctaggggttttcttcatttgattcacagtcctataaaagtgtgtgccaacttcaaa

SEQ ID NO: 120378 - DNA, 848 bp, Homo sapiens
  Payload ID: 3603
  Gene Symbol: COPB2
  Gene Name: coatomer protein complex, subunit beta 2 (beta prime)
  ENST ID: ENST00000512242
  CDS Start-End: 590-848
gtggatcggtgggtttatctcaaggcctgagtagccggtaacaaacgagggttcccgggattggaccgacgcagccatggacttcatgaataacacttcttcagaatatttcctgatatgacactattgacctgggcacaaaattgtgatttgtgaatatttaaaattcattggccgggtgcgggggttcacgcctgtaatcctagcactttgggaggccgaggcgggcggatcacaaggtcaggagatcgaaaccatcctggctaacacggtgaaaccctgtctctactgaaaatacaaaaaattagctgggcatggtagcatgcgcctgtagtcccagctacttgggaggctgaggcaggagaatcgcttgaacccgggaagcagaggtttcagtgagcagagatcagcgccactgcactccagcctggacgacagagcgagacttcgccactgcactccagcctggacgacagagcgagacttcgtctcaaaaagaaaaaaacctctgcgacttgatatcaaaagaaagctaactgctagatctgatcgagttaagagtgtggatctgcatcctacagagccatggatgttggcaagtctttacaatggcagtgtgtgtgtttggaatcatgaaacacagacactggtgaagacatttgaagtatgtgatcttcctgttcgagctgcaaagtttgttgcaaggaagaattgggttgtgacaggagcggatgacatgcagattagagtgttcaattacaatactctggagagagttcatatgtttgaagcacactcagactacattcgctgtattgctgttcatccaacccagcctttcattctaa

SEQ ID NO: 120379 - DNA, 1141 bp, Homo sapiens
  Payload ID: 3604
  Gene Symbol: COPE
  Gene Name: coatomer protein complex, subunit epsilon
  Uniprot ID: O14579
  ENST ID: ENST00000262812
  CDS Start-End: 50-976
tccggctgacgtgtctttcaggaagaggagctggtgagaagacagcgaaatggcgcctccggcccccggcccggcctccggcggctccggggaggtagacgagctgttcgacgtaaagaacgccttctacatcggcagctaccagcagtgcataaacgaggcgcagcgggtgaagctatcaagcccagagagagacgtggagagggacgtcttcctgtatagagcgtacctggcgcagaggaagttcggtgtggtcctggatgagatcaagccctcctcggcccctgagctccaggccgtgcgcatgtttgctgactacctcgcccacgagagtcggagggacagcatcgtggccgagctggaccgagagatgagcaggagcgtggacgtgaccaacaccaccttcctgctcatggccgcctccatctatctccacgaccagaacccggatgccgccctgcgtgcgctgcaccagggggacagcctggagtgcacagccatgacagtgcagatcctgctgaagctggaccgcctggacctcgcccggaaggagctgaagagaatgcaggacctggacgaggatgccaccctcacccagctcgccactgcctgggtcagcctggccacgggtggtgagaagctgcaggatgcctactacatcttccaggagatggctgacaagtgctcgcccaccctgctgctgctcaatgggcaggcggcctgccacatggcccagggccgctgggaggccgctgagggcctgctgcaggaggcgctagacaaggatagtggctacccagagacgctggtcaacctcatcgtcctgtcccagcacctgggcaagccccctgaggtgacaaaccgatacctgtcccagctgaaggatgcccacaggtcccatcccttcatcaaggagtaccaggccaaggagaacgactttgacaggctggtgctacagtacgctcccagcgcctgaggctggcccagagctgtcaggaccatgaagccaggacagaggccaggagccagccctgcagccctccccacccggcatccacctgcatcccctctgggggcaggagcccacccccagcacccccatctgttaataaatatctcaactccagggtgttccacctga

SEQ ID NO: 120380 - DNA, 948 bp, Homo sapiens
  Payload ID: 3604
  Gene Symbol: COPE
  Gene Name: coatomer protein complex, subunit epsilon
  Uniprot ID: O14579
  ENST ID: ENST00000349893
  CDS Start-End: 16-786
tgagaagacagcgaaatggcgcctccggcccccggcccggcctccggcggctccggggaggtagacgagctgttcgacgtaaagaacgccttctacatcggcagctaccagcagtgcataaacgaggcgcagcgggtgaagctatcaagcccagagagagacgtggagagggacgtcttcctgtatagagcgtacctggcgcagaggaagttcggtgtggtcctggatgagatcaagccctcctcggcccctgagctccaggccgtgcgcatgtttgctgactacctcgcccacgagagtcggagggacagcatcgtggccgagctggaccgagagatgagcaggagcgtggacgtgaccaacaccaccttcctgctcatggccgcctccatctatctccacgaccagaacccggatgccgccctgcgtgcgctgcaccagggggacagcctggagtgcacagccatgacagtgcagatcctgctgaagctggaccgcctggacctcgcccggaaggagctgaagagaatgcaggacctggacgaggatgccaccctcacccagctcgccactgcctgggtcagcctggccacggatagtggctacccagagacgctggtcaacctcatcgtcctgtcccagcacctgggcaagccccctgaggtgacaaaccgatacctgtcccagctgaaggatgcccacaggtcccatcccttcatcaaggagtaccaggccaaggagaacgactttgacaggctggtgctacagtacgctcccagcgcctgaggctggcccagagctgtcaggaccatgaagccaggacagaggccaggagccagccctgcagccctccccacccggcatccacctgcatcccctctgggggcaggagcccacccccagcacccccatctgttaataaatatctcaactccagggtgttccacc

SEQ ID NO: 120381 - DNA, 907 bp, Homo sapiens
  Payload ID: 3604
  Gene Symbol: COPE
  Gene Name: coatomer protein complex, subunit epsilon
  Uniprot ID: O14579
  ENST ID: ENST00000351079
  CDS Start-End: 28-801
aagaggagctggtgagaagacagcgaaatggcgcctccggcccccggcccggcctccggcggctccggggaggtagacgagctgttcgacgtaaagaacgccttctacatcggcagctaccagcagtgcataaacgaggcgcagcgggtgaagctatcaagcccagagagagacgtggagagggacgtcttcctgtatagagcgtacctggcgcagaggaagttcggtgtggtcctggatgagatcaagccctcctcggcccctgagctccaggccgtgcgcatgtttgctgactacctcgcccacgagagtcggagcacagccatgacagtgcagatcctgctgaagctggaccgcctggacctcgcccggaaggagctgaagagaatgcaggacctggacgaggatgccaccctcacccagctcgccactgcctgggtcagcctggccacgggtggtgagaagctgcaggatgcctactacatcttccaggagatggctgacaagtgctcgcccaccctgctgctgctcaatgggcaggcggcctgccacatggcccagggccgctgggaggccgctgagggcctgctgcaggaggcgctagacaaggatagtggctacccagagacgctggtcaacctcatcgtcctgtcccagcacctgggcaagccccctgaggtgacaaaccgatacctgtcccagctgaaggatgcccacaggtcccatcccttcatcaaggagtaccaggccaaggagaacgactttgacaggctggtgctacagtacgctcccagcgcctgaggctggcccagagctgtcaggaccatgaagccaggacagaggccaggagccagccctgcagccctccccacccggcatccacctgcatcccctctgggggcaggag

SEQ ID NO: 120382 - DNA, 1144 bp, Homo sapiens
  Payload ID: 3604
  Gene Symbol: COPE
  Gene Name: coatomer protein complex, subunit epsilon
  ENST ID: ENST00000600932
  CDS Start-End: 33-1028
tcaggaagaggagctggtgagaagacagcgaaatggcgcctccggcccccggcccggcctccggcggctccggggaggtagacgagctgttcgacgtaaagaacgccttctacatcggcagctaccagcagtgcataaacgaggcgcagcgggtgaagctatcaagcccagagagagacgtggagagggacgtcttcctgtatagagcgtacctggcgcagaggaagttcggtgtggtcctggatgagatcaagccctcctcggcccctgagctccaggccgtgcgcatgtttgctgactacctcgcccacgagagtcggagggacagcatcgtggccgagctggaccgagagatgagcaggagcgtggacgtgaccaacaccaccttcctgctcatggccgcctccatctatctccacgaccagaacccggatgccgccctgcgtgcgctgcaccagggggacagcctggagtgggtgtcgagtccgggcagggccctccatctggaagcacagcccatggaggctgcttctccagatgggcgcacagccatgacagtgcagatcctgctgaagctggaccgcctggacctcgcccggaaggagctgaagagaatgcaggacctggacgaggatgccaccctcacccagctcgccactgcctgggtcagcctggccacgggtggtgagaagctgcaggatgcctactacatcttccaggagatggctgacaagtgctcgcccaccctgctgctgctcaatgggcaggcggcctgccacatggcccagggccgctgggaggccgctgagggcctgctgcaggaggcgctagacaaggatagtggctacccagagacgctggtcaacctcatcgtcctgtcccagcacctgggcaagccccctgaggtgacaaaccgatacctgtcccagctgaaggatgcccacaggtcccatcccttcatcaaggagtaccaggccaaggagaacgactttgacaggctggtgctacagtacgctcccagcgcctgaggctggcccagagctgtcaggaccatgaagccaggacagaggccaggagccagccctgcagccctccccacccggcatccacctgcatcccctctgggggcaggagcccaccccca

SEQ ID NO: 120383 - DNA, 601 bp, Homo sapiens
  Payload ID: 3604
  Gene Symbol: COPE
  Gene Name: coatomer protein complex, subunit epsilon
  ENST ID: ENST00000593827
  CDS Start-End: 30-470
ggaagaggagctggtgagaagacagcgaaatggcgcctccggcccccggcccggcctccggcggctccggggaggtagacgagctgttcgacgtaaagaacgccttctacatcggcagctaccagcagtgcataaacgaggcgcagcgggtgaagctatcaagcccagagagagacgtggagagggacgtcttcctgtatagagcgtacctggcgcagaggaagttcggtgtggtcctggatgagatcaagccctcctcggcccctgagctccaggccgtgcgcatgtttgctgactacctcgcccacgagagtcggagggtggtgagaagctgcaggatgcctactacatcttccaggagatggctgacaagtgctcgcccaccctgctgctgctcaatgggcaggcggcctgccacatggcccagggccgctgggaggccgctgagggcctgctgcaggaggcgctagacaaggatagtggctacccagagacgctggtcaacctcatcgtcctgtcccagcacctgggcaagccccctgaggtgacaaaccgatacctgtcccagctgaaggatgcccacaggtcccatcccttcatc

SEQ ID NO: 120384 - DNA, 1128 bp, Homo sapiens
  Payload ID: 3604
  Gene Symbol: COPE
  Gene Name: coatomer protein complex, subunit epsilon
  ENST ID: ENST00000614388
  CDS Start-End: 41-964
cgtgtctttcaggaagaggagctggtgagaagacagcgaaatggcgcctccggccccggccggcctccggggctccggggaggtagacgagctgttcgacgtaaagaacgccttctacatcggcagctaccagcagtgcataaacgaggcgcagcgggtgaagctatcaagcccagagagagacgtggagagggacgtcttcctgtatagagcgtacctggcgcagaggaagttcggtgtggtcctggatgagatcaagccctcctcggcccctgagctccaggccgtgcgcatgtttgctgactacctcgcccacgagagtcggagggacagcatcgtggccgagctggaccgagagatgagcaggagcgtggacgtgaccaacaccaccttcctgctcatggccgcctccatctatctccacgaccagaacccggatgccgccctgcgtgcgctgcaccagggggacagcctggagtgcacagccatgacagtgcagatcctgctgaagctggaccgcctggacctcgcccggaaggagctgaagagaatgcaggacctggacgaggatgccaccctcacccagctcgccactgcctgggtcagcctggccacgggtggtgagaagctgcaggatgcctactacatcttccaggagatggctgacaagtgctcgcccaccctgctgctgctcaatgggcaggcggcctgccacatggcccagggccgctgggaggccgctgagggcctgctgcaggaggcgctagacaaggatagtggctacccagagacgctggtcaacctcatcgtcctgtcccagcacctgggcaagccccctgaggtgacaaaccgatacctgtcccagctgaaggatgcccacaggtcccatcccttcatcaaggagtaccaggccaaggagaacgactttgacaggctggtgctacagtacgctcccagcgcctgaggctggcccagagctgtcaggaccatgaagccaggacagaggccaggagccagccctgcagccctccccacccggcatccacctgcatcccctctgggggcaggagcccacccccagcacccccatctgttaataaatatctcaactccagggtgttccacctg

SEQ ID NO: 120385 - DNA, 3078 bp, Homo sapiens
  Payload ID: 3605
  Gene Symbol: COPG1
  Gene Name: coatomer protein complex, subunit gamma 1
  Uniprot ID: Q9Y678
  ENST ID: ENST00000314797
  CDS Start-End: 105-2729
agtcggggcccggaagtggtccctgtagaaccactgtggcaccgctactccgtgccgcgcccgtcgagcattgcgttgctgcattgcgccccaccgactccactatgttgaagaaattcgacaagaaggatgaggagtcaggtggaggctccaacccattccagcaccttgagaagagtgcggtactccaggaggcccgtgtatttaatgaaactcccatcaaccctcggaaatgtgcccacatcctcaccaagattctttatctcataaaccagggggagcacctggggaccacggaagcgaccgaggccttctttgccatgaccaagctctttcagtccaatgatcccacactccgtcggatgtgctacttgaccatcaaggagatgtcttgcattgcagaggatgtcatcattgtcaccagcagcctaacaaaagacatgactgggaaagaagacaactaccggggcccggccgtgcgagccctctgccagatcactgatagcaccatgctgcaggctattgagcgctacatgaaacaagccattgtggacaaggtgcccagtgtctccagctctgccctcgtgtcttccttgcacctgctgaagtgcagctttgacgtggtcaagcgctgggtgaatgaggctcaggaggcagcatccagtgataacatcatggtccagtaccacgcactagggctcctgtaccatgtgcgtaagaatgaccgcctagccgtcaataagatgatcagcaaggtcacacggcatggccttaagtctccctttgcctactgcatgatgatccgggtggccagcaagcagctggaagaggaggatggcagccgtgacagcccactgtttgacttcatcgagagctgcttgcgcaacaagcacgagatggtggtgtatgaagccgcctcggccatcgtcaatctgccaggctgcagtgccaaagagctggccccggctgtgtcagtgctccagcttttctgcagctcacccaaggctgctctccgctatgctgctgttcgtaccctcaataaggttgccatgaagcatccgtcagctgtgacagcttgtaatctggatctggagaacctggtcacagattcaaaccgcagcattgccacgctggccatcaccaccctccttaagacgggcagcgagagcagcatcgaccgcctcatgaagcagatctcctccttcatgtcagaaatctcggatgaattcaaggtggtggttgtccaggccatcagtgccctgtgtcagaaatatcctcgcaaacacgccgtccttatgaacttcctgttcaccatgctgcgggaagagggtggctttgagtataagcgcgctatcgtggactgcatcatcagcatcattgaagagaactcagagagcaaggagacagggctgtcacatctgtgcgagttcatcgaggactgcgagttcacagtgctggccacccgtattctacatctcctgggccaggaggggcccaagaccaccaatccctcaaagtacatccgcttcatctataaccgagtggtcttggagcatgaggaggtccgggcaggtgctgtgagtgctctggcgaagtttggagcccagaatgaagagatgttacccagtatcttggtgttgctgaagaggtgtgtgatggatgatgacaatgaagtaagggaccgagccaccttctacctaaatgtcctggagcagaagcagaaggcccttaatgcaggctatatcctaaatggtctgactgtgtccatccctggtctggagagggctctgcagcagtacactctagaaccatcagaaaaaccttttgacctcaagtctgtgcccctggccacggcgcccatggcagagcagagaacagaaagtacccccatcacagcagtcaaacagcctgagaaagtggcagctaccaggcaggagatcttccaggagcagttggcagcagtgccagagttccgcggtcttgggcccctcttcaagtcctcgcctgagcccgtggccctcaccgagtcagagacggagtatgtcatccgctgcaccaaacacaccttcaccaaccacatggtttttcagtttgactgcacaaacacactcaatgaccagaccttggagaatgtcacagtgcagatggagcccactgaggcctatgaggtgctctgttacgtgcctgcccggagcctgccctacaaccagcccgggacctgctacacactggtggcactgcccaaagaagaccccacagctgtggcctgcacattcagctgcatgatgaagttcactgtcaaggactgtgatcccaccactggggagactgatgacgaaggctatgaggatgagtatgtgctggaagatctggaagttactgtagctgatcacattcaaaaggtcatgaaactgaacttcgaagcagcctgggatgaggtaggggatgaatttgagaaggaggaaacgttcaccttgtctaccatcaagacacttgaagaggctgtgggtaatattgtgaagttcttgggaatgcacccttgtgagaggtcagacaaagtgccggataacaagaacacccacacgttgctcctggctggtgtgttccggggtggtcatgacatcctggtgcgctcccggctgctgcttttggacacagtgacaatgcaggtgacagccagaagtttggaggagctgccagtagacatcatcttggcatctgtgggataagaggccagcctgcataggacctcatacccttccccaacactacctggaagttgtgccttcctcatgaaactggcagaaaccccttcccaagcttctgtattgaaaaacaattaggaatcattgcagatttttttttattctgctcccacctcccacccgggactacttgctggtgactttttttttttttttttttaaataggggatgattttagcttgtcctaaatcttgctgtccacccttccaggaaagggacattgtaaatgaataaaacattctcaactcctcttgaatctatcccccaagaaaccatcttatccctgtaataaatcagcatgtatttattgaa

SEQ ID NO: 120386 - DNA, 734 bp, Homo sapiens
  Payload ID: 3605
  Gene Symbol: COPG1
  Gene Name: coatomer protein complex, subunit gamma 1
  ENST ID: ENST00000514478
  CDS Start-End: 1-230
agatggagcccactgaggcctatgaggtgctctgttacgtgcctgcccggagcctgccctacaaccagcccgggacctgctacacactggtggcactgcccaaagaagaccccacagctgtggcctgcacattcagctgcatgatgaagttcactgtcaaggactgtgatcccaccactggggagactgatgacgaaggctatgaggatgagtatgtgagtcacagttgaggatggatggaccttccttgagctggaaatgaccccgaggcaggagctgctctaagaccaactggaagatctggaagttactgtagctgatcacattcaaaaggtcatgaaactgaacttcgaagcagcctgggatgaggtaggggatgaatttgagaaggaggaaacgttcaccttgtctaccatcaagacacttgaagaggctgtgggtaatattgtgaagttcttgggaatgcacccttgtgagaggtcagacaaagtgccggataacaagaacacccacacgttgctcctggctggtgtgttccggggtggtcatgacatcctggtgcgctcccggctgctgcttttggacacagtgacaatgcaggtgacagccagaagtttggaggagctgccagtagacatcatcttggcatctgtgggataagaggccagcctgcataggacctcatacccttccccaacactacctggaagttgtgccttcctcatgaaactggc

SEQ ID NO: 120387 - DNA, 599 bp, Homo sapiens
  Payload ID: 3605
  Gene Symbol: COPG1
  Gene Name: coatomer protein complex, subunit gamma 1
  ENST ID: ENST00000509889
  CDS Start-End: 1-566
ctataaccgagtggtcttggagcatgaggagcctgccctacaaccagcccgggacctgctacacactggtggcactgcccaaagaagaccccacagctgtggcctgcacattcagctgcatgatgaagttcactgtcaaggactgtgatcccaccactggggagactgatgacgaaggctatgaggatgagtatgtgctggaagatctggaagttactgtagctgatcacattcaaaaggtcatgaaactgaacttcgaagcagcctgggatgaggtaggggatgaatttgagaaggaggaaacgttcaccttgtctaccatcaagacacttgaagaggctgtgggtaatattgtgaagttcttgggaatgcacccttgtgagaggtcagacaaagtgccggataacaagaacacccacacgttgctcctggctggtgtgttccggggtggtcatgacatcctggtgcgctcccggctgctgcttttggacacagtgacaatgcaggtgacagccagaagtttggaggagctgccagtagacatcatcttggcatctgtgggataagaggccagcctgcataggacctcatacccttcc

SEQ ID NO: 120388 - DNA, 672 bp, Homo sapiens
  Payload ID: 3605
  Gene Symbol: COPG1
  Gene Name: coatomer protein complex, subunit gamma 1
  ENST ID: ENST00000504350
  CDS Start-End: 58-207
ctccgtgccgcgcccgtcgagcattgcgttgctgcattgcgccccaccgactccactatgttgaagaaattcgacaagaaggatgaggagtcaggtggaggctccaacccattccagcaccttgagaagagtgcggtactccaggaggcaagtgacatttgctcccctctagcttccatcataaatattcaccaccaatgcaactgaaataccaacacattcaaagtgttgttttaaagagcaacacgggagaaaacttgtgcctggaagttttctggaagacaggaaaactttgtttctggagagagcccgtgtatttaatgaaactcccatcaaccctcggaaatgtgcccacatcctcaccaagattctttatctcataaaccagggggagcacctggggaccacggaagcgaccgaggccttctttgccatgaccaagctctttcagtccaatgatcccacactccgtcggatgtgctacttgaccatcaaggagatgtcttgcattgcagaggatgtcatcattgtcaccagcagcctaacaaaagacatgactgggaaagaagacaactaccggggcccggccgtgcgagccctctgccagatcactgatagcaccatgctgcaggctattgagcgctacatgaaacaagccattgtggacaaggt

SEQ ID NO: 120389 - DNA, 3073 bp, Homo sapiens
  Payload ID: 3606
  Gene Symbol: COPG2
  Gene Name: coatomer protein complex, subunit gamma 2
  Uniprot ID: Q9UBF2
  ENST ID: ENST00000330992
  CDS Start-End: 38-2218
ggttgcggtgggtctgggcgctgggaagtcgtccaagatgattaaaaaattcgacaagaaggacgaggagtctggtagtggctccaatcctttccagcatctggagaagagtgctgttttacaggaggctcgtatattcaatgaaactccaatcaatccaagaagatgtttgcatattcttacaaagattctttacttactgaaccagggtgaacactttggaacaacggaagctacagaagccttctttgcaatgacgcgattgtttcaatctaatgatcaaacattgaggagaatgtgctaccttaccatcaaagaaatggctaccatctctgaggatgtgataattgtcacaagcagtctgactaaagacatgactggaaaagaagatgtataccgaggcccggccatcagagctctctgcaggatcaccgatggaacaatgttgcaagccattgaaagatacatgaagcaggccattgtggataaagtttccagtgtatccagttcagcactggtatcttccctgcacatgatgaagataagctatgatgtggttaagcgctggatcaatgaagcccaagaagctgcatcaagtgataatattatggtccagtaccatgcattgggagtcctgtatcaccttagaaagaatgatcgacttgctgtttccaagatgttgaataagtttactaaatctggtctcaagtcacagtttgcttactgcatgctgatccgaattgccagtcgcttactaaaagaaactgaggatggccatgaaagtccactgtttgatttcattgagagctgcttgcgaaataaacatgaaatggttatttatgaagctgcttcagctatcatccatcttcctaactgcactgcaagagagttggcacctgctgtttcagttcttcaacttttctgtagttctcctaagccagccttgagatatgcagctgtgaggaccttgaacaaggtggcaatgaagcacccctctgctgttactgcctgcaatctggacttagaaaacttaatcacagactcaaacagaagcattgctaccttagccattactacactcctcaaaacaggaagtgagagcagtgtggaccggctcatgaagcagatatcttcttttgtgtctgaaatctcagatgagttcaaggtggtggttgtacaggcaattagtgctctctgtcagaaataccctcgaaagcacagtgtcatgatgactttcctctccaacatgctccgagatgatggaggctttgagtacaagcgggccattgtggactgtataatcagcattgtggaagagaaccctgagagtaaagaagcaggcctagcccacctttgtgaattcattgaggactgtgaacacactgttctggctactaagattctacacttgttgggcaaagagggccctagaacgcctgtcccctccaaatatatccgttttatttttaatagggttgtcctggagaatgaggctgtcagagctgctgctgtgagtgctttggctaaatttggggctcagaatgagagtcttctcccaagcatccttgtactcttacagaggtgtatgatggatactgatgacgaggtacgagacagagctaccttctatctgaatgtgctgcagcagaggcagatggcactaaatgccacatatatctttaatggtttgacggtctctgtaccagggatggaaaaagccttacaccagtacacgttggagccttcagaaaaaccgtttgacatgaaatcaattcctcttgctatggctcctgtctttgaacagaaagcagaaatcacacttgtggctactaagccagagaagttggctccttccaggcaagacattttccaagaacaattggctgccattcctgagtttctgaatataggacccttgttcaagtcttctgagcctgttcaacttacagaagcagagacagaatattttgttcgatgtatcaagcacatgtttaccaatcacatcgtgttccagtttgactgcaccaacactctcaatgaccagctgctggaaaaagtgacagtgcagatggagccatcagattcctatgaagtgctgtcttgtatcccagcccccagccttccttataaccaaccaggaatatgttacactcttgttcgtttgcctgatgatgaccctacagcaggtactaaccctcagaagggaggagatacgtgattcagaatgcatttccttgtgagctcttcaactcttcaaatgctcagtttaagaatgtgatgcttttctagaatttaatgatgagtgtttgtgtgtgtgtgtttgtgtgtgtgtgaatatatatatttataaaatggtttactgctgcagaaatattaattttaaaactaaatctctgagtaaaatttgctgaacacttaatcttaaaagagaaactgagtgtgtatagcagtagcacaaaaaggaactcaagctttctgttggaataatgtgaccacttgtgagagttcatatacctggtctcctgtgaagaatcttgaccctcttctcctcaaagtttctatctagttagatagaacttggttatgtagtagattgttggcattttaaaatacatcatttttgaaggtcctgtagcataaggctggtgtctgagagcatgtctcagcctagtgagtagcttagccaaccatgtgtgtccacattaagaagggcttttaattccctccttgacccatatgcagtctttgcagggtggagaaatagcccctaaaagacagccaactagtgccaatagtagtatttacttatttggagacttgggaaggtgaatgtcaagtatttattctacttgattccccccatcatcattttcctccttgatttcttctcttctcatgttcagtgcacaatattcgtaactgttacccagttttcacagaaataagcacacacatcacatttatgttttgaacaacttttactgctcgtaagtacaggagaaacagaagttaaaaaattaacaaatactgggaaagttacagagttacaataaatcataaaagcactagtaaa

SEQ ID NO: 120390 - DNA, 3134 bp, Homo sapiens
  Payload ID: 3606
  Gene Symbol: COPG2
  Gene Name: coatomer protein complex, subunit gamma 2
  Uniprot ID: Q9UBF2
  ENST ID: ENST00000425248
  CDS Start-End: 81-2696
cttcctgcagcctcttccgctcgccggctgcggcgcctgggacggttgcggtgggtctgggcgctgggaagtcgtccaagatgattaaaaaattcgacaagaaggacgaggagtctggtagtggctccaatcctttccagcatctggagaagagtgctgttttacaggaggctcgtatattcaatgaaactccaatcaatccaagaagatgtttgcatattcttacaaagattctttacttactgaaccagggtgaacactttggaacaacggaagctacagaagccttctttgcaatgacgcgattgtttcaatctaatgatcaaacattgaggagaatgtgctaccttaccatcaaagaaatggctaccatctctgaggatgtgataattgtcacaagcagtctgactaaagacatgactggaaaagaagatgtataccgaggcccggccatcagagctctctgcaggatcaccgatggaacaatgttgcaagccattgaaagatacatgaagcaggccattgtggataaagtttccagtgtatccagttcagcactggtatcttccctgcacatgatgaagataagctatgatgtggttaagcgctggatcaatgaagcccaagaagctgcatcaagtgataatattatggtccagtaccatgcattgggagtcctgtatcaccttagaaagaatgatcgacttgctgtttccaagatgttgaataagtttactaaatctggtctcaagtcacagtttgcttactgcatgctgatccgaattgccagtcgcttactaaaagaaactgaggatggccatgaaagtccactgtttgatttcattgagagctgcttgcgaaataaacatgaaatggttatttatgaagctgcttcagctatcatccatcttcctaactgcactgcaagagagttggcacctgctgtttcagttcttcaacttttctgtagttctcctaagccagccttgagatatgcagctgtgaggaccttgaacaaggtggcaatgaagcacccctctgctgttactgcctgcaatctggacttagaaaacttaatcacagactcaaacagaagcattgctaccttagccattactacactcctcaaaacaggaagtgagagcagtgtggaccggctcatgaagcagatatcttcttttgtgtctgaaatctcagatgagttcaaggtggtggttgtacaggcaattagtgctctctgtcagaaataccctcgaaagcacagtgtcatgatgactttcctctccaacatgctccgagatgatggaggctttgagtacaagcgggccattgtggactgtataatcagcattgtggaagagaaccctgagagtaaagaagcaggcctagcccacctttgtgaattcattgaggactgtgaacacactgttctggctactaagattctacacttgttgggcaaagagggccctagaacgcctgtcccctccaaatatatccgttttatttttaatagggttgtcctggagaatgaggctgtcagagctgctgctgtgagtgctttggctaaatttggggctcagaatgagagtcttctcccaagcatccttgtactcttacagaggtgtatgatggatactgatgacgaggtacgagacagagctaccttctatctgaatgtgctgcagcagaggcagatggcactaaatgccacatatatctttaatggtttgacggtctctgtaccagggatggaaaaagccttacaccagtacacgttggagccttcagaaaaaccgtttgacatgaaatcaattcctcttgctatggctcctgtctttgaacagaaagcagaaatcacacttgtggctactaagccagagaagttggctccttccaggcaagacattttccaagaacaattggctgccattcctgagtttctgaatataggacccttgttcaagtcttctgagcctgttcaacttacagaagcagagacagaatattttgttcgatgtatcaagcacatgtttaccaatcacatcgtgttccagtttgactgcaccaacactctcaatgaccagctgctggaaaaagtgacagtgcagatggagccatcagattcctatgaagtgctgtcttgtatcccagcccccagccttccttataaccaaccaggaatatgttacactcttgttcgtttgcctgatgatgaccctacagcagttgcaggctcctttagctgcaccatgaagtttacagtccgggactgtgaccctaacactggagttccagatgaggatgggtatgatgatgagtatgtgctggaagatctcgaagtgactgtgtctgaccatattcagaaagtactgaagcctaactttgctgctgcttgggaagaggtgggagatacctttgagaaagaggaaacctttgccctcagttctaccaaaacccttgaagaggctgtcaacaatatcatcacatttctgggcatgcagccatgtgagaggtccgataaagtacctgagaacaagaattcccattcgctctatctggcaggtatattcagaggtggctatgatttattggtgaggtccaggctggccttagccgatggagtgaccatgcaggtgactgtcagaagtaaagagagaacacctgtagatgttatcttagcttctgttggataaatgcttactggacaagaggaaactgatgcacactacatggtcagtgggcttttaggctagtggcatcagtttcccagaatcagacttttgaagatgaatgactttggagaagcaaattaaacatttggccctgagccagcagatcaagcaaatgtctatctttgcgcatgggttgtttttttttttttttctttttattctacttggtcagctttgggacgatagtgcagctttgggtgatcttgaaaatcaaatactatcctatactccagctgcttaacttcattttattctttaatgtgtacctgaaagctcctggcaatgctggaaaatttttatcccagaggggtgggggggaggggggaggggaagccagagtccacttttgtcacaattcatttttattaatagaaaataaacacttattccagtttcaaa

SEQ ID NO: 120391 - DNA, 1897 bp, Homo sapiens
  Payload ID: 3607
  Gene Symbol: COPZ1
  Gene Name: coatomer protein complex, subunit zeta 1
  Uniprot ID: P61923
  ENST ID: ENST00000262061
  CDS Start-End: 38-571
ttttgcggctccacgtcggcaccagctgcggggcaagatggaggcgctgattttggaaccttccctgtatactgtcaaagccatcctgattctggacaatgatggagatcgactttttgccaagtactatgacgacacctaccccagtgtcaaggagcaaaaggcctttgagaagaacattttcaacaagacccatcggactgacagtgaaattgccctcttggaaggcctgacagtggtatacaaaagcagtatagatctctatttctatgtgattggcagctcctatgaaaatgagctgatgcttatggctgttctgaactgtctcttcgactcattgagccagatgctgaggaaaaatgtagaaaagcgagcactgctggagaacatggaggggctgttcttggctgtggatgaaattgtagatggaggggtgatcctagagagtgatccccagcaggtggtacaccgggtggcattaaggggtgaagatgtcccccttacggagcagaccgtgtctcaggtgctgcagtcagccaaagaacagatcaagtggtcactccttcggtgaagacctcactgttcctggctcttcatcctcttcaaaaaatttgcatgtctgctgtgaattttcatctagttccccaatcgatgctctcagggtcatctcggggatcacagggatccttaaatctccattctgtttgtggttgccccctcaacctcccctacacccttcctattctttttcattcttcttgcagttctgggagtaaagctcccagcatatttagataatagggcaggggaagcaccctctttctttctagactggattatgctcacatgctcccttgccctgacatttttgtaaattctgtgccctttgctgtagctacacttcagattaaagtaggagaaagaatgtgctgagtgttttcctccctttgcctctacctggccctcatcccaacagcccagcaaggggagagagaaagagaattcttttctatagaacgagtgggggcggggatgggtagggatttatccaatctaagccctaaccccacttagtgacctcagtgttttcttccattccttcttactgccctgtcctctgccttggaagaggctttgggaatagttcatagggaagggacaacatggaagaaacagcgatttaaattgtattgaacagggcatataaaatgcattctgtaccctgatctggcatatagcttcaaaactgcagtggcgagtgtccatctcttagttagctaccttaactgtccacccttactacctgtgggatcgttgcctggtttgtcttctctgtgtcctggagcaaagccagttcctaaaactaaaactccattctagtcttgggaagaaaagtttctactcagaactggggaaggagtggaacttatgacttgggcctctaggctgtctctgtcccctcagctccccgacatgcatttactctctgccgtgggtctgcagtcgctgcaacctaccctctctctgcctcagccttacacccaagcagtaggtctgtgctctccctgtctctaggtcgctgagagaggtgcttttcttcataaaacctttggggtttggatttccccaggaagatggagaatggaatactcactcttgggtctaatctttccccttgacccagaacttcctccccacaaaaatgcctttaaaaaccttcctgagacttaagcattctgccccacttactaactgccagttctccagcactgaggtggggcagataacggggcatatttaagggggcatctttgtgtaaaagatgcatggagtcaggagaaaaccaccttcataaactgctctgtgcaaagaggaataaaacattttttccaaactg

SEQ ID NO: 120392 - DNA, 880 bp, Homo sapiens
  Payload ID: 3607
  Gene Symbol: COPZ1
  Gene Name: coatomer protein complex, subunit zeta 1
  Uniprot ID: P61923
  ENST ID: ENST00000455864
  CDS Start-End: 26-490
acgtcggcaccagctgcggggcaagatggaggcgctgattttgtactatgacgacacctaccccagtgtcaaggagcaaaaggcctttgagaagaacattttcaacaagacccatcggactgacagtgaaattgccctcttggaaggcctgacagtggtatacaaaagcagtatagatctctatttctatgtgattggcagctcctatgaaaatgagctgatgcttatggctgttctgaactgtctcttcgactcattgagccagatgctgaggaaaaatgtagaaaagcgagcactgctggagaacatggaggggctgttcttggctgtggatgaaattgtagatggaggggtgatcctagagagtgatccccagcaggtggtacaccgggtggcattaaggggtgaagatgtcccccttacggagcagaccgtgtctcaggtgctgcagtcagccaaagaacagatcaagtggtcactccttcggtgaagacctcactgttcctggctcttcatcctcttcaaaaaatttgcatgtctgctgtgaattttcatctagttccccaatcgatgctctcagggtcatctcggggatcacagggatccttaaatctccattctgtttgtggttgccccctcaacctcccctacacccttcctattctttttcattcttcttgcagttctgggagtaaagctcccagcatatttagataatagggcaggggaagcaccctctttctttctagactggattatgctcacatgctcccttgccctgacatttttgtaaattctgtgccctttgctgtagctacacttcagattaaagtaggagaaagaatgtgctgagtgttttcctccctttgcctctacctgg

SEQ ID NO: 120393 - DNA, 578 bp, Homo sapiens
  Payload ID: 3607
  Gene Symbol: COPZ1
  Gene Name: coatomer protein complex, subunit zeta 1
  ENST ID: ENST00000551962
  CDS Start-End: 34-357
gcggctccacgtcggcaccagctgcggggcaagatggaggcgctgattttggaaccttccctgtatactgtcaaagccatcctgattctggacaatgatggagatcgactttttgccaagtactatgacgacacctaccccagtgtcaaggagcaaaaggcctttgagaagaacattttcaacaagacccatcggactgacagtgaaattgccctcttggaaggcctgacagtggtatacaaaagcagtatagatctctatttctatgtgattggcagctcctatgaaaatgaggaaaaatgtagaaaagcgagcactgctggagaacatggaggggctgttcttggctgtggatgaaattgtagatggaggggtgatcctagagagtgatccccagcaggtggtacaccgggtggcattaaggggtgaagatgtcccccttacggagcagaccgtgtctcaggtgctgcagtcagccaaagaacagatcaagtggtcactccttcggtgaagacctcactgttcctggctcttcatcctcttcaaaaaatttgcatgtctgctgtgaattttcatct

SEQ ID NO: 120394 - DNA, 1026 bp, Homo sapiens
  Payload ID: 3607
  Gene Symbol: COPZ1
  Gene Name: coatomer protein complex, subunit zeta 1
  ENST ID: ENST00000550171
  CDS Start-End: 26-313
acgtcggcaccagctgcggggcaagatggaggcgctgattttggaaccttccctgtatactgtcaaagccatcctgattctggacaatgatggagatcgactttttgccaagtactatgacgacacctaccccagtgtcaaggagcaaaaggcctttgagaagaacattttcaacaagacccatcggactgacactgatgcttatggctgttctgaactgtctcttcgactcattgagccagatgctgaggaaaaatgtagaaaagcgagcactgctggagaacatggaggggctgttcttggctgtggatgaaattgtagatggaggggtgatcctagagagtgatccccagcaggtggtacaccgggtggcattaaggggtgaagatgtcccccttacggagcagaccgtgtctcaggtgctgcagtcagccaaagaacagatcaagtggtcactccttcggtgaagacctcactgttcctggctcttcatcctcttcaaaaaatttgcatgtctgctgtgaattttcatctagttccccaatcgatgctctcagggtcatctcggggatcacagggatccttaaatctccattctgtttgtggttgccccctcaacctcccctacacccttcctattctttttcattcttcttgcagttctgggagtaaagctcccagcatatttagataatagggcaggggaagcaccctctttctttctagactggattatgctcacatgctcccttgccctgacatttttgtaaattctgtgccctttgctgtagctacacttcagattaaagtaggagaaagaatgtgctgagtgttttcctccctttgcctctacctggccctcatcccaacagcccagcaaggggagagagaaagagaattcttttctatagaacgagtgggggcggggatgggtagggatttatccaatctaagccctaaccccacttagtgacctcagtgttttcttccattccttcttactgccctgtcctctgccttggaaga

SEQ ID NO: 120395 - DNA, 736 bp, Homo sapiens
  Payload ID: 3607
  Gene Symbol: COPZ1
  Gene Name: coatomer protein complex, subunit zeta 1
  ENST ID: ENST00000549116
  CDS Start-End: 21-380
ggcaccagctgcggggcaagatggaggcgctgattttggaaccttccctgtatactgtcaaagccatcctgattctggacaatgatggagatcgactttttgccaagctgatgcttatggctgttctgaactgtctcttcgactcattgagccagatgctgaggaaaaatgtagaaaagcgagcactgctggagaacatggaggggctgttcttggctgtggatgaaattgtagatggaggggtgatcctagagagtgatccccagcaggtggtacaccgggtggcattaaggggtgaagatgtcccccttacggagcagaccgtgtctcaggtgctgcagtcagccaaagaacagatcaagtggtcactccttcggtgaagacctcactgttcctggctcttcatcctcttcaaaaaatttgcatgtctgctgtgaattttcatctagttccccaatcgatgctctcagggtcatctcggggatcacagggatccttaaatctccattctgtttgtggttgccccctcaacctcccctacacccttcctattctttttcattcttcttgcagttctgggagtaaagctcccagcatatttagataatagggcaggggaagcaccctctttctttctagactggattatgctcacatgctcccttgccctgacatttttgtaaattctgtgccctttgctgtagctacacttcagattaaagtaggagaaagaatg

SEQ ID NO: 120396 - DNA, 575 bp, Homo sapiens
  Payload ID: 3607
  Gene Symbol: COPZ1
  Gene Name: coatomer protein complex, subunit zeta 1
  Uniprot ID: P61923
  ENST ID: ENST00000552362
  CDS Start-End: 26-508
acgtcggcaccagctgcggggcaagatggaggcgctgattttggaaccttccctgtatactgtcaaagccatcctgattctggacaatgatggagatcgactttttgccaagtactatgacgacacctaccccagtgtcaaggagcaaaaggcctttgagaagaacattttcaacaagacccatcggactgacagtgaaattgccctcttggaaggcctgacagtggtatacaaaagcagtatagatctctatttctatgtgattggcagctcctatgaaaatgagctgatgcttatggctgttctgaactgtctcttcgactcattgagccagatgctgaggaaaaatgtagaaaagcgagcactgctggagaacatggaggggctgttcttggctgtggatgaaattgtagatggaggggtgatcctagagagtgatccccagcaggtggtacaccgggtgctgcagtcagccaaagaacagatcaagtggtcactccttcggtgaagacctcactgttcctggctcttcatcctcttcaaaaaatttgcatgtctgctgtgaattttcatct

SEQ ID NO: 120397 - DNA, 778 bp, Homo sapiens
  Payload ID: 3607
  Gene Symbol: COPZ1
  Gene Name: coatomer protein complex, subunit zeta 1
  ENST ID: ENST00000548753
  CDS Start-End: 346-615
tgatggtttcccaagtttgactctccattgccgattccctgccacattccttcaggaaactgttttgtcttcggtttcctgttaatccctattatataggaaccttccctgtatactgtcaaagccatcctgattctggacaatgatggagatcgactttttgccaagtactatgacgacacctaccccagtgtcaaggagcaaaaggcctttgagaagaacattttcaacaagacccatcggactgacagtgaaattgccctcttggaaggcctgacagtggtatacaaaagcagtatagatctctatttctatgtgattggcagctcctatgaaaatgagctgatgcttatggctgttctgaactgtctcttcgactcattgagccagatgctgaggaaaaatgtagaaaagcgagcactgctggagaacatggaggggctgttcttggctgtggatgaaattgtagatggaggggtgatcctagagagtgatccccagcaggtggtacaccgggtggcattaaggggtgaagatgtcccccttacggagcagaccgtgtctcaggtgctgcagtcagccaaagaacagatcaagtggtcactccttcggtgaagacctcactgttcctggctcttcatcctcttcaaaaaatttgcatgtctgctgtgaattttcatctagttccccaatcgatgctctcagggtcatctcggggatcacagggatccttaaatctccattctgtttgtggttgccccctcaacctcccctacac

SEQ ID NO: 120398 - DNA, 551 bp, Homo sapiens
  Payload ID: 3607
  Gene Symbol: COPZ1
  Gene Name: coatomer protein complex, subunit zeta 1
  ENST ID: ENST00000553231
  CDS Start-End: 26-520
acgtcggcaccagctgcggggcaagatggaggcgctgattttgtactatgacgacacctaccccagtgtcaaggagcaaaaggcctttgagaagaacattttcaacaagacccatcggactgacagtgaaattgccctcttggaaggcctgacagtggtatacaaaagcagtatagatctctatttctatgtgattggcagctcctatgaaaatgagctgatgcttatggctgttctgaactgtctcttcgactcattgagccagatgctgaggaaaaatgtagaaaagcgagcactgctggagaacatggaggggctgttcttggctgtggatgaaattgtagatggaggggtgatcctagagagtgatccccagcaggtggtacaccgggtggcattaaggggtgaagatgtcccccttacggagcagaccgtgtctcaggtatacctcttctctcttcatcccctcagtgggtttgaatttttttggaattttccaaacaatctgctagggccttagagagcttcttcccatctctttacccttgggg

SEQ ID NO: 120399 - DNA, 548 bp, Homo sapiens
  Payload ID: 3607
  Gene Symbol: COPZ1
  Gene Name: coatomer protein complex, subunit zeta 1
  ENST ID: ENST00000550713
  CDS Start-End: 134-548
acttaccctgggtctttctcaatgggaaatatcaaaatctgaccaagttgaggtaagggacttacagaggtacctctgtatccccttgcagccccagtgggactaggggaaggtatctggtttaccagtggtgatgggaggcttcaggactgaaggtatgttcgtatctcttcaggaaccttccctgtatactgtcaaagccatcctgattctggacaatgatggagatcgactttttgccaagtactatgacgacacctaccccagtgtcaaggagcaaaaggcctttgagaagaacattttcaacaagacccatcggactgacagtgaaattgccctcttggaaggcctgacagtggtatacaaaagcagtatagatctctatttctatgtgattggcagctcctatgaaaatgagctgatgcttatggctgttctgaactgtctcttcgactcattgagccagatgctgaggaaaaatgtagaaaagcgagcactgctggagaacatggaggggctgttcttggctgtggatgaaattgtagatg

SEQ ID NO: 120400 - DNA, 1462 bp, Homo sapiens
  Payload ID: 3607
  Gene Symbol: COPZ1
  Gene Name: coatomer protein complex, subunit zeta 1
  ENST ID: ENST00000551779
  CDS Start-End: 14-505
gctgcggggcaagatggaggcgctgattttggaaccttccctgtatactgtcaaagccatcctgattctggacaatgatggagatcgactttttgccaagtactatgacgacacctaccccagtgtcaaggagcaaaaggcctttgagaagaacattttcaacaagacccatcggactgacagtgaaattgccctcttggaaggcctgacagtggtatacaaaagcagtatagatctctatttctatgtgattggcagctcctatgaaaatgagctgatgcttatggctgttctgaactgtctcttcgactcattgagccagatgctgaggaaaaatgtagaaaagcgagcactgctggagaacatggaggggctgttcttggctgtggatgaaattgtagatggaggggtgatcctagagagtgatccccagcaggtggtacaccgggtggcattaaggggtgaagatgtcccccttacggagcagaccgtgtctcaggtatgactctcccttcttcctttccagatggactgggtcactaaagaggctagaacagcattccacccatacctctcaaatctgagtgaaactagagactcaagacacatcttccttggctccctcttattccagagaactgggactcatacagccagccactccctacccctacttccaactcctttctcagttacctgtgagcagtggctgtcagccttgctctgtacccttcaaaccctccctgcctgcctgatgcctcattcagtgatttattccccagcagaggcttgccttaagcagatggtctgtgtgcatttgtgcacacacactctctttctcttattattcaattgagggctaagctggaaatgcatattctagaatatgcaggttttgcagatccatcttgctaccttgactgcagatagattgtctacctgatgtagggggaagggaggggttccgttttctacccacttggaattctcaccaagaagtccatctggatttgttacccgccccctgcccgccgccccttttaacatatgtccagtaactccctttttttttttcttttataccaggtatacctcttctctcttcatcccctcagtgggtttgaatttttttggaattttccaaacaatctgctagggccttagagagcttcttcccatctctttacccttggggattttctattctccattcttctaaggacagggaagacaagtgaggggaaggagatccccagccctcatccttaccctgccctgtcagcaagctttcctcaatgctgctcttatctctgcaggtgctgcagtcagccaaagaacagatcaagtggtcactccttcggtgaagacctcactgttcctggctcttcatcctcttcaaaaaatttgcatgtctgctgtgaattttcatctagttccccaatcgatgctctcagggtcatct

SEQ ID NO: 120401 - DNA, 1232 bp, Homo sapiens
  Payload ID: 3607
  Gene Symbol: COPZ1
  Gene Name: coatomer protein complex, subunit zeta 1
  Uniprot ID: P61923
  ENST ID: ENST00000549043
  CDS Start-End: 96-653
ttgcggctccacgtcggcaccagctgcggggcaagatggaggcgctgattttgccccagtgggactaggggaaggtatctggtttaccagtggtgatgggaggcttcaggactgaaggtatgttcgtatctcttcaggaaccttccctgtatactgtcaaagccatcctgattctggacaatgatggagatcgactttttgccaagtactatgacgacacctaccccagtgtcaaggagcaaaaggcctttgagaagaacattttcaacaagacccatcggactgacagtgaaattgccctcttggaaggcctgacagtggtatacaaaagcagtatagatctctatttctatgtgattggcagctcctatgaaaatgagctgatgcttatggctgttctgaactgtctcttcgactcattgagccagatgctgaggaaaaatgtagaaaagcgagcactgctggagaacatggaggggctgttcttggctgtggatgaaattgtagatggaggggtgatcctagagagtgatccccagcaggtggtacaccgggtggcattaaggggtgaagatgtcccccttacggagcagaccgtgtctcaggtgctgcagtcagccaaagaacagatcaagtggtcactccttcggtgaagacctcactgttcctggctcttcatcctcttcaaaaaatttgcatgtctgctgtgaattttcatctagttccccaatcgatgctctcagggtcatctcggggatcacagggatccttaaatctccattctgtttgtggttgccccctcaacctcccctacacccttcctattctttttcattcttcttgcagttctgggagtaaagctcccagcatatttagataatagggcaggggaagcaccctctttctttctagactggattatgctcacatgctcccttgccctgacatttttgtaaattctgtgccctttgctgtagctacacttcagattaaagtaggagaaagaatgtgctgagtgttttcctccctttgcctctacctggccctcatcccaacagcccagcaaggggagagagaaagagaattcttttctatagaacgagtgggggcggggatgggtagggatttatccaatctaagccctaaccccacttagtgacctcagtgttttcttccattccttcttactgccctgtcctctgccttggaagaggctttgggaatagttcata

SEQ ID NO: 120402 - DNA, 797 bp, Homo sapiens
  Payload ID: 3607
  Gene Symbol: COPZ1
  Gene Name: coatomer protein complex, subunit zeta 1
  ENST ID: ENST00000552218
  CDS Start-End: 34-630
gcggctccacgtcggcaccagctgcggggcaagatggaggcgctgattttggaaccttccctgtatactgtcaaagccatcctgattctggacaatgatggagatcgactttttgccaagtactatgacgacacctaccccagtgtcaaggagcaaaaggcctttgagaagaacattttcaacaagacccatcggactgacagtgaaattgccctcttggaaggcctgacagtggtatacaaaagcagtatagatctctatttctatgtgattggcagctcctatgaaaatgagctgatgcttatggctgttctgaactgtctcttcgactcattgagccagatgctgagaacaggaagcacccaggcaggaggactgcatgagtcgagttcaagacaagcttgggcaacacagaaaaatgtagaaaagcgagcactgctggagaacatggaggggctgttcttggctgtggatgaaattgtagatggaggggtgatcctagagagtgatccccagcaggtggtacaccgggtggcattaaggggtgaagatgtcccccttacggagcagaccgtgtctcaggtgctgcagtcagccaaagaacagatcaagtggtcactccttcggtgaagacctcactgttcctggctcttcatcctcttcaaaaaatttgcatgtctgctgtgaattttcatctagttccccaatcgatgctctcagggtcatctcggggatcacagggatccttaaatctccattctgtttgtggttgccccctcaacctcccctacaccctt

SEQ ID NO: 120403 - DNA, 537 bp, Homo sapiens
  Payload ID: 3607
  Gene Symbol: COPZ1
  Gene Name: coatomer protein complex, subunit zeta 1
  ENST ID: ENST00000552848
  CDS Start-End: 261-537
cttttcagcccaggagtccagccaggtctgcgtttctcccatgcatttgacgaattccaacctgatggtccactcgaatgtgacctttaaactttatacaggttgtcgtcgccttgtgtccccacggctctcctagggacagggaaactgagtcatatcaaggtggaaggcagctgaaggcggggcctaatgggaacgtatggccaatcagcggcggcgtttcttttgcggctccacgtcggcaccagctgcggggcaagatggaggcgctgattttggaaccttccctgtatactgtcaaagccatcctgattctggacaatgatggagatcgactttttgccaagtactatgacgacacctaccccagtgtcaaggagcaaaaggcctttgagaagaacattttcaacaagacccatcggactgacagtgaaattgccctcttggaaggcctgacagtggtatacaaaagcagtatagatctctatttctatgtgattggcagctcctatgaaaatgagctgatgcttatggctg

SEQ ID NO: 120404 - DNA, 686 bp, Homo sapiens
  Payload ID: 3608
  Gene Symbol: COPZ2
  Gene Name: coatomer protein complex, subunit zeta 2
  ENST ID: ENST00000581756
  CDS Start-End: 1-425
acaccatcaaggctgttttcatcctagataatgacgggcgccggctgctggccaagtattatgatgacacattcccctccatgaaggagcagatggttttcgagaaaaatgtcttcaacaagaccagccggactgagagtgagattgcattttttgggggtatgaccatcgtctacaagaacagcattgacctcttcctatacgtggtgggctcatcctacgagaatgagctgatgctcatgtctgttctcacctgcctgtttgagtctctgaaccacatgttaagtgtgattctggagagtgacccccagcaagtgatccagaaggtgaattttagggcagatgatggcggcttgactgaacagagtgtggcccaggttcttcagtctgccaaggaacaaattaaatggtcgttattgaaatgaaggctgtggattcaaggctccctgccccccagatcatttccccaatcctggcaaaagcccaaagatcccagggtcaggagagacccctctgtatccccaggtccctcccagaactgactcctaaggtctccagccagggcttctgagatgcaaaggtttggcctcaggagagtcaccttttctcacggccctggccttaactcatatcttaggcattcctggccccagggccctaataaacctgcttttgtcttctgccaa

SEQ ID NO: 120405 - DNA, 520 bp, Homo sapiens
  Payload ID: 3608
  Gene Symbol: COPZ2
  Gene Name: coatomer protein complex, subunit zeta 2
  ENST ID: ENST00000583414
  CDS Start-End: 1-138
gacctcttcctatacgtggtgggctcatcctacgagaatgaggaagaacgtggagaagcgctggttgctggagaacatggacggagccttcttggtgctggacgagattgtggatggcggtgtgattctggagagtgacccccagcaagtgatccagaaggtgaattttagggcagatgatggcggcttgactgaacagagtgtggcccaggttcttcagtctgccaaggaacaaattaaatggtcgttattgaaatgaaggctgtggattcaaggctccctgccccccagatcatttccccaatcctggcaaaagcccaaagatcccagggtcaggagagacccctctgtatccccaggtccctcccagaactgactcctaaggtctccagccagggcttctgagatgcaaaggtttggcctcaggagagtcaccttttctcacggccctggccttaactcatatcttaggcattcctggccccagggccctaataaacctgcttttgtcttctgccaa

SEQ ID NO: 120406 - DNA, 157 bp, Homo sapiens
  Payload ID: 3608
  Gene Symbol: COPZ2
  Gene Name: coatomer protein complex, subunit zeta 2
  ENST ID: ENST00000580174
  CDS Start-End: 129-157
ggcaccctgaggatgcagagttcggggatttgcaggaaccttccctctacaccatcaaggctgttttcatcctagataatgacgggcgccggctgctggccaagtattatgatgacacattcccctccatgaaggagcagatggttttcgagaaaaa

SEQ ID NO: 120407 - DNA, 590 bp, Homo sapiens
  Payload ID: 3608
  Gene Symbol: COPZ2
  Gene Name: coatomer protein complex, subunit zeta 2
  ENST ID: ENST00000581637
  CDS Start-End: 1-169
catcaaggctgttttcatcctagataatgacgggcgccggctgctggccaagtattatgatgacacattcccctccatgaaggagcagatggttttcgagaaaaatgtcttcaacaagaccagccggactgagactgatgctcatgtctgttctcacctgcctgtttgagtctctgaaccacatgttaagtgtgattctggagagtgacccccagcaagtgatccagaaggtgaattttagggcagatgatggcggcttgactgaacagagtgtggcccaggttcttcagtctgccaaggaacaaattaaatggtcgttattgaaatgaaggctgtggattcaaggctccctgccccccagatcatttccccaatcctggcaaaagcccaaagatcccagggtcaggagagacccctctgtatccccaggtccctcccagaactgactcctaaggtctccagccagggcttctgagatgcaaaggtttggcctcaggagagtcaccttttctcacggccctggccttaactcatatcttaggcattcctggccccagggccctaataaacctgcttttgtcttctgccaa

SEQ ID NO: 120408 - DNA, 746 bp, Homo sapiens
  Payload ID: 3608
  Gene Symbol: COPZ2
  Gene Name: coatomer protein complex, subunit zeta 2
  ENST ID: ENST00000579263
  CDS Start-End: 1-240
cggactgagagtgagattgcattttttgggggtatgaccatcgtctacaagaacagcattgacctcttcctatacgtggtgggctcatcctacgagaatgagctgatgctcatgtctgttctcacctgcctgtttgagtctctgaaccacatgttaaggaagaacgtggagaagcgctggttgctggagaacatggacggagccttcttggtgctggacgagattgtggatggcgggtgaggaggggacagtcagggacactcacagcaggagtgcctttgataatcatcagccccagatggcacccagcatggctagaactctgaccaacttctcactcccttcccccagcatattcccagggatcccattcccctagcccttccccttactagcgccccactcatgaagatagaagttgatttcaatgttagccaaagtcaagccaaacaagagactaacctgatgtcaaactatgggagactgttgaataggcagggtttggggaaaatccagtttggtctccaatgcccaggggaagcactggcacagatgctggccctctctggaaggacttcagacagtcccaccagccccacatgtcctgctcttagggctcaattccaacacaagctagatgcgtgacctgggtcaattactgaccctccccgaggcttactttctccatctttaggatggaggtaataagggattgtggggattaaatacatgtgtgagaagataca

SEQ ID NO: 120409 - DNA, 713 bp, Homo sapiens
  Payload ID: 3608
  Gene Symbol: COPZ2
  Gene Name: coatomer protein complex, subunit zeta 2
  ENST ID: ENST00000584955
  CDS Start-End: 1-351
ggtatgaccatcgtctacaagaacagcattgacctcttcctatacgtggtgggctcatcctacgagaatgagctgatgctcatgtctgttctcacctgcctgtttgagtctctgaaccacatgttaaggaagaacgtggagaagcgctggttgctggagaacatggacggagccttcttggtgctggacgagattgtggatggcggtgtgattctggagagtgacccccagcaagtgatccagaaggtgaattttagggcagatgatggcggcttgactgaacagagtgtggcccaggtctctctgctcagactaatcctgcttgtatggaacttcccgccctggcgctaactcctcgtgctgtggtggccctaccgagatgagcctgtgctgtctcgtgtggagtcccaggttcttcagtctgccaaggaacaaattaaatggtcgttattgaaatgaaggctgtggattcaaggctccctgccccccagatcatttccccaatcctggcaaaagcccaaagatcccagggtcaggagagacccctctgtatccccaggtccctcccagaactgactcctaaggtctccagccagggcttctgagatgcaaaggtttggcctcaggagagtcaccttttctcacggccctggccttaactcatatcttaggcattcctggccccagggccctaataaacctgcttttgtctt

SEQ ID NO: 120410 - DNA, 895 bp, Homo sapiens
  Payload ID: 3608
  Gene Symbol: COPZ2
  Gene Name: coatomer protein complex, subunit zeta 2
  Uniprot ID: Q9P299
  ENST ID: ENST00000621465
  CDS Start-End: 6-638
gcggaatgcagcggcccgaggcctggccacgtccgcacccgggggagggggccgcggcggcccaggccgggggcccggcgccgcctgctcgagccggggagccctcggggctgcggttgcaggaaccttccctctacaccatcaaggctgttttcatcctagataatgacgggcgccggctgctggccaagtattatgatgacacattcccctccatgaaggagcagatggttttcgagaaaaatgtcttcaacaagaccagccggactgagagtgagattgcattttttgggggtatgaccatcgtctacaagaacagcattgacctcttcctatacgtggtgggctcatcctacgagaatgagctgatgctcatgtctgttctcacctgcctgtttgagtctctgaaccacatgttaaggaagaacgtggagaagcgctggttgctggagaacatggacggagccttcttggtgctggacgagattgtggatggcggtgtgattctggagagtgacccccagcaagtgatccagaaggtgaattttagggcagatgatggcggcttgactgaacagagtgtggcccaggttcttcagtctgccaaggaacaaattaaatggtcgttattgaaatgaaggctgtggattcaaggctccctgccccccagatcatttccccaatcctggcaaaagcccaaagatcccagggtcaggagagacccctctgtatccccaggtccctcccagaactgactcctaaggtctccagccagggcttctgagatgcaaaggtttggcctcaggagagtcaccttttctcacggccctggccttaactcatatcttaggcattcctggccccagggccctaataaacctgcttttgtcttctg

SEQ ID NO: 120411 - DNA, 1771 bp, Homo sapiens
  Payload ID: 3609
  Gene Symbol: CBWD1
  Gene Name: COBW domain containing 1
  Uniprot ID: Q9BRT8
  ENST ID: ENST00000314367
  CDS Start-End: 285-1364
gtgctgggcgtgcgcggctgcggtacggcgtgttggtcccagcggttcagctgaggtagggacgtgctgtaggccggaatgttaccggctgttggatctgcggatgaggaggaggatcctgcggaggaggattgtcctgaattggttcccattgagacgacgcaaagcgaggaggaggaaaagtctggcctcggcgccaagatcccagtcacaattatcaccgggtatttagttattcagaggctgctctgctgagaagatgaacaaatttcttgtccaaaacaatgtatttcaaacgtgccgctcgggcctttcccgtattgctcactggtgctgggaagacaacacttctgaactatattttgacagagcaacatagtaaaagagtagcggtcattttaaatgaatttggggaaggaagtgcgctggagaaatccttagctgtcagccaaggtggagagctctatgaagagtggctggaacttagaaacggttgcctctgctgttcagtgaaggacagtggccttagagctattgagaatttgatgcaaaagaaggggaaatttgattacatactgttagagaccactggattagcagaccctggtgcagtggcttctatgttttgggttgatgctgaattagggagtgatatttatcttgatggtatcataactattgtggattcaaaatatggattaaaacatttaacagaagagaaacctgatggccttatcaatgaagctactagacaagttgctttggcagatgccattctcattaataaaacagacctggttccagaagaagatgtaaagaaattaagaacgacaattagatccataaatggactaggacaaatcttagaaacacaaagatcaagagttgatctctctaatgtattagatcttcatgcctttgatagtctctctggaataagtttgcagaaaaaacttcagcatgtgccaggaacacaacctcaccttgatcagagtattgttacaatcacatttgaagtaccaggaaatgcaaaggaagaacatcttaatatgtttattcagaatctcctgtgggaaaagaatgtgagaaacaaggacaatcactgcatggaggtcataaggctgaagggattggtgtcaatcaaagacaaatcacaacaagtgattgtccagggtgtccatgagctctatgatctggaggagactccagtgagctggaaggatgacactgagagaacaaatcgattggtcctccttggcagaaatttagataaggatatccttaaacagctgtttatagctactgtgacagaaacagaaaagcagtggacaacacgtttccaagaagatcaagtttgtacataacactagaggcatttcttatcaaaaggattggataataaaaataagtttctactgggtatatttcaagcatttatttattactttagttacgaattccaatatactttaaaatggtatttgttttacagcatacataaaatgtagcaaatcagtactgtaaaacatttaacattcatacagttatatataatatccttttttttaaagaatggtatttcacaaaaatatcttttgaaattggctttggagtttacatatactgaacatgaaagtttataataatgatgatacaactttcaacattgtcattttttcttagaacttcagctgattgcagagatataatgattacattgttattaaatttttttaacacaagtaagtgtcaccattttatgacatgaaat

SEQ ID NO: 120412 - DNA, 1706 bp, Homo sapiens
  Payload ID: 3609
  Gene Symbol: CBWD1
  Gene Name: COBW domain containing 1
  Uniprot ID: Q9BRT8
  ENST ID: ENST00000356521
  CDS Start-End: 90-1277
ccgggagtggcgtgctgggcgtgcgcggctgcggtacggcgtgttggtcccagcggttcagctgaggtagggacgtgctgtaggccggaatgttaccggctgttggatctgcggatgaggaggaggatcctgcggaggaggattgtcctgaattggttcccattgagacgacgcaaagcgaggaggaggaaaagtctggcctcggcgccaagatcccagtcacaattatcaccgggtatttaggtgctgggaagacaacacttctgaactatattttgacagagcaacatagtaaaagagtagcggtcattttaaatgaatttggggaaggaagtgcgctggagaaatccttagctgtcagccaaggtggagagctctatgaagagtggctggaacttagaaacggttgcctctgctgttcagtgaaggacagtggccttagagctattgagaatttgatgcaaaagaaggggaaatttgattacatactgttagagaccactggattagcagaccctggtgcagtggcttctatgttttgggttgatgctgaattagggagtgatatttatcttgatggtatcataactattgtggattcaaaatatggattaaaacatttaacagaagagaaacctgatggccttatcaatgaagctactagacaagttgctttggcagatgccattctcattaataaaacagacctggttccagaagaagatgtaaagaaattaagaacgacaattagatccataaatggactaggacaaatcttagaaacacaaagatcaagagttgatctctctaatgtattagatcttcatgcctttgatagtctctctggaataagtttgcagaaaaaacttcagcatgtgccaggaacacaacctcaccttgatcagagtattgttacaatcacatttgaagtaccaggaaatgcaaaggaagaacatcttaatatgtttattcagaatctcctgtgggaaaagaatgtgagaaacaaggacaatcactgcatggaggtcataaggctgaagggattggtgtcaatcaaagacaaatcacaacaagtgattgtccagggtgtccatgagctctatgatctggaggagactccagtgagctggaaggatgacactgagagaacaaatcgattggtcctccttggcagaaatttagataaggatatccttaaacagctgtttatagctactgtgacagaaacagaaaagcagtggacaacacgtttccaagaagatcaagtttgtacataacactagaggcatttcttatcaaaaggattggataataaaaataagtttctactgggtatatttcaagcatttatttattactttagttacgaattccaatatactttaaaatggtatttgttttacagcatacataaaatgtagcaaatcagtactgtaaaacatttaacattcatacagttatatataatatccttttttttaaagaatggtatttcacaaaaatatcttttgaaattggctttggagtttacatatactgaacatgaaagtttataataatgatgatacaactttcaacattgtcattttttcttagaacttcagctgattgcagagatataatgattacattgttattaaatttttttaacacaagtaagtgtcaccattttatgacatgaaataaaaggttatgactgttattga

SEQ ID NO: 120413 - DNA, 1792 bp, Homo sapiens
  Payload ID: 3609
  Gene Symbol: CBWD1
  Gene Name: COBW domain containing 1
  Uniprot ID: Q9BRT8
  ENST ID: ENST00000377400
  CDS Start-End: 179-1366
aaggggcgaggcgcttctcgtccagagcccaggtaatccgggcgggatcagcgagcgtcgcgatgtgatgacgtcaggccccgggcaggccgggagtggcgtgctgggcgtgcgcggctgcggtacggcgtgttggtcccagcggttcagctgaggtagggacgtgctgtaggccggaatgttaccggctgttggatctgcggatgaggaggaggatcctgcggaggaggattgtcctgaattggttcccattgagacgacgcaaagcgaggaggaggaaaagtctggcctcggcgccaagatcccagtcacaattatcaccgggtatttaggtgctgggaagacaacacttctgaactatattttgacagagcaacatagtaaaagagtagcggtcattttaaatgaatttggggaaggaagtgcgctggagaaatccttagctgtcagccaaggtggagagctctatgaagagtggctggaacttagaaacggttgcctctgctgttcagtgaaggacagtggccttagagctattgagaatttgatgcaaaagaaggggaaatttgattacatactgttagagaccactggattagcagaccctggtgcagtggcttctatgttttgggttgatgctgaattagggagtgatatttatcttgatggtatcataactattgtggattcaaaatatggattaaaacatttaacagaagagaaacctgatggccttatcaatgaagctactagacaagttgctttggcagatgccattctcattaataaaacagacctggttccagaagaagatgtaaagaaattaagaacgacaattagatccataaatggactaggacaaatcttagaaacacaaagatcaagagttgatctctctaatgtattagatcttcatgcctttgatagtctctctggaataagtttgcagaaaaaacttcagcatgtgccaggaacacaacctcaccttgatcagagtattgttacaatcacatttgaagtaccaggaaatgcaaaggaagaacatcttaatatgtttattcagaatctcctgtgggaaaagaatgtgagaaacaaggacaatcactgcatggaggtcataaggctgaagggattggtgtcaatcaaagacaaatcacaacaagtgattgtccagggtgtccatgagctctatgatctggaggagactccagtgagctggaaggatgacactgagagaacaaatcgattggtcctccttggcagaaatttagataaggatatccttaaacagctgtttatagctactgtgacagaaacagaaaagcagtggacaacacgtttccaagaagatcaagtttgtacataacactagaggcatttcttatcaaaaggattggataataaaaataagtttctactgggtatatttcaagcatttatttattactttagttacgaattccaatatactttaaaatggtatttgttttacagcatacataaaatgtagcaaatcagtactgtaaaacatttaacattcatacagttatatataatatccttttttttaaagaatggtatttcacaaaaatatcttttgaaattggctttggagtttacatatactgaacatgaaagtttataataatgatgatacaactttcaacattgtcattttttcttagaacttcagctgattgcagagatataatgattacattgttattaaatttttttaacacaagtaagtgtcaccattttatgacatgaaataaaaggttatgactgttat

SEQ ID NO: 120414 - DNA, 2513 bp, Homo sapiens
  Payload ID: 3609
  Gene Symbol: CBWD1
  Gene Name: COBW domain containing 1
  ENST ID: ENST00000377447
  CDS Start-End: 57-809
gtacggcgtgttggtcccagcggttcagctgaggtagggacgtgctgtaggccggaatgttaccggctgttggatctgcggatgaggaggaggatcctgcggaggaggattgtcctgaattggttcccattgagacgacgcaaagcgaggaggaggaaaagtctggcctcggcgccaagatcccagtcacaattatcaccgggtatttaggtgctgggaagacaacacttctgaactatattttgacagagcaacatagtaaaagagtagcggtcattttaaatgaatttggggaaggaagtgcgctggagaaatccttagctgtcagccaaggtggagagctctatgaagagtggctggaacttagaaacggttgcctctgctgttcagtgaaggacagtggccttagagctattgagaatttgatgcaaaagaaggggaaatttgattacatactgttagagaccactggattagcagaccctggtgcagtggcttctatgttttgggttgatgctgaattagggagtgatatttatcttgatggtatcataactattgtggattcaaaatatggattaaaacatttaacagaagagaaacctgatggccttatcaatgaagctactagacaagttgctttggcagatgccattctcattaataaaacagacctggttccagaagaagatgtaaagaaattaagaacgacaattaggtacgaaatgataagtgtgttaagtgcctacagatccatgttgtatacacagaatattttttactctgattgttgccctgtagaaacttaaggtataaggttgagctgcttcaagaacgttagggaatcacatatattgttgatggctaattgttatataaatggtaatacataaaattagtccccagtgcttgcagaatatagttcacagttaatagactgatattcagggtcttcgcactccatctttcttttcctgtcttctctttgactctttcctaatgtcagtcttccctaactttacccaggatggttaattcactttcccatggatgcatcctgtcagttcctgtctttactcgtaatgtattctcactctgccaatccctgagttctttcttgttctgctttttttttttttaatttattctatagagcctattctgtctctccccccttcctatgtgaagtcttccctgactcaagtggtctcagttttccctgaactcttgttgacttcatcttccttaactgtcaaccatgccttgtcttccagcttgctttaatatcttctttgtccatagccaaggctgatcagcataggacaatcaggacaatatgaatgatgctcaaatatgtgctaacagtcattttgctgactgttctggagactcccattccttttgaaaacaaagatgggcttttcaaatgaggttatagttcaggggctttgttttgaattattttgtaagacctgaactaataaaagccctatacagagagacattcggtagctattagtattggttatctttaatgtgtacaatgctttgagcgtgatggctcaaaattactattcttagtatttataagttctactgacattagattttgaatctgtcatctcagttcatatagtatatattatcaattgaatcaataaaggtaaggctcattaggagattatttgccatgattaatgattgtggaagaaagaaattcatattttttccacatatttcatcttattttaatagtaatgtccttaaactttactataaaaaaatataatgtctccacgtggagggtaggtattgttgcgtagtgttgaagatcacagaccttggaatctgcttgggttctaatccttggtctgtttctcattgtcttcttagggagcttatttacccttttaaagcctcctctgtaaaaggcataatgcctatcataagtttgctttgagtattacatgagacaatgttggtaaactttgcacagtgctgacacatagtaagtgctctgttagctattattatgtaatttttttcttagcttacatagtaagttcaaggtatagtaaaaaagggaagaaagaaaaagatggctgattttgaaaaggagaaagtgatgaatgaagattgcttttacattttttgacactggtcttctaatcttgtttctcttcataaatcttgtgcaccattgtgattgctaagaagaacacaatctatttagcaaatgtttttggcataaaaggaatgataattattacttgacttttatatccttatagagacctaagctaaatctctgacactgacaatattgactattagccagcttgttaacagtactagaaatgaatttggaagaagcaatttgataaattacacacccttttggcttttaccctccctttatatcagacttgtgactgactcagaatgatatttggggaggtgaaaaaaggtaaacatgtttgagaggaattagccatcagactagagtgtattca

SEQ ID NO: 120415 - DNA, 1807 bp, Homo sapiens
  Payload ID: 3609
  Gene Symbol: CBWD1
  Gene Name: COBW domain containing 1
  ENST ID: ENST00000382389
  CDS Start-End: 261-494
acggcgtgttggtcccagcggttcagctgaggtagggacgtgctgtaggccggaatgttaccggctgttggatctgcggatgaggaggaggatcctgcggaggaggattgtcctgaattggttcccattgagacgacgcaaagcgaggaggaggaaaagtctggcctcggcgccaagatcccagtcacaattatcaccgggtatttagttattcagaggctgctctgctgagaagatgaacaaatttcttgtccaaaacaatgtatttcaaacgtgccgctcgggcctttcccgtattgctcactggtgctgggaagacaacacttctgaactatattttgacagagcaacatagtaaaagagtagcggtcattttaaatgaatttggggaaggaagtgcgctggagaaatccttagctgtcagccaaggtggagagctctatgaagagtggctggaacttagaaacggttgcctctgctgttcagtgaagtgaggaatgtgtttactgtgtacatggtttactagaaatgtttattgattatatttccagctttaattttcttgagtaatttaactgaatttacacagtttgcttcattgtattttcaaacaaatagaaaataaacttattaggaagcattttcttaaagtgtttcttgctgtcttttctatctgctctaatgttttggtccttttattgagtttttattgcttttgatgtcagggcttatttaatctctagtgcatgaaagtctcatatgtaaaaaatgattattctgaatttaatctgtcattggtcatacttctaagtgttcaatcttataaaaaaaataaatgactatcaaaaaagagaaaaaccttacgttatgttctactagttaagttttcaaggacagtgttcactagtctaccatagaccctagaagagttacccaacacatagtagcactcaaatatttgttgaatgaattataaaaatgactacttgtactgttaattttgtgtattctagtgaattaaatctcttcggcatcatttactcccttaggtatttgactttgtgtcaaatgttttggcaaggataaaattataacagactttcttgaacaaccaaaatataatctattaaggattttccttcacttttgataaaataagaaaaaaggaaattaaaaccttgcatcctaatgtaaaatagaattatatggtgtttaatatcagtgtctctttagctattatattaaactactatagttaatacattttatcattattttgtatgttggtttttaaaaatttcataaagctataaaaagatacttggtcagataaagtttcctctgcttttaattttgataaagtattatgtatatgatttctttttacctattatatatatgcatctattgttttctcactggtaaatatgggacggacattttgttagaaggttagaagtgagttaaattttcacattcccaagggtacttttgtctcgggttgttgaatatattttaaagtgtttataataatcacttcaaaatatttaggtaattaactgtaaattatgttttggtattctccagggacagtggccttagagctattgagaatttgatgcaaaagaaggggaaatttgattacatactgttagagaccactggattagcagaccctggtaagaagtgagattattaataaccagaatatagttctgtgatatattgtaaatagatgtattagaggaatatctaaaatgaggattaaagcttttgttagtattaaaccaaaaactttttttggttt

SEQ ID NO: 120416 - DNA, 1731 bp, Homo sapiens
  Payload ID: 3609
  Gene Symbol: CBWD1
  Gene Name: COBW domain containing 1
  Uniprot ID: Q9BRT8
  ENST ID: ENST00000382393
  CDS Start-End: 77-418
gctgggcgtgcgcggctgcggtacggcgtgttggtcccagcggttcagctgaggtagggacgtgctgtaggccggaatgttaccggctgttggatctgcggatgaggaggaggatcctgcggaggaggattgtcctgaattggttcccattgagacgacgcaaagcgaggaggaggaaaagtctggcctcggcgccaagatcccagtcacaattatcaccgggtatttaggtgctgggaagacaacacttctgaactatattttgacagagcaacatagtaaaagagtagcggtcattttaaatgaatttggggaaggaagtgcgctggagaaatccttagctgtcagccaaggtggagagctctatgaagagtggctggaacttagaaacggttgcctctgctgttcagtgaagtgaggaatgtgtttactgtgtacatggtttactagaaatgtttattgattatatttccagctttaattttcttgagtaatttaactgaatttacacagtttgcttcattgtattttcaaacaaatagaaaataaacttattaggaagcattttcttaaagtgtttcttgctgtcttttctatctgctctaatgttttggtccttttattgagtttttattgcttttgatgtcagggcttatttaatctctagtgcatgaaagtctcatatgtaaaaaatgattattctgaatttaatctgtcattggtcatacttctaagtgttcaatcttataaaaaaaataaatgactatcaaaaaagagaaaaaccttacgttatgttctactagttaagttttcaaggacagtgttcactagtctaccatagaccctagaagagttacccaacacatagtagcactcaaatatttgttgaatgaattataaaaatgactacttgtactgttaattttgtgtattctagtgaattaaatctcttcggcatcatttactcccttaggtatttgactttgtgtcaaatgttttggcaaggataaaattataacagactttcttgaacaaccaaaatataatctattaaggattttccttcacttttgataaaataagaaaaaaggaaattaaaaccttgcatcctaatgtaaaatagaattatatggtgtttaatatcagtgtctctttagctattatattaaactactatagttaatacattttatcattattttgtatgttggtttttaaaaatttcataaagctataaaaagatacttggtcagataaagtttcctctgcttttaattttgataaagtattatgtatatgatttctttttacctattatatatatgcatctattgttttctcactggtaaatatgggacggacattttgttagaaggttagaagtgagttaaattttcacattcccaagggtacttttgtctcgggttgttgaatatattttaaagtgtttataataatcacttcaaaatatttaggtaattaactgtaaattatgttttggtattctccagggacagtggccttagagctattgagaatttgatgcaaaagaaggggaaatttgattacatactgttagagaccactggattagcagaccctggtaagaagtgagattattaataaccagaatatagttctgtgatatattgtaaatagatgtattagaggaatatctaaaatgaggattaaagcttttgttagtattaaaccaaaaactttttttggttt

SEQ ID NO: 120417 - DNA, 1241 bp, Homo sapiens
  Payload ID: 3609
  Gene Symbol: CBWD1
  Gene Name: COBW domain containing 1
  Uniprot ID: Q9BRT8
  ENST ID: ENST00000382447
  CDS Start-End: 53-1183
ggcgtgttggtcccagcggttcagctgaggtagggacgtgctgtaggccggaatgttaccggctgttggatctgcggatgaggaggaggatcctgcggaggaggattgtcctgaattggttcccattgagacgacgcaaagcgaggaggaggaaaagtctggcctcggcgccaagatcccagtcacaattatcaccgggtatttaggtgctgggaagacaacacttctgaactatattttgacagagcaacatagtaaaagagtagcggtcattttaaatgaatttggggaaggaagtgcgctggagaaatccttagctgtcagccaaggtggagagctctatgaagagtggctggaacttagaaacggttgcctctgctgttcagtgaaggacagtggccttagagctattgagaatttgatgcaaaagaaggggaaatttgattacatactgttagagaccactggattagcagaccctggtgcagtggcttctatgttttgggttgatgctgaattagggagtgatatttatcttgatggtatcataactattgtggattcaaaatatggattaaaacatttaacagaagagaaacctgatggccttatcaatgaagctactagacaagttgctttggcagatgccattctcattaataaaacagacctggttccagaagaagatgtaaagaaattaagaacgacaattagatccataaatggactaggacaaatcttagaaacacaaagatcaagtttgcagaaaaaacttcagcatgtgccaggaacacaacctcaccttgatcagagtattgttacaatcacatttgaagtaccaggaaatgcaaaggaagaacatcttaatatgtttattcagaatctcctgtgggaaaagaatgtgagaaacaaggacaatcactgcatggaggtcataaggctgaagggattggtgtcaatcaaagacaaatcacaacaagtgattgtccagggtgtccatgagctctatgatctggaggagactccagtgagctggaaggatgacactgagagaacaaatcgattggtcctccttggcagaaatttagataaggatatccttaaacagctgtttatagctactgtgacagaaacagaaaagcagtggacaacacgtttccaagaagatcaagtttgtacataacactagaggcatttcttatcaaaaggattggataataaaaataagtttctactgggta

SEQ ID NO: 120418 - DNA, 2182 bp, Homo sapiens
  Payload ID: 3609
  Gene Symbol: CBWD1
  Gene Name: COBW domain containing 1
  ENST ID: ENST00000618061
  CDS Start-End: 1-115
aggtgcagtggcttctatgttttgggttgatgctgaattagggagtgatatttatcttgatggtatcataactattgtggattcaaaatatggattaaaagtgaaataccactaaaggcagaaaagaatgaaatcatcccacccactgacccgttcccaatctgagcatatggatagggcccaaagcacatttaacagaagagaaacctgatggccttatcaatgaagctactagatccataaatggactaggacaaatcttagaaacacaaagatcaaggtactttaaaaaagctattcctattaataacaaatcattttagttattaataataaacattaaataattgacaaatatgcttgattctaatataagaaagatctaagtgcatttaaaaagaattggatccaaaatgttgtttggaatgctcttaataagttagtttggcatatttggctagtacatttgcctgtcttcaaaactaagaatacaaagccatgataacactgtgtaagtgtttgcttaatgaggaagaaaagacttccaaacactcgagagggtaactcagtacagaaatctgaagtatattgaggaatcttaatttgaagtgtttaaatggctttttaatatttaaaaagccttcttagtgttttatagttgccaaaaaatacatggagtctttaccttgaagttcctgacaaattcttttattaaattttgactttcattttctctaggttctgttcctaaaacatctgtgaagtgtatttctgtagattaaattctgttttccattgaatgttatcttaatttcagaaaatttctgtgcagggttattttattaagctcatttttttttttttttttttttttttggtgagaaaggctcagcagctaatagactcagcaacaggcagccaggagctctgaggctcacagctggcagtctagttccactcagtctctactggagaaattctttctttggaagtacagcagaggccttaggtgagtggcttgtctgctatggcagagattagaggtgctgccagactgccataagtgttaggcagtaacagcagcagctgcttatatgcatgtgaacagctggggaattaatttggtatgcattctcaggagccactcatctgctggcagaggtagcagaagaatgcccttagtgtaagtcctctacaaccatacaccaaatgtgctccctgcatttcaaattccattgtagaaagtctctgataatctcacttatactatgagccattcctcagtatctgtcctcttcctgttagtgttctacaattcctttctccttaatttttctccgctttacaaaatgtcacacagacaagtgcataatacttaaacaagcttttaaaaataatgctcataaatagctttggttctgtcataatattcgtatttataaacattttaagtcaattctcttcttttgttttcatttcagaaatatccatgtcctgaataaaagttgtgtcttgattagtttattatgtaacaatttagtgtgtttgacatttctaacttttatttctaacatttgctttattatagaacaataaacatgcagtgattgatttttcttacttcaagtggatgagtgagcaagtgactaaaatcttctgtgaattattcagtgtatggtgcttgccagtgcatctgagaatctagggactttctgaaatagtacttccttgctatgaggactgaagttgcattagaatccttttcaatgaagatcagatgtcctgagtacaattcttactattgggtcctgaatcttacattaaatattctctcaaattccttgaggcatagcaacttgagcttaccagtttagaaactggagatttgggctgggcgcggtggctcacgcctgtaatcccagcactttgggaggccaaggtgggtggatcacgaggtcaggagatggagaccatcctggctaacactgtgaaaccccgtctctactgaaaatacaaaaaattagctgagcctggtggtgggcgcctgtagtcccagctactcaggaggctgaggcaggagaatggcgtgaacccgggaggcggagcttgcagtgagctgagatcgcaccactgcactccagcctgggtgacagagcgagactctgtctcaaaaaaaaaaaaa

SEQ ID NO: 120419 - DNA, 1813 bp, Homo sapiens
  Payload ID: 3609
  Gene Symbol: CBWD1
  Gene Name: COBW domain containing 1
  ENST ID: ENST00000612045
  CDS Start-End: 44-526
gtcccagcggttcagctgaggtagggacgtgctgtaggccggaatgttaccggctgttggatctgcggatgaggaggaggatcctgcggaggaggattgtcctgaattggttcccattgagacgacgcaaagcgaggaggaggaaaagtctggcctcggcgccaagatcccagtcacaattatcaccgggtatttaggtgctgggaagacaacacttctgaactatattttgacagagcaacatagtaaaagagtagcggtcattttaaatgaatttggggaaggaagtgcgctggagaaatccttagctgtcagccaaggtggagagctctatgaagagtggctggaacttagaaacggttgcctctgctgttcagtgaaggacagtggccttagagctattgagaatttgatgcaaaagaaggggaaatttgattacatactgttagagaccactggattagcagaccctggtatcataactattgtggattcaaaatatggattaaaagtgaaataccactaaaggcagaaaagaatgaaatcatcccacccactgacccgttcccaatctgagcatatggatagggcccaaagcagcaaagaattggacaacttaaaatgacagctctctattctgaggacttgacacccaggctactgacattgttcttttcagttccacaaatgtgacagcatttaatgcaatagaagcaatgaatgaagttacccagagaagcatttaacagaagagaaacctgatggccttatcaatgaagctactagatccataaatggactaggacaaatcttagaaacacaaagatcaaggctcagcagctaatagactcagcaacaggcagccaggagctctgaggctcacagctggcagtctagttccactcagtctctactggagaaattctttctttggaagtacagcagaggccttagagttgatctctctaatgtattagatcttcatgcctttgatagtctctctggaataagtttgcagaaaaaacttcagcatgtgccaggaacacaacctcaccttgatcagagtattgttacaatcacatttgaagtaccaggaaatgcaaaggaagaacatcttaatatgtttattcagaatctcctgtgggaaaagaatgtgagaaacaaggacaatcactgcatggaggtcataaggctgaagggattggtgtcaatcaaagacaaatcacaacaagtgattgtccagggtgtccatgagctctatgatctggaggagactccagtgagctggaaggatgacactgagagaacaaatcgattggtcctccttggcagaaatttagataaggatatccttaaacagctgtttatagctactgtgacagaaacagaaaagcagtggacaacacgtttccaagaagatcaagtttgtacataacactagaggcatttcttatcaaaaggattggataataaaaataagtttctactgggtatatttcaagcatttatttattactttagttacgaattccaatatactttaaaatggtatttgttttacagcatacataaaatgtagcaaatcagtactgtaaaacatttaacattcatacagttatatataatatccttttttttaaagaatggtatttcacaaaaatatcttttgaaattggctttggagtttacatatactgaacatgaaagtttataataatgatgatacaactttcaacattgtcattttttcttagaacttcagctgattgcagagatataatgattacattgttattaaatttttttaacacaa

SEQ ID NO: 120420 - DNA, 2391 bp, Homo sapiens
  Payload ID: 3609
  Gene Symbol: CBWD1
  Gene Name: COBW domain containing 1
  ENST ID: ENST00000475990
  CDS Start-End: 1-280
attagatcttcatgcctttgatagtctctctggaataagtttgcagaaaaaacttcagcatgtgccaggaacacaacctcaccttgatcagagtattgttacaatcacatttgaagtaccaggaaatgcaaaggaagaacatcttaatatgtttattcagaatctcctgtgggaaaagaatgtgagaaacaaggacaatcactgcatggaggtcataaggctgaaggtacagtttactgttgcagactttcggacaaagtccttttcttggctgttataaaaactatatttggttttaaacagaaacacttgttttagtacaaatcatctttgtctactttcatttttctttattattttcgtgactgaaaaggagctttggaaatcactgcataaggcttgatttatttgcacaactttctttagggttgcagctagaacaaacctgtgtgctttgaaatgttaccttctgctctctgttcccaagtacagagaaataatgttgcaaatctcacttctgctgaacattatgcttcctgatgcatttagcagacactaaacatttgtcatactctaaacaaagttacaaaggactagaagaattcttgttctgtatttagaaacccactcacgttacttgatatttgggtatttaagtcatgaaaggtatttcttctaggaagcagtgattctaaagtgtatgcttaaccagtcagttgagtgtctactcttgtgtgttcacaagtgtgcacaaagtttttggtaaattaagaatattatttcaaataaattaatttcatccccataggagccagtttatcagataattcgtttctcatttctgcaaatcaatacacaatgagctcatattcagataaatataatagtttttctttatttcatcattgttcattgattgcaacccatttctaaaacaaattatttaatataaccaaactcctttaacttctcaacttttcccacgaaaactgtgaaacattatataaaatctttaatcaataggatatgatacatatttcatcattttgtttcaggttttggttgtgataaataacactgaaaaaccatcctaatatatgtattaactttatcattagaaaaggggattgttcaaaaagaaaatcaatacacagaaaccttttttgaaaattaaaaacattaagaaacttcttgtaattcacaaataattggaattaagtaattttctcagcttaagagtttgtattttttaagtgaatatcagtaattaatccattaacattgatgctctatttctgcttttaagtttgaactgaggctgattaatgttcagtcaattctcctttgagcagggattggtgtcaatcaaagacaaatcacaacaagtgattgtccagggtgtccatgagctctatgatctggaggagactccagtgagctggaaggatgacactgagagaacaaatcgattggtcctccttggtaagtctcaaaggattcacagttttaaaacaaagtgaaaaatatatttgaaagggatatcatgtgccacttaaacagattaaccattcaggtcctcttttaaaactaaataagcttgtggtcaatgtttcatctttatcacgttacaacgttcgtaaaagcttgttaggacttttgttcttcttcagttttagaaaagtggttaatccaaggaccaatgtgactttgatgtactgacctggaaagttaaagatggaatcactcaattactattctttttgtaaatttctaaacaccataaagcatttaatgaactggaattgataggtgaactgtgtcattttaataagcataatgtaatcacgtcatattttgttttgtttgcaggcagaaatttagataaggatatccttaaacagctgtttatagctactgtgacagaaacagaaaagcagtggacaacacgtttccaagaagatcaagtttgtacataacactagaggcatttcttatcaaaaggattggataataaaaataagtttctactgggtatatttcaagcatttatttattactttagttacgaattccaatatactttaaaatggtatttgttttacagcatacataaaatgtagcaaatcagtactgtaaaacatttaacattcatacagttatatataatatccttttttttaaagaatggtatttcacaaaaatatcttttgaaattggctttggagtttacatatactgaacatgaaagtttataataatgatgatacaactttcaacattgtcattttttcttagaacttcagctgattgcagagatataatgattacattgttattaaatttttttaacacaagtaagtgtcaccattttatgacatgaaataaaaggtt

SEQ ID NO: 120421 - DNA, 499 bp, Homo sapiens
  Payload ID: 3609
  Gene Symbol: CBWD1
  Gene Name: COBW domain containing 1
  ENST ID: ENST00000616803
  CDS Start-End: 1-153
gagctctatgaagagtggctggaacttagaaacggttgcctctgctgttcagtgaaggacagtggccttagagctattgagaatttgatgcaaaagaaggggaaatttgattacatactgttagagaccactggattagcagaccctgagtgataattcactatttatgattgaatgattatcatattaaagaggtatcataactattgtggattcaaaatatggattaaaagtgaaataccactaaaggcagaaaagaatgaaatcatcccacccactgacccgttcccaatctgagcatatggatagggcccaaagcacatttaacagaagagaaacctgatggccttatcaatgaagctactagacaagttgctttggcagatgccattctcattaataaaacagacctggttccagaagaagatgtaaagaaattaagaacgacaattagatccataaatggactaggacaaatcttagaaacacaaagatcaag

SEQ ID NO: 120422 - DNA, 585 bp, Homo sapiens
  Payload ID: 3609
  Gene Symbol: CBWD1
  Gene Name: COBW domain containing 1
  ENST ID: ENST00000618361
  CDS Start-End: 1-115
aggtgcagtggcttctatgttttgggttgatgctgaattagggagtgatatttatcttgatggtatcataactattgtggattcaaaatatggattaaaagtgaaataccactaaaggcagaaaagaatgaaatcatcccacccactgacccgttcccaatctgagcatatggatagggcccaaagcacatttaacagaagagaaacctgatggccttatcaatgaagctactagacaagttgctttggcagatgccattctcattaataaaacagacctggttccagaagaagatgtaaagaaattaagaacgacaattagatccataaatggactaggacaaatcttagaaacacaaagatcaaggctcagcagctaatagactcagcaacaggcagccaggagctctgaggctcacagctggcagtctagttccactcagtctctactggagaaattctttctttggaagtacagcagaggccttagacagaatctcactctggtttgagacagaatctcactctgtcccccaagttggagtgcggtggtgcgacctcggctcactgaaacctctgcctcct

SEQ ID NO: 120423 - DNA, 1413 bp, Homo sapiens
  Payload ID: 3609
  Gene Symbol: CBWD1
  Gene Name: COBW domain containing 1
  ENST ID: ENST00000613355
  CDS Start-End: 48-224
gttggtcccagcggttcagctgaggtagggacgtgctgtaggccggaatgttaccggctgttggatctgcggatgaggaggaggatcctgcggaggaggattgtcctgaattggttcccattgagacgacgcaaagcgaggaggaggaaaagtctggcctcggcgccaagatcccagtcacaattatcaccgggtatttagttattcagaggctgctctgctgagaagatgaacaaatttcttgtccaaaacaatgtatttcaaacgtgccgctcgggcctttcccgtattgctcactggtgctgggaagacaacacttctgaactatattttgacagagcaacatagtaaaagagtagcggtcattttaaatgaatttggggaaggaagtgcgctggagaaatccttagctgtcagccaaggtggagagctctatgaagagtggctggaacttagaaacggttgcctctgctgttcagtgaaggacagtggccttagagctattgagaatttgatgcaaaagaaggggaaatttgattacatactgttagagaccactggattagcagaccctggtgcagtggcttctatgttttgggttgatgctgaattagggagtgatatttatcttgatggtatcataactattgtggattcaaaatatggattaaaacatttaacagaagagaaacctgatggccttatcaatgaagctactagacaagttgctttggcagatgccattctcattaataaaacagacctggttccagaagaagatgtaaagaaattaagaacgacaattagatccataaatggactaggacaaatcttagaaacacaaagatcaagtttgcagaaaaaacttcagcatgtgccaggaacacaacctcaccttgatcagagtattgttacaatcacatttgaagtaccaggaaatgcaaaggaagaacatcttaatatgtttattcagaatctcctgtgggaaaagaatgtgagaaacaaggacaatcactgcatggaggtcataaggctgaaggtacagtttactgttgcagactttcggacaaagtccttttcttggctgttataaaaactatatttggttttaaacagaaacacttgttttagtacaaatcatctttgtctactttcatttttctttattattttcgtgactgaaaaggagctttggaaatcactgcataaggcttgatttatttgcacaactttctttagggttgcagctagaacaaacctgtgtgctttgaaatgttaccttctgctctctgttcccaagtacagagaaataatgttgcaaatctcacttctgctgaacattatgcttcctgatgcatttagcagacactaaacatttgtcatactctaaacaaagttacaaaggactagaag

SEQ ID NO: 120424 - DNA, 1585 bp, Homo sapiens
  Payload ID: 3609
  Gene Symbol: CBWD1
  Gene Name: COBW domain containing 1
  ENST ID: ENST00000465014
  CDS Start-End: 74-556
gggcgtgcgcggctgcggtacggcgtgttggtcccagcggttcagctgaggtagggacgtgctgtaggccggaatgttaccggctgttggatctgcggatgaggaggaggatcctgcggaggaggattgtcctgaattggttcccattgagacgacgcaaagcgaggaggaggaaaagtctggcctcggcgccaagatcccagtcacaattatcaccgggtatttaggtgctgggaagacaacacttctgaactatattttgacagagcaacatagtaaaagagtagcggtcattttaaatgaatttggggaaggaagtgcgctggagaaatccttagctgtcagccaaggtggagagctctatgaagagtggctggaacttagaaacggttgcctctgctgttcagtgaaggacagtggccttagagctattgagaatttgatgcaaaagaaggggaaatttgattacatactgttagagaccactggattagcagaccctggtatcataactattgtggattcaaaatatggattaaaagtgaaataccactaaaggcagaaaagaatgaaatcatcccacccactgacccgttcccaatctgagcatatggatagggcccaaagcacatttaacagaagagaaacctgatggccttatcaatgaagctactagatccataaatggactaggacaaatcttagaaacacaaagatcaagaatctcactctggtttgagacagaatctcactctgtcccccaagttggagtgcggtggtgcgacctcggctcactgaaacctctgcctcctgggttcaggcgattctcctgcttcaccctccgagtagctgggattacagagttgatctctctaatgtattagatcttcatgcctttgatagtctctctggaataagtttgcagaaaaaacttcagcatgtgccaggaacacaacctcaccttgatcagagtattgttacaatcacatttgaagtaccaggaaatgcaaaggaagaacatcttaatatgtttattcagaatctcctgtgggaaaagaatgtgagaaacaaggacaatcactgcatggaggtcataaggctgaagggattggtgtcaatcaaagacaaatcacaacaagtgattgtccagggtgtccatgagctctatgatctggaggagactccagtgagctggaaggatgacactgagagaacaaatcgattggtcctccttggcagaaatttagataaggatatccttaaacagctgtttatagctactgtgacagaaacagaaaagcagtggacaacacgtttccaagaagatcaagtttgtacataacactagaggcatttcttatcaaaaggattggataataaaaataagtttctactgggtatatttcaagcatttatttattactttagttacgaattccaatatactttaaaatggtatttgttttacagcatacataaaatgtagcaaatcagtactgtaaaacatttaacattcatacagttatatataatatccttttttttaaagaatggtatttcacaaaaatatcttttgaaattggct

SEQ ID NO: 120425 - DNA, 1648 bp, Homo sapiens
  Payload ID: 3609
  Gene Symbol: CBWD1
  Gene Name: COBW domain containing 1
  ENST ID: ENST00000616944
  CDS Start-End: 84-626
gtggcgtgctgggcgtgcgcggctgcggtacggcgtgttggtcccagcggttcagctgaggtagggacgtgctgtaggccggaatgttaccggctgttggatctgcggatgaggaggaggatcctgcggaggaggattgtcctgaattggttcccattgagacgacgcaaagcgaggaggaggaaaagtctggcctcggcgccaagatcccagtcacaattatcaccgggtatttaggtgctgggaagacaacacttctgaactatattttgacagagcaacatagtaaaagagtagcggtcattttaaatgaatttggggaaggaagtgcgctggagaaatccttagctgtcagccaaggtggagagctctatgaagagtggctggaacttagaaacggttgcctctgctgttcagtgaaggacagtggccttagagctattgagaatttgatgcaaaagaaggggaaatttgattacatactgttagagaccactggattagcagaccctggtgcagtggcttctatgttttgggttgatgctgaattagggagtgatatttatcttgatggtatcataactattgtggattcaaaatatggattaaaagtgaaataccactaaaggcagaaaagaatgaaatcatcccacccactgacccgttcccaatctgagcatatggatagggcccaaagcacatttaacagaagagaaacctgatggccttatcaatgaagctactagacaagttgctttggcagatgccattctcattaataaaacagacctggttccagaagaagatgtaaagaaattaagaacgacaattagatccataaatggactaggacaaatcttagaaacacaaagatcaagagttgatctctctaatgtattagatcttcatgcctttgatagtctctctggaataagtttgcagaaaaaacttcagcatgtgccaggaacacaacctcaccttgatcagagtattgttacaatcacatttgaagtaccaggaaatgcaaaggaagaacatcttaatatgtttattcagaatctcctgtgggaaaagaatgtgagaaacaaggacaatcactgcatggaggtcataaggctgaaggtacagtttactgttgcagactttcggacaaagtccttttcttggctgttataaaaactatatttggttttaaacagaaacacttgttttagtacaaatcatctttgtctactttcatttttctttattattttcgtgactgaaaaggagctttggaaatcactgcataaggcttgatttatttgcacaactttctttagggttgcagctagaacaaacctgtgtgctttgaaatgttaccttctgctctctgttcccaagtacagagaaataatgttgcaaatctcacttctgctgaacattatgcttcctgatgcatttagcagacactaaacatttgtcatactctaaacaaagttacaaaggactagaagaattcttgttctgtatttagaaacccactcacgttacttgatatttgggtatttaagtcatgaaaggtatttcttctaggaagcagtgattctaaagtgtatgcttaaccagtcagttgagtgtctactcttgtgtgttcacaagtgtgcac

SEQ ID NO: 120426 - DNA, 1227 bp, Homo sapiens
  Payload ID: 3609
  Gene Symbol: CBWD1
  Gene Name: COBW domain containing 1
  ENST ID: ENST00000619157
  CDS Start-End: 1-85
tgctgaattagggagtgatatttatcttgatggtatcataactattgtggattcaaaatatggattaaaagtgaaataccactaaaggcagaaaagaatgaaatcatcccacccactgacccgttcccaatctgagcatatggatagggcccaaagcacatttaacagaagagaaacctgatggccttatcaatgaagctactagacaagttgctttggcagatgccattctcattaataaaacagacctggttccagaagaagatgtaaagaaattaagaacgacaattagatccataaatggactaggacaaatcttagaaacacaaagatcaagagttgatctctctaatgtattagatcttcatgcctttgatagtctctctggaataagtttgcagaaaaaacttcagcatgtgccaggaacacaacctcaccttgatcagagtattgttacaatcacatttgaagtaccaggaaatgcaaaggaagaacatcttaatatgtttattcagaatctcctgtgggaaaagaatgtgagaaacaaggacaatcactgcatggaggtcataaggctgaagggattggtgtcaatcaaagacaaatcacaacaagtgattgtccagggtgtccatgagctctatgatctggaggagactccagtgagctggaaggatgacactgagagaacaaatcgattggtcctccttggcagaaatttagataaggatatccttaaacagctgtttatagctactgtgacagaaacagaaaagcagtggacaacacgtttccaagaagatcaagtttgtacataacactagaggcatttcttatcaaaaggattggataataaaaataagtttctactgggtatatttcaagcatttatttattactttagttacgaattccaatatactttaaaatggtatttgttttacagcatacataaaatgtagcaaatcagtactgtaaaacatttaacattcatacagttatatataatatccttttttttaaagaatggtatttcacaaaaatatcttttgaaattggctttggagtttacatatactgaacatgaaagtttataataatgatgatacaactttcaacattgtcattttttcttagaacttcagctgattgcagagatataatgattacattgttattaaatttttttaacacaagtaagtgtcaccattttatgacatgaaataa

SEQ ID NO: 120427 - DNA, 1143 bp, Homo sapiens
  Payload ID: 3609
  Gene Symbol: CBWD1
  Gene Name: COBW domain containing 1
  ENST ID: ENST00000613508
  CDS Start-End: 40-1083
cagcggttcagctgaggtagggacgtgctgtaggccggaatgttaccggctgttggatctgcggatgaggaggaggatcctgcggaggaggattgtcctgaattggttcccattgagacgacgcaaagcgaggaggaggaaaagtctggcctcggcgccaagatcccagtcacaattatcaccgggtatttaggtgctgggaagacaacacttctgaactatattttgacagagcaacatagtaaaagagtagcggtcattttaaatgaatttggggaaggaagtgcgctggagaaatccttagctgtcagccaaggtggagagctctatgaagagtggctggaacttagaaacggttgcctctgctgttcagtgaaggacagtggccttagagctattgagaatttgatgcaaaagaaggggaaatttgattacatactgttagagaccactggattagcagaccctggtgcagtggcttctatgttttgggttgatgctgaattagggagtgatatttatcttgatggtatcataactattgtggattcaaaatatggattaaaacatttaacagaagagaaacctgatggccttatcaatgaagctactagatccataaatggactaggacaaatcttagaaacacaaagatcaagtttgcagaaaaaacttcagcatgtgccaggaacacaacctcaccttgatcagagtattgttacaatcacatttgaagtaccaggaaatgcaaaggaagaacatcttaatatgtttattcagaatctcctgtgggaaaagaatgtgagaaacaaggacaatcactgcatggaggtcataaggctgaagggattggtgtcaatcaaagacaaatcacaacaagtgattgtccagggtgtccatgagctctatgatctggaggagactccagtgagctggaaggatgacactgagagaacaaatcgattggtcctccttggcagaaatttagataaggatatccttaaacagctgtttatagctactgtgacagaaacagaaaagcagtggacaacacgtttccaagaagatcaagtttgtacataacactagaggcatttcttatcaaaaggattggataataaaaataagtttctactgggtata

SEQ ID NO: 120428 - DNA, 549 bp, Homo sapiens
  Payload ID: 3609
  Gene Symbol: CBWD1
  Gene Name: COBW domain containing 1
  ENST ID: ENST00000489272
  CDS Start-End: 1-58
accactaaaggcagaaaagaatgaaatcatcccacccactgacccgttcccaatctgagcatatggatagggcccaaagcacatttaacagaagagaaacctgatggccttatcaatgaagctactagacaagttgctttggcagatgccattctcattaataaaacagacctggttccagaagaagatgtaaagaaattaagaacgacaattagatccataaatggactaggacaaatcttagaaacacaaagatcaaggtactttaaaaaagctattcctattaataacaaatcattttagttattaataataaacattaaataattgacaaatatgcttgattctaatataagaaagatctaagtgcatttaaaaagaattggatccaaaatgttgtttggaatgctcttaataagttagtttggcatatttggctagtacatttgcctgtcttcaaaactaagaatacaaagccatgataacactgtgtaagtgtttgcttaatgaggaagaaaagacttccaaacactcgagagggtaactcag

SEQ ID NO: 120429 - DNA, 1812 bp, Homo sapiens
  Payload ID: 3610
  Gene Symbol: CBWD2
  Gene Name: COBW domain containing 2
  Uniprot ID: Q8IUF1
  ENST ID: ENST00000259199
  CDS Start-End: 179-1366
aagggacgaggcgcttctcgtccagagcccaggtaatccgggcgggatcagcgagcgtcgcgatgtgatgacgtcaggccccgggcaggccgggagtggcgtgctgggcgtgcgcggctgcggtacggcgtgttggtcccagcggttcagctgaggtagggacgtgctgtaggccggaatgttaccggctgttggatctgcggatgaggaggaggatcctgcggaggaggattgtcctgaattggttcccatggagacgacgcaaagcgaggaggaggaaaagtctggcctcggcgccaagatcccagtcacaattatcaccgggtatttaggtgctgggaagacaacacttctgaactatattttgacagagcaacatagtaaaagagtagcggtcattttaaatgaatttggggaaggaagtgcgctggagaaatccttagctgtcagccaaggtggagagctctatgaagagtggctggaacttagaaacggttgcctctgctgttcagtgaaggacaatggccttagagctattgagaatttgatgcaaaagaaggggaaatttgattacatactgttagagaccactggattggcagacccaggtgcagtggcttctatgttttgggttgatgctgaattagggagtgatatttaccttgatggtatcataactatagtggattcaaaatatggattaaaacatttagcagaagagaaacctgatggccttatcaatgaagctactaggcaagttgctttggcagatgccattctcattaataaaacagacttggttccagaagaagatgtaaagaaattaagagcgacaattagatccataaatggactaggacaaatcttagaaacacaaagatcaagagttgatctctctaatgtattagatcttcatgcctttgatagtctctctggaataagtttgcagaaaaaacttcagcatgtgccaggaacacaacctcaccttgatcagagtattgttacaatcacatttgaagtaccaggaaatgcaaaggaagaacatcttaatatgtttattcagaatctcctgtgggaaaagaatgtgagaaacaaggacaatcactgcatggaggtcataaggctgaagggattggtgtcaatcaaagacaaatcacaacaagtgattgtccagggtgtccatgagctctatgatctggaggagactccagtgagctggaaggatgacactgagagaacaaatcgattggtcctccttggcagaaatttagataaggatatccttaaacagctgtttatagctactgtgacagaaacagaaaagcagtggacaacacatttcaaagaagatcaagtttgtacataacactagaggcatttcttatcaaaaggattggataataaaaataagtttctactgggtatatttcaagcatttatttattactttagttacgaattccaatatactttaaaatggtatttgttttacagcatacataaaatgtagcaaatcggtactgtaaaacatttaacattcatacagttatatataatatccttttttttaaagaatggtatttcacaaaaatgtcttttgaaattggctttggagtttacatatactgaacatgaaagtttataataatgatgatacaactttcaacattgtcattttttcttagaacttcagctgattgcagagatataatgattacattgttattaaatttttttaacacaagtaagtgtcaccattttatgacatgaaataaaaggttatgactgttattgatgttgatgttgacgacc

SEQ ID NO: 120430 - DNA, 1740 bp, Homo sapiens
  Payload ID: 3610
  Gene Symbol: CBWD2
  Gene Name: COBW domain containing 2
  ENST ID: ENST00000358604
  CDS Start-End: 79-255
gtgctgggcgtgcgcggctgcggtacggcgtgttggtcccagcggttcagctgaggtagggacgtgctgtaggccggaatgttaccggctgttggatctgcggatgaggaggaggatcctgcggaggaggattgtcctgaattggttcccatggagacgacgcaaagcgaggaggaggaaaagtctggcctcggcgccaagatcccagtcacaattatcaccgggtatttagttattcagaggctgctctgctgagaagatgaacaaatttcttgtccaaaacaatgtatttcaaacgtgccgctcgggcctttcccgtattgctcactggtgctgggaagacaacacttctgaactatattttgacagagcaacatagtaaaagagtagcggtcattttaaatgaatttggggaaggaagtgcgctggagaaatccttagctgtcagccaaggtggagagctctatgaagagtggctggaacttagaaacggttgcctctgctgttcagtgaaggacaatggccttagagctattgagaatttgatgcaaaagaaggggaaatttgattacatactgttagagaccactggattggcagacccaggtgcagtggcttctatgttttgggttgatgctgaattagggagtgatatttaccttgatggtatcataactatagtggattcaaaatatggattaaaacatttagcagaagagaaacctgatggccttatcaatgaagctactaggcaagttgctttggcagatgccattctcattaataaaacagacttggttccagaagaagatgtaaagaaattaagagcgacaattagatccataaatggactaggacaaatcttagaaacacaaagatcaagagttgatctctctaatgtattagatcttcatgcctttgatagtctctctggaataagtttgcagaaaaaacttcagcatgtgccaggaacacaacctcaccttgatcagagtattgttacaatcacatttgaagtaccaggaaatgcaaaggaagaacatcttaatatgtttattcagaatctcctgtgggaaaagaatgtgagaaacaaggacaatcactgcatggaggtcataaggctgaagggattggtgtcaatcaaagacaaatcacaacaagtgattgtccagggtgtccatgagctctatgatctggaggagactccagtgagctggaaggatgacactgagagaacaaatcgattggtcctccttggcagaaatttagataaggatatccttaaacagctgtttatagctactgtgacagaaacagaaaagcagtggacaacacatttcaaagaagatcaagtttgtacataacactagaggcatttcttatcaaaaggattggataataaaaataagtttctactgggtatatttcaagcatttatttattactttagttacgaattccaatatactttaaaatggtatttgttttacagcatacataaaatgtagcaaatcggtactgtaaaacatttaacattcatacagttatatataatatccttttttttaaagaatggtatttcacaaaaatgtcttttgaaattggctttggagtttacatatactgaacatgaaagtttataataatgatgatacaactttcaacattgtcattttttcttagaacttcagctgattgcagagatataatgattacattgttattaaatttttttaacac

SEQ ID NO: 120431 - DNA, 1436 bp, Homo sapiens
  Payload ID: 3610
  Gene Symbol: CBWD2
  Gene Name: COBW domain containing 2
  ENST ID: ENST00000456188
  CDS Start-End: 48-596
gttggtcccagcggttcagctgaggtagggacgtgctgtaggccggaatgttaccggctgttggatctgcggatgaggaggaggatcctgcggaggaggattgtcctgaattggttcccatggagacgacgcaaagcgaggaggaggaaaagtctggcctcggcgccaagatcccagtcacaattatcaccgggtatttaggtgctgggaagacaacacttctgaactatattttgacagagcaacatagtaaaagagtagcggtcattttaaatgaatttggggaaggaagtgcgctggagaaatccttagctgtcagccaaggtggagagctctatgaagagtggctggaacttagaaacggttgcctctgctgttcagtgaaggacaatggccttagagctattgagaatttgatgcaaaagaaggggaaatttgattacatactgttagagaccactggattggcagacccaggtgcagtggcttctatgttttgggttgatgctgaattagggagtgatatttaccttgatggtatcataactatagtggattcaaaatatggattaaaagcaaagaattggacaacttaaaatgacagctctctattctgaggacttgacacccaggctactgacattgttcttttcggttctacaaatgtgacagcatttaatgcaatagaagcaatgaatgaagttacccagagaaggtcaacatttagcagaagagaaacctgatggccttatcaatgaagctactaggcaagttgctttggcagatgccattctcattaataaaacagacttggttccagaagaagatgtaaagaaattaagagcgacaattagatccataaatggactaggacaaatcttagaaacacaaagatcaagagttgatctctctaatgtattagatcttcatgcctttgatagtctctctggaataagtttgcagaaaaaacttcagcatgtgccaggaacacaacctcaccttgatcagagtattgttacaatcacatttgaagtaccaggaaatgcaaaggaagaacatcttaatatgtttattcagaatctcctgtgggaaaagaatgtgagaaacaaggacaatcactgcatggaggtcataaggctgaagggattggtgtcaatcaaagacaaatcacaacaagtgattgtccagggtgtccatgagctctatgatctggaggagactccagtgagctggaaggatgacactgagagaacaaatcgattggtcctccttggcagaaatttagataaggatatccttaaacagctgtttatagctactgtgacagaaacagaaaagcagtggacaacacatttcaaagaagatcaagtttgtacataacactagaggcatttcttatcaaaaggattggataataaaaataagtttctactggg

SEQ ID NO: 120432 - DNA, 1411 bp, Homo sapiens
  Payload ID: 3610
  Gene Symbol: CBWD2
  Gene Name: COBW domain containing 2
  ENST ID: ENST00000433343
  CDS Start-End: 82-624
ggcgtgctgggcgtgcgcggctgcggtacggcgtgttggtcccagcggttcagctgaggtagggacgtgctgtaggccggaatgttaccggctgttggatctgcggatgaggaggaggatcctgcggaggaggattgtcctgaattggttcccatggagacgacgcaaagcgaggaggaggaaaagtctggcctcggcgccaagatcccagtcacaattatcaccgggtatttaggtgctgggaagacaacacttctgaactatattttgacagagcaacatagtaaaagagtagcggtcattttaaatgaatttggggaaggaagtgcgctggagaaatccttagctgtcagccaaggtggagagctctatgaagagtggctggaacttagaaacggttgcctctgctgttcagtgaaggacaatggccttagagctattgagaatttgatgcaaaagaaggggaaatttgattacatactgttagagaccactggattggcagacccaggtgcagtggcttctatgttttgggttgatgctgaattagggagtgatatttaccttgatggtatcataactatagtggattcaaaatatggattaaaagtgaaataccactaaaggcagaagagaatgaaatcatcccacccactgacccgttcccaatctgagcatatggatagggcccaaagcacatttagcagaagagaaacctgatggccttatcaatgaagctactaggcaagttgctttggcagatgccattctcattaataaaacagacttggttccagaagaagatgtaaagaaattaagagcgacaattagatccataaatggactaggacaaatcttagaaacacaaagatcaagagttgatctctctaatgtattagatcttcatgcctttgatagtctctctggaataagtttgcagaaaaaacttcagcatgtgccaggaacacaacctcaccttgatcagagtattgttacaatcacatttgaagtaccaggaaatgcaaaggaagaacatcttaatatgtttattcagaatctcctgtgggaaaagaatgtgagaaacaaggacaatcactgcatggaggtcataaggctgaagggattggtgtcaatcaaagacaaatcacaacaagtgattgtccagggtgtccatgagctctatgatctggaggagactccagtgagctggaaggatgacactgagagaacaaatcgattggtcctccttggcagaaatttagataaggatatccttaaacagctgtttatagctactgtgacagaaacagaaaagcagtggacaacacatttcaaagaagatcaagtttgtacataacactagaggcatttcttatcaaaaggattggataataaaaataagtttctactg

SEQ ID NO: 120433 - DNA, 1665 bp, Homo sapiens
  Payload ID: 3610
  Gene Symbol: CBWD2
  Gene Name: COBW domain containing 2
  ENST ID: ENST00000416503
  CDS Start-End: 107-1237
gtcaggccccgggcaggccgggagtggcgtgctgggcgtgcgcggctgcggtacggcgtgttggtcccagcggttcagctgaggtagggacgtgctgtaggccggaatgttaccggctgttggatctgcggatgaggaggaggatcctgcggaggaggattgtcctgaattggttcccatggagacgacgcaaagcgaggaggaggaaaagtctggcctcggcgccaagatcccagtcacaattatcaccgggtatttaggtgctgggaagacaacacttctgaactatattttgacagagcaacatagtaaaagagtagcggtcattttaaatgaatttggggaaggaagtgcgctggagaaatccttagctgtcagccaaggtggagagctctatgaagagtggctggaacttagaaacggttgcctctgctgttcagtgaaggacaatggccttagagctattgagaatttgatgcaaaagaaggggaaatttgattacatactgttagagaccactggattggcagacccaggtgcagtggcttctatgttttgggttgatgctgaattagggagtgatatttaccttgatggtatcataactatagtggattcaaaatatggattaaaacatttagcagaagagaaacctgatggccttatcaatgaagctactaggcaagttgctttggcagatgccattctcattaataaaacagacttggttccagaagaagatgtaaagaaattaagagcgacaattagatccataaatggactaggacaaatcttagaaacacaaagatcaagtttgcagaaaaaacttcagcatgtgccaggaacacaacctcaccttgatcagagtattgttacaatcacatttgaagtaccaggaaatgcaaaggaagaacatcttaatatgtttattcagaatctcctgtgggaaaagaatgtgagaaacaaggacaatcactgcatggaggtcataaggctgaagggattggtgtcaatcaaagacaaatcacaacaagtgattgtccagggtgtccatgagctctatgatctggaggagactccagtgagctggaaggatgacactgagagaacaaatcgattggtcctccttggcagaaatttagataaggatatccttaaacagctgtttatagctactgtgacagaaacagaaaagcagtggacaacacatttcaaagaagatcaagtttgtacataacactagaggcatttcttatcaaaaggattggataataaaaataagtttctactgggtatatttcaagcatttatttattactttagttacgaattccaatatactttaaaatggtatttgttttacagcatacataaaatgtagcaaatcggtactgtaaaacatttaacattcatacagttatatataatatccttttttttaaagaatggtatttcacaaaaatgtcttttgaaattggctttggagtttacatatactgaacatgaaagtttataataatgatgatacaactttcaacattgtcattttttcttagaacttcagctgattgcagagatataatgattacattgttattaaatttttttaacacaagtaagtgtcaccattttatgacatgaaataaaaggttatgactgttattg

SEQ ID NO: 120434 - DNA, 2165 bp, Homo sapiens
  Payload ID: 3611
  Gene Symbol: CBWD3
  Gene Name: COBW domain containing 3
  Uniprot ID: Q5JTY5
  ENST ID: ENST00000360171
  CDS Start-End: 552-1739
aaaaagaaaaaattgtcactggttatccttcaggtataaaaattacaattaaaattgtaatgttataaccttccattctttcccctatgaattaaaacttttttttttaacgagactaaaaaatcaagttgataaaatctatgccctgtgggaactggttaggtcaggctacccactccagatttccagcaggctggcctcagctctacctacagccagtagcttattaaggctctaggcgccagtgacaccttcagacaggtggttagtgcgccctaaggactctccgcagcgtcgctcaggttcacagaacacgcccaggggcgtgtccagctgtcgtcggggagagcccacctccccggggggtgtggctaagggacgaggcagttctcgtccagagcccaggtaatccgggcgggatcagctagcgtcgcgatgtgatgacgtcaggccccggccaggccgggagtggcgtgctgggcgtgcgcggctgcggtacggcgtgttggtcccagcggttcagctgaggtagggacgtgctgtaggccggaatgttaccggctgttggatctgtggatgaggaagaggatcctgcggaggaggattgtcctgaattggttcccattgagacgacgcaaagcgaggaggaggaaaagtctggcctcggcgccaagatcccagtcacaattatcaccgggtatttaggtgctgggaagacaacacttctgaactatattttgacagagcaacatagtaaaagagtagcggtcattttaaatgaatctggggaaggaagtgcgctggagaaatccttagctgtcagccaaggtggagagctctatgaagagtggctggaacttagaaacggttgcctctgctgttcagtgaaggacaatggccttagagctattgagaatttgatgcaaaagaaggggaaatttgatgacatactgttagagaccactggattagcagaccctggtgcagtggcttctatgttttgggttgatgctgaattagggagtgatatttaccttgatggtatcataactattgtggattcaaaatatggattaaaacatttaacagaagagaaacctgatggccttatcaatgaagctactaggcaagttgctttggcagatatcattctcattaataaaacagacttggttccagaagaagatgtaaagaaattaagaacgacaattagatccataaatggactaggacaaatcttagaaacacaaagatcaagagttgatctctctaatgtattagatcttcatgcctttgatagtctctctggaataagtttgcagaaaaaacttcagcatgtgccaggaacacaacctcaccttgatcagagtattgttacaatcacatttgaagtaccaggaaatgcaaaggaagaacatcttaatatgtttattcagaatcttctgtgggaaaagaatgtgagaaacaaggacaatcactgcatggaggtcataaggctgaagggattggtgtcaatcaaagacaaatcacaacaagtgattgtccagggtgtccatgagctctatgatctggaggagactccagtgagctggaaggatgacactgagagaacaaatcgattggtcctcattggcagaaatttagataaggatatccttaaacagctgtttatagctactgtgacagaaacagaaaagcagtggacaacacatttcaaagaagatcaagtttgtacataacactagaggcatttcttatcaaaaggattggataataaaaataagtttctactgggtatatttcaagcatttatttattactttagttacgaattccaatatactttaaaatggtatttgttttacagcatacataaaatgtagcaaatcagtactgtaaaacatttaacattcatacaattatatataatatccttttttttaaagaatggtatttcacaaaaatatcttttgaaattggctttggagtttacatatactgaacatgaaagtttataataatgatgatacaactttcaacattgtcattttttcttagaacttcagctgattgcagagatataatgattacattgttattaaatttttttaacacaagtaagtgtcaccattttatgacatgaaataaaaggttatgactgttat

SEQ ID NO: 120435 - DNA, 1665 bp, Homo sapiens
  Payload ID: 3611
  Gene Symbol: CBWD3
  Gene Name: COBW domain containing 3
  ENST ID: ENST00000377342
  CDS Start-End: 107-1237
gtcaggccccggccaggccgggagtggcgtgctgggcgtgcgcggctgcggtacggcgtgttggtcccagcggttcagctgaggtagggacgtgctgtaggccggaatgttaccggctgttggatctgtggatgaggaagaggatcctgcggaggaggattgtcctgaattggttcccattgagacgacgcaaagcgaggaggaggaaaagtctggcctcggcgccaagatcccagtcacaattatcaccgggtatttaggtgctgggaagacaacacttctgaactatattttgacagagcaacatagtaaaagagtagcggtcattttaaatgaatctggggaaggaagtgcgctggagaaatccttagctgtcagccaaggtggagagctctatgaagagtggctggaacttagaaacggttgcctctgctgttcagtgaaggacaatggccttagagctattgagaatttgatgcaaaagaaggggaaatttgatgacatactgttagagaccactggattagcagaccctggtgcagtggcttctatgttttgggttgatgctgaattagggagtgatatttaccttgatggtatcataactattgtggattcaaaatatggattaaaacatttaacagaagagaaacctgatggccttatcaatgaagctactaggcaagttgctttggcagatatcattctcattaataaaacagacttggttccagaagaagatgtaaagaaattaagaacgacaattagatccataaatggactaggacaaatcttagaaacacaaagatcaagtttgcagaaaaaacttcagcatgtgccaggaacacaacctcaccttgatcagagtattgttacaatcacatttgaagtaccaggaaatgcaaaggaagaacatcttaatatgtttattcagaatcttctgtgggaaaagaatgtgagaaacaaggacaatcactgcatggaggtcataaggctgaagggattggtgtcaatcaaagacaaatcacaacaagtgattgtccagggtgtccatgagctctatgatctggaggagactccagtgagctggaaggatgacactgagagaacaaatcgattggtcctcattggcagaaatttagataaggatatccttaaacagctgtttatagctactgtgacagaaacagaaaagcagtggacaacacatttcaaagaagatcaagtttgtacataacactagaggcatttcttatcaaaaggattggataataaaaataagtttctactgggtatatttcaagcatttatttattactttagttacgaattccaatatactttaaaatggtatttgttttacagcatacataaaatgtagcaaatcagtactgtaaaacatttaacattcatacaattatatataatatccttttttttaaagaatggtatttcacaaaaatatcttttgaaattggctttggagtttacatatactgaacatgaaagtttataataatgatgatacaactttcaacattgtcattttttcttagaacttcagctgattgcagagatataatgattacattgttattaaatttttttaacacaagtaagtgtcaccattttatgacatgaaataaaaggttatgactgttattg

SEQ ID NO: 120436 - DNA, 1813 bp, Homo sapiens
  Payload ID: 3611
  Gene Symbol: CBWD3
  Gene Name: COBW domain containing 3
  ENST ID: ENST00000377344
  CDS Start-End: 44-526
gtcccagcggttcagctgaggtagggacgtgctgtaggccggaatgttaccggctgttggatctgtggatgaggaagaggatcctgcggaggaggattgtcctgaattggttcccattgagacgacgcaaagcgaggaggaggaaaagtctggcctcggcgccaagatcccagtcacaattatcaccgggtatttaggtgctgggaagacaacacttctgaactatattttgacagagcaacatagtaaaagagtagcggtcattttaaatgaatctggggaaggaagtgcgctggagaaatccttagctgtcagccaaggtggagagctctatgaagagtggctggaacttagaaacggttgcctctgctgttcagtgaaggacaatggccttagagctattgagaatttgatgcaaaagaaggggaaatttgatgacatactgttagagaccactggattagcagaccctggtatcataactattgtggattcaaaatatggattaaaagtgaaataccactaaaggcagaagagaatgaaatcatcccacccactgacccgttcccaatctgagcatatggatagggcccaaagcagcaaagaattggacaacttaaaatgacagctctctattctgaggacttgacacccgggctactgacattgttcttttcagttctacaaatgtgacagcatttaatgcaatagaagcaatgaatgaagttacccagagaagcatttaacagaagagaaacctgatggccttatcaatgaagctactagatccataaatggactaggacaaatcttagaaacacaaagatcaaggctcagcagctgatagactcagcaacaggcagccaggagctctgaggctcacagctggcagtctagttccactcagtctctacttgagaaattctttctttggaagtacagcagaggccttagagttgatctctctaatgtattagatcttcatgcctttgatagtctctctggaataagtttgcagaaaaaacttcagcatgtgccaggaacacaacctcaccttgatcagagtattgttacaatcacatttgaagtaccaggaaatgcaaaggaagaacatcttaatatgtttattcagaatcttctgtgggaaaagaatgtgagaaacaaggacaatcactgcatggaggtcataaggctgaagggattggtgtcaatcaaagacaaatcacaacaagtgattgtccagggtgtccatgagctctatgatctggaggagactccagtgagctggaaggatgacactgagagaacaaatcgattggtcctcattggcagaaatttagataaggatatccttaaacagctgtttatagctactgtgacagaaacagaaaagcagtggacaacacatttcaaagaagatcaagtttgtacataacactagaggcatttcttatcaaaaggattggataataaaaataagtttctactgggtatatttcaagcatttatttattactttagttacgaattccaatatactttaaaatggtatttgttttacagcatacataaaatgtagcaaatcagtactgtaaaacatttaacattcatacaattatatataatatccttttttttaaagaatggtatttcacaaaaatatcttttgaaattggctttggagtttacatatactgaacatgaaagtttataataatgatgatacaactttcaacattgtcattttttcttagaacttcagctgattgcagagatataatgattacattgttattaaatttttttaacacaa

SEQ ID NO: 120437 - DNA, 1403 bp, Homo sapiens
  Payload ID: 3611
  Gene Symbol: CBWD3
  Gene Name: COBW domain containing 3
  ENST ID: ENST00000377349
  CDS Start-End: 88-264
gggagtggcgtgctgggcgtgcgcggctgcggtacggcgtgttggtcccagcggttcagctgaggtagggacgtgctgtaggccggaatgttaccggctgttggatctgtggatgaggaagaggatcctgcggaggaggattgtcctgaattggttcccattgagacgacgcaaagcgaggaggaggaaaagtctggcctcggcgccaagatcccagtcacaattatcaccgggtatttagttattcagaggctgctctactgagaagatgaacaaatttcttgtccaaaacaatgtatttcaaacgtgcccctcgggcctttcccgtgttgctcactggtgctgggaagacaacacttctgaactatattttgacagagcaacatagtaaaagagtagcggtcattttaaatgaatctggggaaggaagtgcgctggagaaatccttagctgtcagccaaggtggagagctctatgaagagtggctggaacttagaaacggttgcctctgctgttcagtgaagtgaggaatgtgtttactgtgtacatggtttactagaaatgtttattgattatatttccagctttaattttcttgagtaatttaactgaatttacacagtttgcttcattgtattttcaaacaaatagaaaataaacttattaggaagcattttcttaaagtgtttcttgctgtcttttctatctgctctaatgttttggtccttttattgagtttttattgcttttgatgtcagggcttatttaatctctagtgcatgaaagtctcatatgtaaaaaatgattattctgaatttaatctgtcattggtcatacttctaagtgttcaaccttataaaaaataaatgactatcaaaaaagaaaaaccttacattatgttctagtagttaagtttccaaggacagtgatcactagtctaccatagaccctagaagagttacccaacacatagtagcactcaaatatttgttgaatgaattataaaaatgactacttgtattgttaattttgtgtattctagtgaattaaatctcttcggcatcatttactcccttaggtatttgactttgtgtcaaatgttttggcaaggataaaattataacagactttcttgaacaaccaaaatgtaatctattaaggattttccttcacttttgataaaataagaaaaaaggaatttaaaaccttgcatcctaatgtaaaatagaattatatggtgtttaatatcagtgtccctttagctattatattaaactactatagttaataaattttatcattattttgtatgttggtttttaaaaatttcataaagctataaaaagatacttggtcagataaagtttcctctgcttttaattttaataaagtattattatgta

SEQ ID NO: 120438 - DNA, 1736 bp, Homo sapiens
  Payload ID: 3611
  Gene Symbol: CBWD3
  Gene Name: COBW domain containing 3
  ENST ID: ENST00000478048
  CDS Start-End: 77-418
gctgggcgtgcgcggctgcggtacggcgtgttggtcccagcggttcagctgaggtagggacgtgctgtaggccggaatgttaccggctgttggatctgtggatgaggaagaggatcctgcggaggaggattgtcctgaattggttcccattgagacgacgcaaagcgaggaggaggaaaagtctggcctcggcgccaagatcccagtcacaattatcaccgggtatttaggtgctgggaagacaacacttctgaactatattttgacagagcaacatagtaaaagagtagcggtcattttaaatgaatctggggaaggaagtgcgctggagaaatccttagctgtcagccaaggtggagagctctatgaagagtggctggaacttagaaacggttgcctctgctgttcagtgaagtgaggaatgtgtttactgtgtacatggtttactagaaatgtttattgattatatttccagctttaattttcttgagtaatttaactgaatttacacagtttgcttcattgtattttcaaacaaatagaaaataaacttattaggaagcattttcttaaagtgtttcttgctgtcttttctatctgctctaatgttttggtccttttattgagtttttattgcttttgatgtcagggcttatttaatctctagtgcatgaaagtctcatatgtaaaaaatgattattctgaatttaatctgtcattggtcatacttctaagtgttcaaccttataaaaaataaatgactatcaaaaaagaaaaaccttacattatgttctagtagttaagtttccaaggacagtgatcactagtctaccatagaccctagaagagttacccaacacatagtagcactcaaatatttgttgaatgaattataaaaatgactacttgtattgttaattttgtgtattctagtgaattaaatctcttcggcatcatttactcccttaggtatttgactttgtgtcaaatgttttggcaaggataaaattataacagactttcttgaacaaccaaaatgtaatctattaaggattttccttcacttttgataaaataagaaaaaaggaatttaaaaccttgcatcctaatgtaaaatagaattatatggtgtttaatatcagtgtccctttagctattatattaaactactatagttaataaattttatcattattttgtatgttggtttttaaaaatttcataaagctataaaaagatacttggtcagataaagtttcctctgcttttaattttaataaagtattattatgtatatgatttctttttacctattatatatatgcatctattgttttctcactggtaaatatgggacagacattttgttagaaggttagaagtgagttaaattttcacattcctaaggatacttttgtctcgggttgttgaatacattttaaagtgtttataataatcacttcaaaatatttaggtaattaactgtaaattatgttttggtattctccagggacaatggccttagagctattgagaatttgatgcaaaagaaggggaaatttgatgacatactgttagagaccactggattagcagaccctggtaagaagtgagattattaataaccagaatatagttctgtgatatattgtaaatagatgtattagaggaatatctaaaatgagtattaaagcttttgttagtattaaaccaaaaactttttttggtttaaaaga

SEQ ID NO: 120439 - DNA, 1771 bp, Homo sapiens
  Payload ID: 3611
  Gene Symbol: CBWD3
  Gene Name: COBW domain containing 3
  ENST ID: ENST00000615061
  CDS Start-End: 79-255
gtgctgggcgtgcgcggctgcggtacggcgtgttggtcccagcggttcagctgaggtagggacgtgctgtaggccggaatgttaccggctgttggatctgtggatgaggaagaggatcctgcggaggaggattgtcctgaattggttcccattgagacgacgcaaagcgaggaggaggaaaagtctggcctcggcgccaagatcccagtcacaattatcaccgggtatttagttattcagaggctgctctactgagaagatgaacaaatttcttgtccaaaacaatgtatttcaaacgtgcccctcgggcctttcccgtgttgctcactggtgctgggaagacaacacttctgaactatattttgacagagcaacatagtaaaagagtagcggtcattttaaatgaatctggggaaggaagtgcgctggagaaatccttagctgtcagccaaggtggagagctctatgaagagtggctggaacttagaaacggttgcctctgctgttcagtgaaggacaatggccttagagctattgagaatttgatgcaaaagaaggggaaatttgatgacatactgttagagaccactggattagcagaccctggtgcagtggcttctatgttttgggttgatgctgaattagggagtgatatttaccttgatggtatcataactattgtggattcaaaatatggattaaaacatttaacagaagagaaacctgatggccttatcaatgaagctactaggcaagttgctttggcagatatcattctcattaataaaacagacttggttccagaagaagatgtaaagaaattaagaacgacaattagatccataaatggactaggacaaatcttagaaacacaaagatcaagagttgatctctctaatgtattagatcttcatgcctttgatagtctctctggaataagtttgcagaaaaaacttcagcatgtgccaggaacacaacctcaccttgatcagagtattgttacaatcacatttgaagtaccaggaaatgcaaaggaagaacatcttaatatgtttattcagaatcttctgtgggaaaagaatgtgagaaacaaggacaatcactgcatggaggtcataaggctgaagggattggtgtcaatcaaagacaaatcacaacaagtgattgtccagggtgtccatgagctctatgatctggaggagactccagtgagctggaaggatgacactgagagaacaaatcgattggtcctcattggcagaaatttagataaggatatccttaaacagctgtttatagctactgtgacagaaacagaaaagcagtggacaacacatttcaaagaagatcaagtttgtacataacactagaggcatttcttatcaaaaggattggataataaaaataagtttctactgggtatatttcaagcatttatttattactttagttacgaattccaatatactttaaaatggtatttgttttacagcatacataaaatgtagcaaatcagtactgtaaaacatttaacattcatacaattatatataatatccttttttttaaagaatggtatttcacaaaaatatcttttgaaattggctttggagtttacatatactgaacatgaaagtttataataatgatgatacaactttcaacattgtcattttttcttagaacttcagctgattgcagagatataatgattacattgttattaaatttttttaacacaagtaagtgtcaccattttatgacatgaaat

SEQ ID NO: 120440 - DNA, 2437 bp, Homo sapiens
  Payload ID: 3611
  Gene Symbol: CBWD3
  Gene Name: COBW domain containing 3
  ENST ID: ENST00000621396
  CDS Start-End: 82-624
ggcgtgctgggcgtgcgcggctgcggtacggcgtgttggtcccagcggttcagctgaggtagggacgtgctgtaggccggaatgttaccggctgttggatctgtggatgaggaagaggatcctgcggaggaggattgtcctgaattggttcccattgagacgacgcaaagcgaggaggaggaaaagtctggcctcggcgccaagatcccagtcacaattatcaccgggtatttaggtgctgggaagacaacacttctgaactatattttgacagagcaacatagtaaaagagtagcggtcattttaaatgaatctggggaaggaagtgcgctggagaaatccttagctgtcagccaaggtggagagctctatgaagagtggctggaacttagaaacggttgcctctgctgttcagtgaaggacaatggccttagagctattgagaatttgatgcaaaagaaggggaaatttgatgacatactgttagagaccactggattagcagaccctggtgcagtggcttctatgttttgggttgatgctgaattagggagtgatatttaccttgatggtatcataactattgtggattcaaaatatggattaaaagtgaaataccactaaaggcagaagagaatgaaatcatcccacccactgacccgttcccaatctgagcatatggatagggcccaaagcacatttaacagaagagaaacctgatggccttatcaatgaagctactaggcaagttgctttggcagatatcattctcattaataaaacagacttggttccagaagaagatgtaaagaaattaagaacgacaattagatccataaatggactaggacaaatcttagaaacacaaagatcaagaacaataaacatgcagtgattgatttttcttacttcaagtggatgagtgagcaagtgactaaaatcttctgtgaattcttcagtgtatggtgcttgccaatgcatctgagaatctagggactttctgaaatagtacttccttgctatgaggactgaagttggattagaatccttttcaatgaagatcagatgtcctgagtagaattcttactattgggtcctgaatcttatattaaatattctctcaaattccttgaggcgtgagccaccgcgcccagcctgtcctctgtgattttctgggcttatgttaaaattataactcaatcaccagtctttataaatttgcttttttatatttaaaccaaacctaatgctaattgtgatatgttatttattctcacctgatttgaatcattggattcaattaaatgagtttaattatcattaaataattctaagagaaataatgtctattcggatggtgggaattttctttctacatgcagccccattctgaatgaatgaaatcaaatcacgtgacgatcagggtcctagagtaacttaatattttgtacattggttatttgactcctcatttttatattacatgttatatcaagggagggggtataaaagaaatacaaaaattgcagaggtatctggaatgtacctatttgttaattctatttgtcatttcttttgtttcatcttttgagtaataagctgcttggaaaagtttctgttctttagctgattttttagctataaaaatgtatttgaaaagctcataaatttcaggattgaaaagataattgaaagtttaaaaaaaacctaattcattgaagtaataaccaaataattttcaatcttgattcaactgtgattcaaatcttacaccatttgcccacttctatgaattttatgtataaaattttttaagagtcagagtttttttttcttgattaattggatgtatttcacagaatttccaactgctcacgttagttttcttccttttagagttgatctctctaatgtattagatcttcatgcctttgatagtctctctggaataagtttgcagaaaaaacttcagcatgtgccaggaacacaacctcaccttgatcagagtattgttacaatcacatttgaagtaccaggaaatgcaaaggaagaacatcttaatatgtttattcagaatcttctgtgggaaaagaatgtgagaaacaaggacaatcactgcatggaggtcataaggctgaagggattggtgtcaatcaaagacaaatcacaacaagtgattgtccagggtgtccatgagctctatgatctggaggagactccagtgagctggaaggatgacactgagagaacaaatcgattggtcctcattggcagaaatttagataaggatatccttaaacagctgtttatagctactgtgacagaaacagaaaagcagtggacaacacatttcaaagaagatcaagtttgtacataacactagaggcatttcttatcaaaaggattggataataaaaataagtttctactgggtata

SEQ ID NO: 120441 - DNA, 1611 bp, Homo sapiens
  Payload ID: 3611
  Gene Symbol: CBWD3
  Gene Name: COBW domain containing 3
  ENST ID: ENST00000618217
  CDS Start-End: 144-1187
atccgggcgggatcagctagcgtcgcgatgtgatgacgtcaggccccggccaggccgggagtggcgtgctgggcgtgcgcggctgcggtacggcgtgttggtcccagcggttcagctgaggtagggacgtgctgtaggccggaatgttaccggctgttggatctgtggatgaggaagaggatcctgcggaggaggattgtcctgaattggttcccattgagacgacgcaaagcgaggaggaggaaaagtctggcctcggcgccaagatcccagtcacaattatcaccgggtatttaggtgctgggaagacaacacttctgaactatattttgacagagcaacatagtaaaagagtagcggtcattttaaatgaatctggggaaggaagtgcgctggagaaatccttagctgtcagccaaggtggagagctctatgaagagtggctggaacttagaaacggttgcctctgctgttcagtgaaggacaatggccttagagctattgagaatttgatgcaaaagaaggggaaatttgatgacatactgttagagaccactggattagcagaccctggtgcagtggcttctatgttttgggttgatgctgaattagggagtgatatttaccttgatggtatcataactattgtggattcaaaatatggattaaaacatttaacagaagagaaacctgatggccttatcaatgaagctactagatccataaatggactaggacaaatcttagaaacacaaagatcaagtttgcagaaaaaacttcagcatgtgccaggaacacaacctcaccttgatcagagtattgttacaatcacatttgaagtaccaggaaatgcaaaggaagaacatcttaatatgtttattcagaatcttctgtgggaaaagaatgtgagaaacaaggacaatcactgcatggaggtcataaggctgaagggattggtgtcaatcaaagacaaatcacaacaagtgattgtccagggtgtccatgagctctatgatctggaggagactccagtgagctggaaggatgacactgagagaacaaatcgattggtcctcattggcagaaatttagataaggatatccttaaacagctgtttatagctactgtgacagaaacagaaaagcagtggacaacacatttcaaagaagatcaagtttgtacataacactagaggcatttcttatcaaaaggattggataataaaaataagtttctactgggtatatttcaagcatttatttattactttagttacgaattccaatatactttaaaatggtatttgttttacagcatacataaaatgtagcaaatcagtactgtaaaacatttaacattcatacaattatatataatatccttttttttaaagaatggtatttcacaaaaatatcttttgaaattggctttggagtttacatatactgaacatgaaagtttataataatgatgatacaactttcaacattgtcattttttcttagaacttcagctgattgcagagatataatgattacattgttattaaatttttttaacacaagtaagtgtcaccattttatgacatgaaataaaaggttatgactgtt

SEQ ID NO: 120442 - DNA, 1648 bp, Homo sapiens
  Payload ID: 3611
  Gene Symbol: CBWD3
  Gene Name: COBW domain containing 3
  ENST ID: ENST00000621474
  CDS Start-End: 84-626
gtggcgtgctgggcgtgcgcggctgcggtacggcgtgttggtcccagcggttcagctgaggtagggacgtgctgtaggccggaatgttaccggctgttggatctgtggatgaggaagaggatcctgcggaggaggattgtcctgaattggttcccattgagacgacgcaaagcgaggaggaggaaaagtctggcctcggcgccaagatcccagtcacaattatcaccgggtatttaggtgctgggaagacaacacttctgaactatattttgacagagcaacatagtaaaagagtagcggtcattttaaatgaatctggggaaggaagtgcgctggagaaatccttagctgtcagccaaggtggagagctctatgaagagtggctggaacttagaaacggttgcctctgctgttcagtgaaggacaatggccttagagctattgagaatttgatgcaaaagaaggggaaatttgatgacatactgttagagaccactggattagcagaccctggtgcagtggcttctatgttttgggttgatgctgaattagggagtgatatttaccttgatggtatcataactattgtggattcaaaatatggattaaaagtgaaataccactaaaggcagaagagaatgaaatcatcccacccactgacccgttcccaatctgagcatatggatagggcccaaagcacatttaacagaagagaaacctgatggccttatcaatgaagctactaggcaagttgctttggcagatatcattctcattaataaaacagacttggttccagaagaagatgtaaagaaattaagaacgacaattagatccataaatggactaggacaaatcttagaaacacaaagatcaagagttgatctctctaatgtattagatcttcatgcctttgatagtctctctggaataagtttgcagaaaaaacttcagcatgtgccaggaacacaacctcaccttgatcagagtattgttacaatcacatttgaagtaccaggaaatgcaaaggaagaacatcttaatatgtttattcagaatcttctgtgggaaaagaatgtgagaaacaaggacaatcactgcatggaggtcataaggctgaaggtacagtttactgttgcagacttttggacaaagtccttttcttggctgttataaaaactatatttggttttaaacagaaacactggttttagtacaaatcatctttgtctactttcatttttctttattattttcatgactgaaaaggagctttggaaatcactgcataaggcttgatttatttgcacaactttctttagggttgcagctagaacaaacctgtgtgctttgaaatgttaccttctgctctctgttcccaagtacagagaaataatgttgcaaatctcacttctgctgaacattatgcttcctgatgcatttagcagacactaaacatttgttgtactctaaacaaagttacaaaggactagaagaattcttgttctgtatttagaaacccactcacattacttgatatttgggtatttaagtcatgaaaggtatttcttctaggaagcagtgattctaaagtgtatgcttaaccagtcagttgagtgtctactcttgtgtgttcacaagtgtgcac

SEQ ID NO: 120443 - DNA, 1440 bp, Homo sapiens
  Payload ID: 3611
  Gene Symbol: CBWD3
  Gene Name: COBW domain containing 3
  ENST ID: ENST00000612050
  CDS Start-End: 48-596
gttggtcccagcggttcagctgaggtagggacgtgctgtaggccggaatgttaccggctgttggatctgtggatgaggaagaggatcctgcggaggaggattgtcctgaattggttcccattgagacgacgcaaagcgaggaggaggaaaagtctggcctcggcgccaagatcccagtcacaattatcaccgggtatttaggtgctgggaagacaacacttctgaactatattttgacagagcaacatagtaaaagagtagcggtcattttaaatgaatctggggaaggaagtgcgctggagaaatccttagctgtcagccaaggtggagagctctatgaagagtggctggaacttagaaacggttgcctctgctgttcagtgaaggacaatggccttagagctattgagaatttgatgcaaaagaaggggaaatttgatgacatactgttagagaccactggattagcagaccctggtgcagtggcttctatgttttgggttgatgctgaattagggagtgatatttaccttgatggtatcataactattgtggattcaaaatatggattaaaagcaaagaattggacaacttaaaatgacagctctctattctgaggacttgacacccgggctactgacattgttcttttcagttctacaaatgtgacagcatttaatgcaatagaagcaatgaatgaagttacccagagaaggtcaacatttaacagaagagaaacctgatggccttatcaatgaagctactaggcaagttgctttggcagatatcattctcattaataaaacagacttggttccagaagaagatgtaaagaaattaagaacgacaattagatccataaatggactaggacaaatcttagaaacacaaagatcaagagttgatctctctaatgtattagatcttcatgcctttgatagtctctctggaataagtttgcagaaaaaacttcagcatgtgccaggaacacaacctcaccttgatcagagtattgttacaatcacatttgaagtaccaggaaatgcaaaggaagaacatcttaatatgtttattcagaatcttctgtgggaaaagaatgtgagaaacaaggacaatcactgcatggaggtcataaggctgaagggattggtgtcaatcaaagacaaatcacaacaagtgattgtccagggtgtccatgagctctatgatctggaggagactccagtgagctggaaggatgacactgagagaacaaatcgattggtcctcattggcagaaatttagataaggatatccttaaacagctgtttatagctactgtgacagaaacagaaaagcagtggacaacacatttcaaagaagatcaagtttgtacataacactagaggcatttcttatcaaaaggattggataataaaaataagtttctactgggtata

SEQ ID NO: 120444 - DNA, 1413 bp, Homo sapiens
  Payload ID: 3611
  Gene Symbol: CBWD3
  Gene Name: COBW domain containing 3
  ENST ID: ENST00000622755
  CDS Start-End: 48-224
gttggtcccagcggttcagctgaggtagggacgtgctgtaggccggaatgttaccggctgttggatctgtggatgaggaagaggatcctgcggaggaggattgtcctgaattggttcccattgagacgacgcaaagcgaggaggaggaaaagtctggcctcggcgccaagatcccagtcacaattatcaccgggtatttagttattcagaggctgctctactgagaagatgaacaaatttcttgtccaaaacaatgtatttcaaacgtgcccctcgggcctttcccgtgttgctcactggtgctgggaagacaacacttctgaactatattttgacagagcaacatagtaaaagagtagcggtcattttaaatgaatctggggaaggaagtgcgctggagaaatccttagctgtcagccaaggtggagagctctatgaagagtggctggaacttagaaacggttgcctctgctgttcagtgaaggacaatggccttagagctattgagaatttgatgcaaaagaaggggaaatttgatgacatactgttagagaccactggattagcagaccctggtgcagtggcttctatgttttgggttgatgctgaattagggagtgatatttaccttgatggtatcataactattgtggattcaaaatatggattaaaacatttaacagaagagaaacctgatggccttatcaatgaagctactaggcaagttgctttggcagatatcattctcattaataaaacagacttggttccagaagaagatgtaaagaaattaagaacgacaattagatccataaatggactaggacaaatcttagaaacacaaagatcaagtttgcagaaaaaacttcagcatgtgccaggaacacaacctcaccttgatcagagtattgttacaatcacatttgaagtaccaggaaatgcaaaggaagaacatcttaatatgtttattcagaatcttctgtgggaaaagaatgtgagaaacaaggacaatcactgcatggaggtcataaggctgaaggtacagtttactgttgcagacttttggacaaagtccttttcttggctgttataaaaactatatttggttttaaacagaaacactggttttagtacaaatcatctttgtctactttcatttttctttattattttcatgactgaaaaggagctttggaaatcactgcataaggcttgatttatttgcacaactttctttagggttgcagctagaacaaacctgtgtgctttgaaatgttaccttctgctctctgttcccaagtacagagaaataatgttgcaaatctcacttctgctgaacattatgcttcctgatgcatttagcagacactaaacatttgttgtactctaaacaaagttacaaaggactagaag

SEQ ID NO: 120445 - DNA, 1381 bp, Homo sapiens
  Payload ID: 3611
  Gene Symbol: CBWD3
  Gene Name: COBW domain containing 3
  ENST ID: ENST00000611426
  CDS Start-End: 120-296
gcgatgtgatgacgtcaggccccggccaggccgggagtggcgtgctgggcgtgcgcggctgcggtacggcgtgttggtcccagcggttcagctgaggtagggacgtgctgtaggccggaatgttaccggctgttggatctgtggatgaggaagaggatcctgcggaggaggattgtcctgaattggttcccattgagacgacgcaaagcgaggaggaggaaaagtctggcctcggcgccaagatcccagtcacaattatcaccgggtatttagttattcagaggctgctctactgagaagatgaacaaatttcttgtccaaaacaatgtatttcaaacgtgcccctcgggcctttcccgtgttgctcactggtgctgggaagacaacacttctgaactatattttgacagagcaacatagtaaaagagtagcggtcattttaaatgaatctggggaaggaagtgcgctggagaaatccttagctgtcagccaaggtggagagctctatgaagagtggctggaacttagaaacggttgcctctgctgttcagtgaaggacaatggccttagagctattgagaatttgatgcaaaagaaggggaaatttgatgacatactgttagagaccactggattagcagaccctggtgcagtggcttctatgttttgggttgatgctgaattagggagtgatatttaccttgatggtatcataactattgtggattcaaaatatggattaaaacatttaacagaagagaaacctgatggccttatcaatgaagctactaggcaagttgctttggcagatatcattctcattaataaaacagacttggttccagaagaagatgtaaagaaattaagaacgacaattagatccataaatggactaggacaaatcttagaaacacaaagatcaaggtactttaaaaaagctattcctattaataacaaatcattttagttattaataataaacattaagtaattgacaaatatgcttgattctgatataagaaagatctaagtgcatttaaaaagatttggatccaaaatgttgtttggaatgctcttaataagttagtttggcatatttgactagtacatttgcctgtcttcaaaactaagattacaaagccatgataacactgtgtaagtgtttgcttaatgaggaagaaaagacttccaaacactcgagagggtaactcagtacagaaatctgaagtatattgaggaatcttaatttgaagtgtttaaatggctttttaatatttaaaaagccttcttagtgttttatagttgccaaaaaatacatggagtctttaccttgaagttcctgacaaattcttttattaaattttgactttcattttctcta

SEQ ID NO: 120446 - DNA, 721 bp, Homo sapiens
  Payload ID: 3611
  Gene Symbol: CBWD3
  Gene Name: COBW domain containing 3
  ENST ID: ENST00000616550
  CDS Start-End: 179-721
aagggacgaggcagttctcgtccagagcccaggtaatccgggcgggatcagctagcgtcgcgatgtgatgacgtcaggccccggccaggccgggagtggcgtgctgggcgtgcgcggctgcggtacggcgtgttggtcccagcggttcagctgaggtagggacgtgctgtaggccggaatgttaccggctgttggatctgtggatgaggaagaggatcctgcggaggaggattgtcctgaattggttcccattgagacgacgcaaagcgaggaggaggaaaagtctggcctcggcgccaagatcccagtcacaattatcaccgggtatttaggtgctgggaagacaacacttctgaactatattttgacagagcaacatagtaaaagagtagcggtcattttaaatgaatctggggaaggaagtgcgctggagaaatccttagctgtcagccaaggtggagagctctatgaagagtggctggaacttagaaacggttgcctctgctgttcagtgaaggacaatggccttagagctattgagaatttgatgcaaaagaaggggaaatttgatgacatactgttagagaccactggattagcagaccctggtgcagtggcttctatgttttgggttgatgctgaattagggagtgatatttaccttgatggtatcataactattgtggattcaaaatatggattaaaagtgaaataccactaa

SEQ ID NO: 120447 - DNA, 1347 bp, Homo sapiens
  Payload ID: 3612
  Gene Symbol: CBWD5
  Gene Name: COBW domain containing 5
  ENST ID: ENST00000377384
  CDS Start-End: 103-444
ggccccggccaggccgggagtggcgtgctgggcgtgcgcggctgcggtacggcgtgttggtcccagcggttcagctgaggtagggacgtgccgtaggccggaatgttaccggctgttggatctgtggatgaggaagaggatcctgcggaggaggattgtcctgaattggttcccattgagacgacgcaaagcgaggaggaggaaaagtctggcctcggcgccaagatcccagtcacaattatcaccgggtatttaggtgctgggaagacaacacttctgaactatattttgacagagcaacatagtaaaagagtagcggtcattttaaatgaatctggggaaggaagtgcgctggagaaatccttagctgtcagccaaggtggagagctctatgaagagtggctggaacttagaaacggttgcctctgctgttcagtgaagtgaggaatgtgtttactgtgtacatggtttactagaaatgtttattgattatatttccagctttaattttcttgagtaatttaactgaatttacacagtttgcttcattgtattttcaaacaaatagaaaataaacttattaggaagcattttcttaaagtgtttttgctgtcttttctatctgctctaatgttttggtccttttattgagtttttattgcttttgatgtcagggcttatttaatctctagtgcatgaaagtctcatatgtaaaaaatgattattctgaatttaatctgtcattggtcatacttctaagtgttcaaccttataaaaaataaatgactatcaaaaaagaaaaaccttacattatgttctagtagttaagtttccaaggacagtgttcactagtctaccatagaccctagaagagttacccaacacatagtagcactcaaatatttgttgaatgaattataaaaatgactacttgtattgttaattttgtgtattctagtgaattaaatctcttcggcatcatttactcccttaggtatttgactttgtgtcaaatgttttggcaaggataaaattataacagactttcttgaacaaccaaaatgtaatctattaaggattttccttcacttttgataaaataagaaaaaaggaatttaaaaccttgcatcctaatgtaaaatagaattatatggtgtttaatatcagtgtccctttagctattatattaaactactatagttaataaattttatcattattttgtatgttggtttttaacaatttcataaagctataaaaagatacttggtcagataaagtttcctctgcttttaattttaataaagtattattatgtatatgatttctttttacctattatatata

SEQ ID NO: 120448 - DNA, 1483 bp, Homo sapiens
  Payload ID: 3612
  Gene Symbol: CBWD5
  Gene Name: COBW domain containing 5
  ENST ID: ENST00000377389
  CDS Start-End: 141-317
cgggcgggatcagctagcgtcgcgatgtgatgacgtcaggccccggccaggccgggagtggcgtgctgggcgtgcgcggctgcggtacggcgtgttggtcccagcggttcagctgaggtagggacgtgccgtaggccggaatgttaccggctgttggatctgtggatgaggaagaggatcctgcggaggaggattgtcctgaattggttcccattgagacgacgcaaagcgaggaggaggaaaagtctggcctcggcgccaagatcccagtcacaattatcaccgggtatttagttattcaaaggctgctctactgagaagatgaacaaatttcttgtccaaaacaatgtatttcaaacgtgcccctcgggcctttcccgtgttgctcactggtgctgggaagacaacacttctgaactatattttgacagagcaacatagtaaaagagtagcggtcattttaaatgaatctggggaaggaagtgcgctggagaaatccttagctgtcagccaaggtggagagctctatgaagagtggctggaacttagaaacggttgcctctgctgttcagtgaaggacaatggccttagagctattgagaatttgatgcaaaagaaggggaaatttgatgacatactgttagagaccactggattagcagaccctggtgcagtgacttctatgttttgggttgatgctgaattagggagtgatatttaccttgatggtatcataactattgtggattcaaaatatggattaaaacatttaacagaagagaaacctgatggccttatcaatgaagctactaggcaagttgctttggcagatatcattctcattaataaaacagacttggttccagaagaagatgtaaagaaattaagaacgacaattagatccataaatggactaggacaaatcttagaaacacaaagatcaagagttgatctctctaatgtattagatcttcatgcctttgatagtctctctggaataagtttgcagaaaaaacttcagcatgtgccaggaacacaacctcaccttgatcagagtattgttacaatcacatttgaagtaccaggaaatgcaaaggaagaacatcttaatatgtttattcagaatctcctgtgggaaaagaatgtgagaaacaaggacaatcactgcatggaggtcataaggctgaagggattggtgtcaatcaaagacaaatcacaacaagtgattgtccagggtgtccatgagctctatgatctggaggagactccagtgagctggaaggatgacactgagagaacaaatcgattggtcctcattggcagaaatttagataaggatatccttaaacagctgtttatagctactgtgacagaaacagaaaagcagtggacaacacatttcaaagaagatcaagtttgtacataacactagtggcatttcttatcaaaaggattggataataaaaataagtttctactgggt

SEQ ID NO: 120449 - DNA, 2863 bp, Homo sapiens
  Payload ID: 3612
  Gene Symbol: CBWD5
  Gene Name: COBW domain containing 5
  ENST ID: ENST00000377392
  CDS Start-End: 1909-2439
atccgggcgggatcagctagcgtcgcgatgtgatgacgtcaggccccggccaggccgggagtggcgtgctgggcgtgcgcggctgcggtacggcgtgttggtcccagcggttcagctgaggtagggacgtgccgtaggccggaatgttaccggctgttggatctgtggatgaggaagaggatcctgcggaggaggattgtcctgaattggttcccattgagacgacgcaaagcgaggaggaggaaaagtctggcctcggcgccaagatcccagtcacaattatcaccgggtatttaggtgctgggaagacaacacttctgaactatattttgacagagcaacatagtaaaagagtagcggtcattttaaatgaatctggggaaggaagtgcgctggagaaatccttagctgtcagccaaggtggagagctctatgaagagtggctggaacttagaaacggttgcctctgctgttcagtgaaggacaatggccttagagctattgagaatttgatgcaaaagaaggggaaatttgatgacatactgttagagaccactggattagcagaccctggtgcagtgacttctatgttttgggttgatgctgaattagggagtgatatttaccttgatggtatcataactattgtggattcaaaatatggattaaaagtgaaataccactaaaggcagaagagaatgaaatcatcccacccactgacccgttcccaatctgagcatatggatagggcccaaagcacatttaacagaagagaaacctgatggccttatcaatgaagctactaggcaagttgctttggcagatatcattctcattaataaaacagacttggttccagaagaagatgtaaagaaattaagaacgacaattagatccataaatggactaggacaaatcttagaaacacaaagatcaagaacaataaacatgcagtgattgatttttcttacttcaagtggatgagtgagcaagtgactaaaatcttctgtgaattcttcagtgtatggttcttgccaatgcatctgagaatctagggactttctgaaatagtacttccttgctatgaggactgaagttggattagaatccgtttcaatgaagatcagatgtcctgagtagaattcttactattgggtcctgaatcttacattaaatattctctcaaattccttgaggcatgagccaccgtgcccggcctgtcctctgtggttttctgggcttatgttaaaattataactcaatcaccagtctttataaatttgcttttttatatttaaaccaaacctaatgctaattgtgatatgttatttattctcacctgatttgaatcattggattcaattaaatgagtttaattatcattaaataattctaagagaaataatgtctattcggatggtgggaattttctttctacatgcagccccattctgaatgaatgaaatcaaatcatgtgaagatcagggtcctagagtaacctaatattttgtacattggttatttgactcctcatttttatattaaatgttatatcaagggagggggtataaaagaaatacaaaaattgcagaggtatctggaatgtacctatttgttaattctatttgtcatttcttttgtttcatcttttgagtaataagctgcttggaaaagtttctgttctttagctgattttttagctataaaaatgtatttgaaaagctcataaatttcaggattgaaaagataattggaagtttaaaaaaaacctaattcattgaagtaataaccaaataattttcaatcttgattcaactgtgattcaaatcttacaccatttgcccacttctatgaattttatgtataaaattttttaagagtcagagtttttttttcttgattaattggatgtatttcacagaatttccaactgctcacgttagttttcttccttttagagttgatctctctaatgtattagatcttcatgcctttgatagtctctctggaataagtttgcagaaaaaacttcagcatgtgccaggaacacaacctcaccttgatcagagtattgttacaatcacatttgaagtaccaggaaatgcaaaggaagaacatcttaatatgtttattcagaatctcctgtgggaaaagaatgtgagaaacaaggacaatcactgcatggaggtcataaggctgaagggattggtgtcaatcaaagacaaatcacaacaagtgattgtccagggtgtccatgagctctatgatctggaggagactccagtgagctggaaggatgacactgagagaacaaatcgattggtcctcattggcagaaatttagataaggatatccttaaacagctgtttatagctactgtgacagaaacagaaaagcagtggacaacacatttcaaagaagatcaagtttgtacataacactagtggcatttcttatcaaaaggattggataataaaaataagtttctactgggtatatttcaagcatttatttattactttagttacgaattccaatatactttaaaatggtatttgttttacagcatacataaaatgtagcaaatcagtactgtaaaacatttaacattcatacaattatatataatatccttttttttaaagaatggtatttcacaaaaatatcttttgaaattggctttggagtttacatatactgaacatgaaagtttataataatgatgatacaactttcaacatcgtcattttttcttagaacttcagctgattgcagagatataatgattacattgttattaaatttttttaacacaagtaagtgtcaccattttatgacatgaaataaaaggttatgactgtt

SEQ ID NO: 120450 - DNA, 1143 bp, Homo sapiens
  Payload ID: 3612
  Gene Symbol: CBWD5
  Gene Name: COBW domain containing 5
  Uniprot ID: Q5RIA9
  ENST ID: ENST00000377395
  CDS Start-End: 40-1083
cagcggttcagctgaggtagggacgtgccgtaggccggaatgttaccggctgttggatctgtggatgaggaagaggatcctgcggaggaggattgtcctgaattggttcccattgagacgacgcaaagcgaggaggaggaaaagtctggcctcggcgccaagatcccagtcacaattatcaccgggtatttaggtgctgggaagacaacacttctgaactatattttgacagagcaacatagtaaaagagtagcggtcattttaaatgaatctggggaaggaagtgcgctggagaaatccttagctgtcagccaaggtggagagctctatgaagagtggctggaacttagaaacggttgcctctgctgttcagtgaaggacaatggccttagagctattgagaatttgatgcaaaagaaggggaaatttgatgacatactgttagagaccactggattagcagaccctggtgcagtgacttctatgttttgggttgatgctgaattagggagtgatatttaccttgatggtatcataactattgtggattcaaaatatggattaaaacatttaacagaagagaaacctgatggccttatcaatgaagctactagatccataaatggactaggacaaatcttagaaacacaaagatcaagtttgcagaaaaaacttcagcatgtgccaggaacacaacctcaccttgatcagagtattgttacaatcacatttgaagtaccaggaaatgcaaaggaagaacatcttaatatgtttattcagaatctcctgtgggaaaagaatgtgagaaacaaggacaatcactgcatggaggtcataaggctgaagggattggtgtcaatcaaagacaaatcacaacaagtgattgtccagggtgtccatgagctctatgatctggaggagactccagtgagctggaaggatgacactgagagaacaaatcgattggtcctcattggcagaaatttagataaggatatccttaaacagctgtttatagctactgtgacagaaacagaaaagcagtggacaacacatttcaaagaagatcaagtttgtacataacactagtggcatttcttatcaaaaggattggataataaaaataagtttctactgggtata

SEQ ID NO: 120451 - DNA, 1791 bp, Homo sapiens
  Payload ID: 3612
  Gene Symbol: CBWD5
  Gene Name: COBW domain containing 5
  Uniprot ID: Q5RIA9
  ENST ID: ENST00000382405
  CDS Start-End: 179-1366
aagggacgaggcagttctcgtccagagcccaggtaatccgggcgggatcagctagcgtcgcgatgtgatgacgtcaggccccggccaggccgggagtggcgtgctgggcgtgcgcggctgcggtacggcgtgttggtcccagcggttcagctgaggtagggacgtgccgtaggccggaatgttaccggctgttggatctgtggatgaggaagaggatcctgcggaggaggattgtcctgaattggttcccattgagacgacgcaaagcgaggaggaggaaaagtctggcctcggcgccaagatcccagtcacaattatcaccgggtatttaggtgctgggaagacaacacttctgaactatattttgacagagcaacatagtaaaagagtagcggtcattttaaatgaatctggggaaggaagtgcgctggagaaatccttagctgtcagccaaggtggagagctctatgaagagtggctggaacttagaaacggttgcctctgctgttcagtgaaggacaatggccttagagctattgagaatttgatgcaaaagaaggggaaatttgatgacatactgttagagaccactggattagcagaccctggtgcagtgacttctatgttttgggttgatgctgaattagggagtgatatttaccttgatggtatcataactattgtggattcaaaatatggattaaaacatttaacagaagagaaacctgatggccttatcaatgaagctactaggcaagttgctttggcagatatcattctcattaataaaacagacttggttccagaagaagatgtaaagaaattaagaacgacaattagatccataaatggactaggacaaatcttagaaacacaaagatcaagagttgatctctctaatgtattagatcttcatgcctttgatagtctctctggaataagtttgcagaaaaaacttcagcatgtgccaggaacacaacctcaccttgatcagagtattgttacaatcacatttgaagtaccaggaaatgcaaaggaagaacatcttaatatgtttattcagaatctcctgtgggaaaagaatgtgagaaacaaggacaatcactgcatggaggtcataaggctgaagggattggtgtcaatcaaagacaaatcacaacaagtgattgtccagggtgtccatgagctctatgatctggaggagactccagtgagctggaaggatgacactgagagaacaaatcgattggtcctcattggcagaaatttagataaggatatccttaaacagctgtttatagctactgtgacagaaacagaaaagcagtggacaacacatttcaaagaagatcaagtttgtacataacactagtggcatttcttatcaaaaggattggataataaaaataagtttctactgggtatatttcaagcatttatttattactttagttacgaattccaatatactttaaaatggtatttgttttacagcatacataaaatgtagcaaatcagtactgtaaaacatttaacattcatacaattatatataatatccttttttttaaagaatggtatttcacaaaaatatcttttgaaattggctttggagtttacatatactgaacatgaaagtttataataatgatgatacaactttcaacatcgtcattttttcttagaacttcagctgattgcagagatataatgattacattgttattaaatttttttaacacaagtaagtgtcaccattttatgacatgaaataaaaggttatgactgtta

SEQ ID NO: 120452 - DNA, 1242 bp, Homo sapiens
  Payload ID: 3612
  Gene Symbol: CBWD5
  Gene Name: COBW domain containing 5
  ENST ID: ENST00000430059
  CDS Start-End: 54-1184
cggcgtgttggtcccagcggttcagctgaggtagggacgtgccgtaggccggaatgttaccggctgttggatctgtggatgaggaagaggatcctgcggaggaggattgtcctgaattggttcccattgagacgacgcaaagcgaggaggaggaaaagtctggcctcggcgccaagatcccagtcacaattatcaccgggtatttaggtgctgggaagacaacacttctgaactatattttgacagagcaacatagtaaaagagtagcggtcattttaaatgaatctggggaaggaagtgcgctggagaaatccttagctgtcagccaaggtggagagctctatgaagagtggctggaacttagaaacggttgcctctgctgttcagtgaaggacaatggccttagagctattgagaatttgatgcaaaagaaggggaaatttgatgacatactgttagagaccactggattagcagaccctggtgcagtgacttctatgttttgggttgatgctgaattagggagtgatatttaccttgatggtatcataactattgtggattcaaaatatggattaaaacatttaacagaagagaaacctgatggccttatcaatgaagctactaggcaagttgctttggcagatatcattctcattaataaaacagacttggttccagaagaagatgtaaagaaattaagaacgacaattagatccataaatggactaggacaaatcttagaaacacaaagatcaagtttgcagaaaaaacttcagcatgtgccaggaacacaacctcaccttgatcagagtattgttacaatcacatttgaagtaccaggaaatgcaaaggaagaacatcttaatatgtttattcagaatctcctgtgggaaaagaatgtgagaaacaaggacaatcactgcatggaggtcataaggctgaagggattggtgtcaatcaaagacaaatcacaacaagtgattgtccagggtgtccatgagctctatgatctggaggagactccagtgagctggaaggatgacactgagagaacaaatcgattggtcctcattggcagaaatttagataaggatatccttaaacagctgtttatagctactgtgacagaaacagaaaagcagtggacaacacatttcaaagaagatcaagtttgtacataacactagtggcatttcttatcaaaaggattggataataaaaataagtttctactgggta

SEQ ID NO: 120453 - DNA, 1234 bp, Homo sapiens
  Payload ID: 3612
  Gene Symbol: CBWD5
  Gene Name: COBW domain containing 5
  ENST ID: ENST00000429800
  CDS Start-End: 50-1177
gtgttggtcccagcggttcagctgaggtagggacgtgccgtaggccggaatgttaccggctgttggatctgtggatgaggaagaggatcctgcggaggaggattgtcctgaattggttcccattgagacgacgcaaagcgaggaggaggaaaagtctggcctcggcgccaagatcccagtcacaattatcaccgggtatttaggtgctgggaagacaacacttctgaactatattttgacagagcaacatagtaaaagagtagcggtcattttaaatgaatctggggaaggaagtgcgctggagaaatccttagctgtcagccaaggtggagagctctatgaagagtggctggaacttagaaacggttgcctctgctgttcagtgaaggacaatggccttagagctattgagaatttgatgcaaaagaaggggaaatttgatgacatactgttagagaccactggattagcagaccctggtatcataactattgtggattcaaaatatggattaaaacatttaacagaagagaaacctgatggccttatcaatgaagctactaggcaagttgctttggcagatatcattctcattaataaaacagacttggttccagaagaagatgtaaagaaattaagaacgacaattagatccataaatggactaggacaaatcttagaaacacaaagatcaagagttgatctctctaatgtattagatcttcatgcctttgatagtctctctggaataagtttgcagaaaaaacttcagcatgtgccaggaacacaacctcaccttgatcagagtattgttacaatcacatttgaagtaccaggaaatgcaaaggaagaacatcttaatatgtttattcagaatctcctgtgggaaaagaatgtgagaaacaaggacaatcactgcatggaggtcataaggctgaagggattggtgtcaatcaaagacaaatcacaacaagtgattgtccagggtgtccatgagctctatgatctggaggagactccagtgagctggaaggatgacactgagagaacaaatcgattggtcctcattggcagaaatttagataaggatatccttaaacagctgtttatagctactgtgacagaaacagaaaagcagtggacaacacatttcaaagaagatcaagtttgtacataacactagtggcatttcttatcaaaaggattggataataaaaataagtttctactgggt

SEQ ID NO: 120454 - DNA, 587 bp, Homo sapiens
  Payload ID: 3612
  Gene Symbol: CBWD5
  Gene Name: COBW domain containing 5
  ENST ID: ENST00000489273
  CDS Start-End: 1-532
aacagacttggttccagaagaagatgtaaagaaattaagaacgacaattagagttgatctctctaatgtattagatcttcatgcctttgatagtctctctggaataagtttgcagaaaaaacttcagcatgtgccaggaacacaacctcaccttgatcagagtattgttacaatcacatttgaagtaccaggaaatgcaaaggaagaacatcttaatatgtttattcagaatctcctgtgggaaaagaatgtgagaaacaaggacaatcactgcatggaggtcataaggctgaagggattggtgtcaatcaaagacaaatcacaacaagtgattgtccagggtgtccatgagctctatgatctggaggagactccagtgagctggaaggatgacactgagagaacaaatcgattggtcctcattggcagaaatttagataaggatatccttaaacagctgtttatagctactgtgacagaaacagaaaagcagtggacaacacatttcaaagaagatcaagtttgtacataacactagtggcatttcttatcaaaaggattggataataaaaataagtttctactgg

SEQ ID NO: 120455 - DNA, 1413 bp, Homo sapiens
  Payload ID: 3612
  Gene Symbol: CBWD5
  Gene Name: COBW domain containing 5
  ENST ID: ENST00000465474
  CDS Start-End: 48-224
gttggtcccagcggttcagctgaggtagggacgtgccgtaggccggaatgttaccggctgttggatctgtggatgaggaagaggatcctgcggaggaggattgtcctgaattggttcccattgagacgacgcaaagcgaggaggaggaaaagtctggcctcggcgccaagatcccagtcacaattatcaccgggtatttagttattcaaaggctgctctactgagaagatgaacaaatttcttgtccaaaacaatgtatttcaaacgtgcccctcgggcctttcccgtgttgctcactggtgctgggaagacaacacttctgaactatattttgacagagcaacatagtaaaagagtagcggtcattttaaatgaatctggggaaggaagtgcgctggagaaatccttagctgtcagccaaggtggagagctctatgaagagtggctggaacttagaaacggttgcctctgctgttcagtgaaggacaatggccttagagctattgagaatttgatgcaaaagaaggggaaatttgatgacatactgttagagaccactggattagcagaccctggtgcagtgacttctatgttttgggttgatgctgaattagggagtgatatttaccttgatggtatcataactattgtggattcaaaatatggattaaaacatttaacagaagagaaacctgatggccttatcaatgaagctactaggcaagttgctttggcagatatcattctcattaataaaacagacttggttccagaagaagatgtaaagaaattaagaacgacaattagatccataaatggactaggacaaatcttagaaacacaaagatcaagtttgcagaaaaaacttcagcatgtgccaggaacacaacctcaccttgatcagagtattgttacaatcacatttgaagtaccaggaaatgcaaaggaagaacatcttaatatgtttattcagaatctcctgtgggaaaagaatgtgagaaacaaggacaatcactgcatggaggtcataaggctgaaggtacagtttactgttgcagacttttggacaaagtccttttcttggctgttataaaaactatatttggttttaaacagaaacactggttttagtacaaatcatctttgtctactttcatttttctttattattttcatgactgaaaaggagctttggaaatcactgcataaggcttgatttatttgcacaactttctttagggttgcagctagaacaaacctgtgcgctttgaaatgttaccttctgctctctgttcccaagtacagagaaataatgttgcaaatctcacttctgctgaacattatgcttcctgatgcatttagcagacactaaacatttgtcatactctaaacaaagttacaaaggactagaag

SEQ ID NO: 120456 - DNA, 1583 bp, Homo sapiens
  Payload ID: 3612
  Gene Symbol: CBWD5
  Gene Name: COBW domain containing 5
  ENST ID: ENST00000480229
  CDS Start-End: 72-554
gcgtgcgcggctgcggtacggcgtgttggtcccagcggttcagctgaggtagggacgtgccgtaggccggaatgttaccggctgttggatctgtggatgaggaagaggatcctgcggaggaggattgtcctgaattggttcccattgagacgacgcaaagcgaggaggaggaaaagtctggcctcggcgccaagatcccagtcacaattatcaccgggtatttaggtgctgggaagacaacacttctgaactatattttgacagagcaacatagtaaaagagtagcggtcattttaaatgaatctggggaaggaagtgcgctggagaaatccttagctgtcagccaaggtggagagctctatgaagagtggctggaacttagaaacggttgcctctgctgttcagtgaaggacaatggccttagagctattgagaatttgatgcaaaagaaggggaaatttgatgacatactgttagagaccactggattagcagaccctggtatcataactattgtggattcaaaatatggattaaaagtgaaataccactaaaggcagaagagaatgaaatcatcccacccactgacccgttcccaatctgagcatatggatagggcccaaagcacatttaacagaagagaaacctgatggccttatcaatgaagctactagatccataaatggactaggacaaatcttagaaacacaaagatcaagaatctcactctggtttgagacagaatctcactgtgtcccccaagttggagtgcggtggtgcgatctcggctcactgaaaccactgcctcctgggttcaagcgattctcctgcttcaccctccgagtagctgggattacagagttgatctctctaatgtattagatcttcatgcctttgatagtctctctggaataagtttgcagaaaaaacttcagcatgtgccaggaacacaacctcaccttgatcagagtattgttacaatcacatttgaagtaccaggaaatgcaaaggaagaacatcttaatatgtttattcagaatctcctgtgggaaaagaatgtgagaaacaaggacaatcactgcatggaggtcataaggctgaagggattggtgtcaatcaaagacaaatcacaacaagtgattgtccagggtgtccatgagctctatgatctggaggagactccagtgagctggaaggatgacactgagagaacaaatcgattggtcctcattggcagaaatttagataaggatatccttaaacagctgtttatagctactgtgacagaaacagaaaagcagtggacaacacatttcaaagaagatcaagtttgtacataacactagtggcatttcttatcaaaaggattggataataaaaataagtttctactgggtatatttcaagcatttatttattactttagttacgaattccaatatactttaaaatggtatttgttttacagcatacataaaatgtagcaaatcagtactgtaaaacatttaacattcatacaattatatataatatccttttttttaaagaatggtatttcacaaaaatatcttttgaaattggct

SEQ ID NO: 120457 - DNA, 1411 bp, Homo sapiens
  Payload ID: 3612
  Gene Symbol: CBWD5
  Gene Name: COBW domain containing 5
  ENST ID: ENST00000497250
  CDS Start-End: 82-624
ggcgtgctgggcgtgcgcggctgcggtacggcgtgttggtcccagcggttcagctgaggtagggacgtgccgtaggccggaatgttaccggctgttggatctgtggatgaggaagaggatcctgcggaggaggattgtcctgaattggttcccattgagacgacgcaaagcgaggaggaggaaaagtctggcctcggcgccaagatcccagtcacaattatcaccgggtatttaggtgctgggaagacaacacttctgaactatattttgacagagcaacatagtaaaagagtagcggtcattttaaatgaatctggggaaggaagtgcgctggagaaatccttagctgtcagccaaggtggagagctctatgaagagtggctggaacttagaaacggttgcctctgctgttcagtgaaggacaatggccttagagctattgagaatttgatgcaaaagaaggggaaatttgatgacatactgttagagaccactggattagcagaccctggtgcagtgacttctatgttttgggttgatgctgaattagggagtgatatttaccttgatggtatcataactattgtggattcaaaatatggattaaaagtgaaataccactaaaggcagaagagaatgaaatcatcccacccactgacccgttcccaatctgagcatatggatagggcccaaagcacatttaacagaagagaaacctgatggccttatcaatgaagctactaggcaagttgctttggcagatatcattctcattaataaaacagacttggttccagaagaagatgtaaagaaattaagaacgacaattagatccataaatggactaggacaaatcttagaaacacaaagatcaagagttgatctctctaatgtattagatcttcatgcctttgatagtctctctggaataagtttgcagaaaaaacttcagcatgtgccaggaacacaacctcaccttgatcagagtattgttacaatcacatttgaagtaccaggaaatgcaaaggaagaacatcttaatatgtttattcagaatctcctgtgggaaaagaatgtgagaaacaaggacaatcactgcatggaggtcataaggctgaagggattggtgtcaatcaaagacaaatcacaacaagtgattgtccagggtgtccatgagctctatgatctggaggagactccagtgagctggaaggatgacactgagagaacaaatcgattggtcctcattggcagaaatttagataaggatatccttaaacagctgtttatagctactgtgacagaaacagaaaagcagtggacaacacatttcaaagaagatcaagtttgtacataacactagtggcatttcttatcaaaaggattggataataaaaataagtttctactg

SEQ ID NO: 120458 - DNA, 1648 bp, Homo sapiens
  Payload ID: 3612
  Gene Symbol: CBWD5
  Gene Name: COBW domain containing 5
  ENST ID: ENST00000476161
  CDS Start-End: 84-626
gtggcgtgctgggcgtgcgcggctgcggtacggcgtgttggtcccagcggttcagctgaggtagggacgtgccgtaggccggaatgttaccggctgttggatctgtggatgaggaagaggatcctgcggaggaggattgtcctgaattggttcccattgagacgacgcaaagcgaggaggaggaaaagtctggcctcggcgccaagatcccagtcacaattatcaccgggtatttaggtgctgggaagacaacacttctgaactatattttgacagagcaacatagtaaaagagtagcggtcattttaaatgaatctggggaaggaagtgcgctggagaaatccttagctgtcagccaaggtggagagctctatgaagagtggctggaacttagaaacggttgcctctgctgttcagtgaaggacaatggccttagagctattgagaatttgatgcaaaagaaggggaaatttgatgacatactgttagagaccactggattagcagaccctggtgcagtgacttctatgttttgggttgatgctgaattagggagtgatatttaccttgatggtatcataactattgtggattcaaaatatggattaaaagtgaaataccactaaaggcagaagagaatgaaatcatcccacccactgacccgttcccaatctgagcatatggatagggcccaaagcacatttaacagaagagaaacctgatggccttatcaatgaagctactaggcaagttgctttggcagatatcattctcattaataaaacagacttggttccagaagaagatgtaaagaaattaagaacgacaattagatccataaatggactaggacaaatcttagaaacacaaagatcaagagttgatctctctaatgtattagatcttcatgcctttgatagtctctctggaataagtttgcagaaaaaacttcagcatgtgccaggaacacaacctcaccttgatcagagtattgttacaatcacatttgaagtaccaggaaatgcaaaggaagaacatcttaatatgtttattcagaatctcctgtgggaaaagaatgtgagaaacaaggacaatcactgcatggaggtcataaggctgaaggtacagtttactgttgcagacttttggacaaagtccttttcttggctgttataaaaactatatttggttttaaacagaaacactggttttagtacaaatcatctttgtctactttcatttttctttattattttcatgactgaaaaggagctttggaaatcactgcataaggcttgatttatttgcacaactttctttagggttgcagctagaacaaacctgtgcgctttgaaatgttaccttctgctctctgttcccaagtacagagaaataatgttgcaaatctcacttctgctgaacattatgcttcctgatgcatttagcagacactaaacatttgtcatactctaaacaaagttacaaaggactagaagaattcttgttctgtatttagaaacccactcacattacttgatatttgggtatttaagtcatgaaaggtatttcttctaggaagcagtgattctaaagtgtatgcttaaccagtcagttgagtgtctactcttgtgtgttcacaagtgtacac

SEQ ID NO: 120459 - DNA, 1436 bp, Homo sapiens
  Payload ID: 3612
  Gene Symbol: CBWD5
  Gene Name: COBW domain containing 5
  ENST ID: ENST00000486221
  CDS Start-End: 48-596
gttggtcccagcggttcagctgaggtagggacgtgccgtaggccggaatgttaccggctgttggatctgtggatgaggaagaggatcctgcggaggaggattgtcctgaattggttcccattgagacgacgcaaagcgaggaggaggaaaagtctggcctcggcgccaagatcccagtcacaattatcaccgggtatttaggtgctgggaagacaacacttctgaactatattttgacagagcaacatagtaaaagagtagcggtcattttaaatgaatctggggaaggaagtgcgctggagaaatccttagctgtcagccaaggtggagagctctatgaagagtggctggaacttagaaacggttgcctctgctgttcagtgaaggacaatggccttagagctattgagaatttgatgcaaaagaaggggaaatttgatgacatactgttagagaccactggattagcagaccctggtgcagtgacttctatgttttgggttgatgctgaattagggagtgatatttaccttgatggtatcataactattgtggattcaaaatatggattaaaagcaaagaattggacaacttaaaatgacagctctctattctgaggacttgacacccgggctactgacattgttcttttcagttctacaaatgtgacagcatttaatgcaatagaagcaatgaatgaagttacccagagaaggtcaacatttaacagaagagaaacctgatggccttatcaatgaagctactaggcaagttgctttggcagatatcattctcattaataaaacagacttggttccagaagaagatgtaaagaaattaagaacgacaattagatccataaatggactaggacaaatcttagaaacacaaagatcaagagttgatctctctaatgtattagatcttcatgcctttgatagtctctctggaataagtttgcagaaaaaacttcagcatgtgccaggaacacaacctcaccttgatcagagtattgttacaatcacatttgaagtaccaggaaatgcaaaggaagaacatcttaatatgtttattcagaatctcctgtgggaaaagaatgtgagaaacaaggacaatcactgcatggaggtcataaggctgaagggattggtgtcaatcaaagacaaatcacaacaagtgattgtccagggtgtccatgagctctatgatctggaggagactccagtgagctggaaggatgacactgagagaacaaatcgattggtcctcattggcagaaatttagataaggatatccttaaacagctgtttatagctactgtgacagaaacagaaaagcagtggacaacacatttcaaagaagatcaagtttgtacataacactagtggcatttcttatcaaaaggattggataataaaaataagtttctactggg

SEQ ID NO: 120460 - DNA, 1381 bp, Homo sapiens
  Payload ID: 3612
  Gene Symbol: CBWD5
  Gene Name: COBW domain containing 5
  ENST ID: ENST00000469921
  CDS Start-End: 120-296
gcgatgtgatgacgtcaggccccggccaggccgggagtggcgtgctgggcgtgcgcggctgcggtacggcgtgttggtcccagcggttcagctgaggtagggacgtgccgtaggccggaatgttaccggctgttggatctgtggatgaggaagaggatcctgcggaggaggattgtcctgaattggttcccattgagacgacgcaaagcgaggaggaggaaaagtctggcctcggcgccaagatcccagtcacaattatcaccgggtatttagttattcaaaggctgctctactgagaagatgaacaaatttcttgtccaaaacaatgtatttcaaacgtgcccctcgggcctttcccgtgttgctcactggtgctgggaagacaacacttctgaactatattttgacagagcaacatagtaaaagagtagcggtcattttaaatgaatctggggaaggaagtgcgctggagaaatccttagctgtcagccaaggtggagagctctatgaagagtggctggaacttagaaacggttgcctctgctgttcagtgaaggacaatggccttagagctattgagaatttgatgcaaaagaaggggaaatttgatgacatactgttagagaccactggattagcagaccctggtgcagtgacttctatgttttgggttgatgctgaattagggagtgatatttaccttgatggtatcataactattgtggattcaaaatatggattaaaacatttaacagaagagaaacctgatggccttatcaatgaagctactaggcaagttgctttggcagatatcattctcattaataaaacagacttggttccagaagaagatgtaaagaaattaagaacgacaattagatccataaatggactaggacaaatcttagaaacacaaagatcaaggtactttaaaaaagctattcctattaataacaaatcattttagttattaataataaacattaagtaattgacaaatatgcttgattctgatataagaaagatctaagttcatttaaaaagaattggatccaaaatgttgtttggaatgctcttaataagttagtttggcatatttggctagtacatttgcctgtcttcaaaactaagattacaaagccatggtaacactgtgtaagtgtttgcttaatgaggaagaaaagacttccaaacactcgagagggtaactcagtacagaaatctgaagtatattgaggaatcttaatttgaagtgtttaaatggcattttaatatttaaaaagccttcttagtgttttatagttgccaaaaaatacatggagtctttaccttgaagttcctgacaaattcttttattaaattttgactttcattttctcta

SEQ ID NO: 120461 - DNA, 1792 bp, Homo sapiens
  Payload ID: 3613
  Gene Symbol: CBWD7
  Gene Name: COBW domain containing 7
  Uniprot ID: A6NM15
  ENST ID: ENST00000377391
  CDS Start-End: 179-1366
aagggacgaggcagttctcgtccagagcccaggtaatccgggcgggatcagctagcgtcgcgatgtgatgacgtcaggccccggccaggccgggagtggcgtgctgggcgtgcgcggctgcggtacggcgtgttggtcccagcggttcagctgaggtagggacgtgctgtaggccggaatgttaccggctgttggatctgtggatgaggaagaggatcctgcggaggaggattgtcctgaattggttcccattgagacgacgcaaagcgaggaggaggaaaagtctggcctcggcgccaagatcccagtcacaattatcaccgggtatttaggtgctgggaagacaacacttctgaactatattttgacagagcaacatagtaaaagagtagcggtcattttaaatgaatctggggaaggaagtgcgctggagaaatccttagctgtcagccaaggtggagagctctatgaagagtggctggaacttagaaacggttgcctctgctgttcagtgaaggacaatggccttagagctattgagaatttgatgcaaaagaaggggaaatttgatgacatactgttagagaccactggattagcagaccctggtgcagtggcttctatgttttgggttgatgccgaattagggagtgatatttaccttgatggtatcataactattgtggattcaaaatatggattaaaacatttaacagaagagaaacctgatggccttatcaatgaagctactaggcaagttgctttggcagatatcattctcattaataaaacagacttggtcccagaagaagatgtaaagaaattaagaacgacacttagatccataaatggactaggacaaatcttagaaacacaaagatcaagagttgatctctctaatgtattagatcttcatgcctttgatagtctctctggaataagtttgcagaaaaaacttcagcatgtgccaggaacacaacctcaccttgatcagagtattgttacaatcacatttgacgtaccaggaaatgcaaaggaagaacatcttaatatgtttattcagaatcttctgtgggaaaagaatgtgagaaacaaggacaatcactgcatggaggtcataaggctgaagggattggtgtcaatcaaagacaaatcacaacaagtgattgtccagggtgtccatgagctctgtgatctggaggagactccagtgagctggaaggatgacactgagagaacaaatcgattggtcctcattggcagaaatttagataaggatatccttaaacagctgtttatagctactgtgacagaaacagaaaagcagtggacaacacatttcaaagaagatcaagtttgtacataacactagaggcatttcttatcaaaaggattggataataaaaataagtttctactgggtatatttcaagcatttatttattactttagttacgaattccaatatactttaaaatggtatttgttttacagcatacataaaatgtagcaaatcagtactgtaaaacatttaacattcatacaattatatacaatatccttttttttaaagaatggtatttcacaaaaatatcttttgaaattggctttggagtttacatatactgaacatgaaagtttataataatgatgatacaactttcaacattgtcattttttcttagaacttcagctgattgcagagatataatgattacattgttattaaatttttttaacacaagtaagtgtcaccattttatgacatgaaataaaaggttatgactgttat

SEQ ID NO: 120462 - DNA, 1608 bp, Homo sapiens
  Payload ID: 3613
  Gene Symbol: CBWD7
  Gene Name: COBW domain containing 7
  ENST ID: ENST00000456520
  CDS Start-End: 53-1183
ggcgtgttggtcccagcggttcagctgaggtagggacgtgctgtaggccggaatgttaccggctgttggatctgtggatgaggaagaggatcctgcggaggaggattgtcctgaattggttcccattgagacgacgcaaagcgaggaggaggaaaagtctggcctcggcgccaagatcccagtcacaattatcaccgggtatttaggtgctgggaagacaacacttctgaactatattttgacagagcaacatagtaaaagagtagcggtcattttaaatgaatctggggaaggaagtgcgctggagaaatccttagctgtcagccaaggtggagagctctatgaagagtggctggaacttagaaacggttgcctctgctgttcagtgaaggacaatggccttagagctattgagaatttgatgcaaaagaaggggaaatttgatgacatactgttagagaccactggattagcagaccctggtgcagtggcttctatgttttgggttgatgccgaattagggagtgatatttaccttgatggtatcataactattgtggattcaaaatatggattaaaacatttaacagaagagaaacctgatggccttatcaatgaagctactaggcaagttgctttggcagatatcattctcattaataaaacagacttggtcccagaagaagatgtaaagaaattaagaacgacacttagatccataaatggactaggacaaatcttagaaacacaaagatcaagtttgcagaaaaaacttcagcatgtgccaggaacacaacctcaccttgatcagagtattgttacaatcacatttgacgtaccaggaaatgcaaaggaagaacatcttaatatgtttattcagaatcttctgtgggaaaagaatgtgagaaacaaggacaatcactgcatggaggtcataaggctgaagggattggtgtcaatcaaagacaaatcacaacaagtgattgtccagggtgtccatgagctctgtgatctggaggagactccagtgagctggaaggatgacactgagagaacaaatcgattggtcctcattggcagaaatttagataaggatatccttaaacagctgtttatagctactgtgacagaaacagaaaagcagtggacaacacatttcaaagaagatcaagtttgtacataacactagaggcatttcttatcaaaaggattggataataaaaataagtttctactgggtatatttcaagcatttatttattactttagttacgaattccaatatactttaaaatggtatttgttttacagcatacataaaatgtagcaaatcagtactgtaaaacatttaacattcatacaattatatacaatatccttttttttaaagaatggtatttcacaaaaatatcttttgaaattggctttggagtttacatatactgaacatgaaagtttataataatgatgatacaactttcaacattgtcattttttcttagaacttcagctgattgcagagatataatgattacattgttattaaatttttttaacacaagtaagtgtcaccattttatgacatgaaataaaaggttatgactgtta

SEQ ID NO: 120463 - DNA, 452 bp, Homo sapiens
  Payload ID: 3613
  Gene Symbol: CBWD7
  Gene Name: COBW domain containing 7
  ENST ID: ENST00000620776
  CDS Start-End: 1-222
tgttcagtgaaggacaatggccttagagctattgagaatttgatgcaaaagaaggggaaatttgatgacatactgttagagaccactggattagcagaccctggtgcagtggcttctatgttttgggttgatgccgaattagggagtgatatttaccttgatggtatcataactattgtggattcaaaatatggattaaaagcaaagaattggacaacttaaaatgacagctctctattctgaggacttgacacccgggctactgacattgttcttttcagttctacaaatgtgacagcatttaatgcaatagaagcaatgaatgaagttacccagagaagcatttaacagaagagaaacctgatggccttatcaatgaagctactaggcaagttgctttggcagatatcattctcattaataaaacagacttggtcccagaagaagatgta

SEQ ID NO: 120464 - DNA, 599 bp, Homo sapiens
  Payload ID: 3613
  Gene Symbol: CBWD7
  Gene Name: COBW domain containing 7
  ENST ID: ENST00000467791
  CDS Start-End: 1-140
ccactggattagcagaccctggtgcagtggcttctatgttttgggttgatgccgaattagggagtgatatttaccttgatggtatcataactattgtggattcaaaatatggattaaaagcaaagaattggacaacttaaaatgacagctctctattctgaggacttgacacccgggctactgacattgttcttttcagttctacaaatgtgacagcatttaatgcaatagaagcaatgaatgaagttacccagagaaggtcaacatttaacagaagagaaacctgatggccttatcaatgaagctactaggcaagttgctttggcagatatcattctcattaataaaacagacttggtcccagaagaagatgtaaagaaattaagaacgacacttagatccataaatggactaggacaaatcttagaaacacaaagatcaagaacaataaacatgcagtgattgatttttcttacttcaagtggatgagtgagcaagtgactaaaatcttctgtgaattcttcagtagttgatctctctaatgtattagatcttcatgcctttgatagtctctctggaataagtttgcagaaaaaact

SEQ ID NO: 120465 - DNA, 2433 bp, Homo sapiens
  Payload ID: 3613
  Gene Symbol: CBWD7
  Gene Name: COBW domain containing 7
  ENST ID: ENST00000486387
  CDS Start-End: 82-624
ggcgtgctgggcgtgcgcggctgcggtacggcgtgttggtcccagcggttcagctgaggtagggacgtgctgtaggccggaatgttaccggctgttggatctgtggatgaggaagaggatcctgcggaggaggattgtcctgaattggttcccattgagacgacgcaaagcgaggaggaggaaaagtctggcctcggcgccaagatcccagtcacaattatcaccgggtatttaggtgctgggaagacaacacttctgaactatattttgacagagcaacatagtaaaagagtagcggtcattttaaatgaatctggggaaggaagtgcgctggagaaatccttagctgtcagccaaggtggagagctctatgaagagtggctggaacttagaaacggttgcctctgctgttcagtgaaggacaatggccttagagctattgagaatttgatgcaaaagaaggggaaatttgatgacatactgttagagaccactggattagcagaccctggtgcagtggcttctatgttttgggttgatgccgaattagggagtgatatttaccttgatggtatcataactattgtggattcaaaatatggattaaaagtgaaataccactaaaggcagaagagaatgaaatcatcccacccactgacccgttcccaatctgagcatatggatagggcccaaagcacatttaacagaagagaaacctgatggccttatcaatgaagctactaggcaagttgctttggcagatatcattctcattaataaaacagacttggtcccagaagaagatgtaaagaaattaagaacgacacttagatccataaatggactaggacaaatcttagaaacacaaagatcaagaacaataaacatgcagtgattgatttttcttacttcaagtggatgagtgagcaagtgactaaaatcttctgtgaattcttcagtgtatggtgcttgccaatgcatctgagaatctagggactttctgaaatagtacttccttgctatgaggactgaagttggattagaatccttttcaatgaagatcagatgtcctgagtagaattcttactattgggtcctgaatcttatattaaatattctctcaaattccttgaggcgtgagccaccgcgcccagcctgtcctctgtgattttctgggcttatgttaaaattataactcaatcaccagtctttataaatttgcttttttatatttaaaccaaacctaatgctaattgtgatatgttatttattctcacctgatttgaatcattggattcaattaaatgagtttaattatcattaagtaattctaagagaaataatgtctattcggatggtgggaattttctttctacatgcagccccattctgaatgaatgaaatcaaatcacgtgaagatcagggtcctagagtaacttaatattttgtacattggttatttgactcctcatttttatattacatgttatatcaagggagggggtataaaagaaatacaaaaattgcagaggtatctggaatgtacctatttgttaattctatttgtcatttcttttgtttcatcttttgagtaataagctgcttggaaaagtttctgttctttagctgattttttagctataaaaatgtatttgaaaagctcataaatttcagcattgaaaagataattgaaagtttaaaaaaaacctaattcattgaagtaataaccaaataattttcaatcttgattcaactgtgattcaaatcttacaccatttgcccacttctatgaattttatgtataaaattttttaagagtcagagtttttttttcttgattaattggatgtatttcacagaatttccaactgctcacgttagttttcttccttttagagttgatctctctaatgtattagatcttcatgcctttgatagtctctctggaataagtttgcagaaaaaacttcagcatgtgccaggaacacaacctcaccttgatcagagtattgttacaatcacatttgacgtaccaggaaatgcaaaggaagaacatcttaatatgtttattcagaatcttctgtgggaaaagaatgtgagaaacaaggacaatcactgcatggaggtcataaggctgaagggattggtgtcaatcaaagacaaatcacaacaagtgattgtccagggtgtccatgagctctgtgatctggaggagactccagtgagctggaaggatgacactgagagaacaaatcgattggtcctcattggcagaaatttagataaggatatccttaaacagctgtttatagctactgtgacagaaacagaaaagcagtggacaacacatttcaaagaagatcaagtttgtacataacactagaggcatttcttatcaaaaggattggataataaaaataagtttctactggg

SEQ ID NO: 120466 - DNA, 721 bp, Homo sapiens
  Payload ID: 3613
  Gene Symbol: CBWD7
  Gene Name: COBW domain containing 7
  ENST ID: ENST00000617933
  CDS Start-End: 179-721
aagggacgaggcagttctcgtccagagcccaggtaatccgggcgggatcagctagcgtcgcgatgtgatgacgtcaggccccggccaggccgggagtggcgtgctgggcgtgcgcggctgcggtacggcgtgttggtcccagcggttcagctgaggtagggacgtgctgtaggccggaatgttaccggctgttggatctgtggatgaggaagaggatcctgcggaggaggattgtcctgaattggttcccattgagacgacgcaaagcgaggaggaggaaaagtctggcctcggcgccaagatcccagtcacaattatcaccgggtatttaggtgctgggaagacaacacttctgaactatattttgacagagcaacatagtaaaagagtagcggtcattttaaatgaatctggggaaggaagtgcgctggagaaatccttagctgtcagccaaggtggagagctctatgaagagtggctggaacttagaaacggttgcctctgctgttcagtgaaggacaatggccttagagctattgagaatttgatgcaaaagaaggggaaatttgatgacatactgttagagaccactggattagcagaccctggtgcagtggcttctatgttttgggttgatgccgaattagggagtgatatttaccttgatggtatcataactattgtggattcaaaatatggattaaaagtgaaataccactaa

SEQ ID NO: 120467 - DNA, 1820 bp, Homo sapiens
  Payload ID: 3613
  Gene Symbol: CBWD7
  Gene Name: COBW domain containing 7
  ENST ID: ENST00000613716
  CDS Start-End: 313-1392
gtcaggccccggccaggccgggagtggcgtgctgggcgtgcgcggctgcggtacggcgtgttggtcccagcggttcagctgaggtagggacgtgctgtaggccggaatgttaccggctgttggatctgtggatgaggaagaggatcctgcggaggaggattgtcctgaattggttcccattgagacgacgcaaagcgaggaggaggaaaagtctggcctcggcgccaagatcccagtcacaattatcaccgggtatttagttattcagaggctgctctactgagaagatgaacaaatttcttgtccaaaacaatgtatttcaaacgtgcccctcgggcctttcccgtgttgctcactggtgctgggaagacaacacttctgaactatattttgacagagcaacatagtaaaagagtagcggtcattttaaatgaatctggggaaggaagtgcgctggagaaatccttagctgtcagccaaggtggagagctctatgaagagtggctggaacttagaaacggttgcctctgctgttcagtgaaggacaatggccttagagctattgagaatttgatgcaaaagaaggggaaatttgatgacatactgttagagaccactggattagcagaccctggtgcagtggcttctatgttttgggttgatgccgaattagggagtgatatttaccttgatggtatcataactattgtggattcaaaatatggattaaaacatttaacagaagagaaacctgatggccttatcaatgaagctactaggcaagttgctttggcagatatcattctcattaataaaacagacttggtcccagaagaagatgtaaagaaattaagaacgacacttagatccataaatggactaggacaaatcttagaaacacaaagatcaagagttgatctctctaatgtattagatcttcatgcctttgatagtctctctggaataagtttgcagaaaaaacttcagcatgtgccaggaacacaacctcaccttgatcagagtattgttacaatcacatttgacgtaccaggaaatgcaaaggaagaacatcttaatatgtttattcagaatcttctgtgggaaaagaatgtgagaaacaaggacaatcactgcatggaggtcataaggctgaagggattggtgtcaatcaaagacaaatcacaacaagtgattgtccagggtgtccatgagctctgtgatctggaggagactccagtgagctggaaggatgacactgagagaacaaatcgattggtcctcattggcagaaatttagataaggatatccttaaacagctgtttatagctactgtgacagaaacagaaaagcagtggacaacacatttcaaagaagatcaagtttgtacataacactagaggcatttcttatcaaaaggattggataataaaaataagtttctactgggtatatttcaagcatttatttattactttagttacgaattccaatatactttaaaatggtatttgttttacagcatacataaaatgtagcaaatcagtactgtaaaacatttaacattcatacaattatatacaatatccttttttttaaagaatggtatttcacaaaaatatcttttgaaattggctttggagtttacatatactgaacatgaaagtttataataatgatgatacaactttcaacattgtcattttttcttagaacttcagctgattgcagagatataatgattacattgttattaaatttttttaacacaagtaagtgtcaccattttatgacatgaaataaaaggttatgactgttattg

SEQ ID NO: 120468 - DNA, 1554 bp, Homo sapiens
  Payload ID: 3613
  Gene Symbol: CBWD7
  Gene Name: COBW domain containing 7
  ENST ID: ENST00000382436
  CDS Start-End: 1-412
cacaattatcaccgggtatttaggtgctgggaagacaacacttctgaactatattttgacagagcaacatagtaaaagagtagcggtcattttaaatgaatctggggaaggaagtgcgctggagaaatccttagctgtcagccaaggtggagagctctatgaagagtggctggaacttagaaacggttgcctctgctgttcagtgaaggacaatggccttagagctattgagaatttgatgcaaaagaaggggaaatttgatgacatactgttagagaccactggattagcagaccctggtgcagtggcttctatgttttgggttgatgccgaattagggagtgatatttaccttgatggtatcataactattgtggattcaaaatatggattaaaagtgaaataccactaaaggcagaagagaatgaaatcatcccacccactgacccgttcccaatctgagcatatggatagggcccaaagcacatttaacagaagagaaacctgatggccttatcaatgaagctactaggcaagttgctttggcagatatcattctcattaataaaacagacttggtcccagaagaagatgtaaagaaattaagaacgacacttagatccataaatggactaggacaaatcttagaaacacaaagatcaagagttgatctctctaatgtattagatcttcatgcctttgatagtctctctggaataagtttgcagaaaaaacttcagcatgtgccaggaacacaacctcaccttgatcagagtattgttacaatcacatttgacgtaccaggaaatgcaaaggaagaacatcttaatatgtttattcagaatcttctgtgggaaaagaatgtgagaaacaaggacaatcactgcatggaggtcataaggctgaagggattggtgtcaatcaaagacaaatcacaacaagtgattgtccagggtgtccatgagctctgtgatctggaggagactccagtgagctggaaggatgacactgagagaacaaatcgattggtcctcattggcagaaatttagataaggatatccttaaacagctgtttatagctactgtgacagaaacagaaaagcagtggacaacacatttcaaagaagatcaagtttgtacataacactagaggcatttcttatcaaaaggattggataataaaaataagtttctactgggtatatttcaagcatttatttattactttagttacgaattccaatatactttaaaatggtatttgttttacagcatacataaaatgtagcaaatcagtactgtaaaacatttaacattcatacaattatatacaatatccttttttttaaagaatggtatttcacaaaaatatcttttgaaattggctttggagtttacatatactgaacatgaaagtttataataatgatgatacaactttcaacattgtcattttttcttagaacttcagctgattgcagagatataatgattacattgttattaaatttttttaacacaagtaagtgtcaccattttatgacatgaaataa

SEQ ID NO: 120469 - DNA, 1813 bp, Homo sapiens
  Payload ID: 3613
  Gene Symbol: CBWD7
  Gene Name: COBW domain containing 7
  ENST ID: ENST00000494538
  CDS Start-End: 44-526
gtcccagcggttcagctgaggtagggacgtgctgtaggccggaatgttaccggctgttggatctgtggatgaggaagaggatcctgcggaggaggattgtcctgaattggttcccattgagacgacgcaaagcgaggaggaggaaaagtctggcctcggcgccaagatcccagtcacaattatcaccgggtatttaggtgctgggaagacaacacttctgaactatattttgacagagcaacatagtaaaagagtagcggtcattttaaatgaatctggggaaggaagtgcgctggagaaatccttagctgtcagccaaggtggagagctctatgaagagtggctggaacttagaaacggttgcctctgctgttcagtgaaggacaatggccttagagctattgagaatttgatgcaaaagaaggggaaatttgatgacatactgttagagaccactggattagcagaccctggtatcataactattgtggattcaaaatatggattaaaagtgaaataccactaaaggcagaagagaatgaaatcatcccacccactgacccgttcccaatctgagcatatggatagggcccaaagcagcaaagaattggacaacttaaaatgacagctctctattctgaggacttgacacccgggctactgacattgttcttttcagttctacaaatgtgacagcatttaatgcaatagaagcaatgaatgaagttacccagagaagcatttaacagaagagaaacctgatggccttatcaatgaagctactagatccataaatggactaggacaaatcttagaaacacaaagatcaaggctcagcagctgatagactcagcaacaggcagccaggagctctgaggctcacagctggcagtctagttccactcagtctctacttgagaaattctttctttggaagtacagcagaggccttagagttgatctctctaatgtattagatcttcatgcctttgatagtctctctggaataagtttgcagaaaaaacttcagcatgtgccaggaacacaacctcaccttgatcagagtattgttacaatcacatttgacgtaccaggaaatgcaaaggaagaacatcttaatatgtttattcagaatcttctgtgggaaaagaatgtgagaaacaaggacaatcactgcatggaggtcataaggctgaagggattggtgtcaatcaaagacaaatcacaacaagtgattgtccagggtgtccatgagctctgtgatctggaggagactccagtgagctggaaggatgacactgagagaacaaatcgattggtcctcattggcagaaatttagataaggatatccttaaacagctgtttatagctactgtgacagaaacagaaaagcagtggacaacacatttcaaagaagatcaagtttgtacataacactagaggcatttcttatcaaaaggattggataataaaaataagtttctactgggtatatttcaagcatttatttattactttagttacgaattccaatatactttaaaatggtatttgttttacagcatacataaaatgtagcaaatcagtactgtaaaacatttaacattcatacaattatatacaatatccttttttttaaagaatggtatttcacaaaaatatcttttgaaattggctttggagtttacatatactgaacatgaaagtttataataatgatgatacaactttcaacattgtcattttttcttagaacttcagctgattgcagagatataatgattacattgttattaaatttttttaacacaa

SEQ ID NO: 120470 - DNA, 2397 bp, Homo sapiens
  Payload ID: 3614
  Gene Symbol: COCH
  Gene Name: cochlin
  Uniprot ID: O43405
  ENST ID: ENST00000216361
  CDS Start-End: 397-2049
gggggccttgccttccgcactcgggcgcagccgggtggatctcgagcaggtgcggagccccgggcggcgggcgcgggtgcgagggatccctgacgcctctgtccctgtttctttgtcgctcccagcctgtctgtcgtcgttttggcgcccccgcctccccgcggtgcggggttgcacaccgatcctgggcttcgctcgatttgccgccgaggcgcctcccagacctagaggggcgctggcctggagcagcgggtcgtctgtgtcctctctcctctgcgccgcgcccggggatccgaagggtgcggggctctgaggaggtgacgcgcggggcctcccgcaccctggccttgcccgcattctccctctctcccaggtgtgagcagcctatcagtcaccatgtccgcagcctggatcccggctctcggcctcggtgtgtgtctgctgctgctgccggggcccgcgggcagcgagggagccgctcccattgctatcacatgttttaccagaggcttggacatcaggaaagagaaagcagatgtcctctgcccagggggctgccctcttgaggaattctctgtgtatgggaacatagtatatgcttctgtatcgagcatatgtggggctgctgtccacaggggagtaatcagcaactcagggggacctgtacgagtctatagcctacctggtcgagaaaactattcctcagtagatgccaatggcatccagtctcaaatgctttctagatggtctgcttctttcacagtaactaaaggcaaaagtagtacacaggaggccacaggacaagcagtgtccacagcacatccaccaacaggtaaacgactaaagaaaacacccgagaagaaaactggcaataaagattgtaaagcagacattgcatttctgattgatggaagctttaatattgggcagcgccgatttaatttacagaagaattttgttggaaaagtggctctaatgttgggaattggaacagaaggaccacatgtgggccttgttcaagccagtgaacatcccaaaatagaattttacttgaaaaactttacatcagccaaagatgttttgtttgccataaaggaagtaggtttcagagggggtaattccaatacaggaaaagccttgaagcatactgctcagaaattcttcacggtagatgctggagtaagaaaagggatccccaaagtggtggtggtatttattgatggttggccttctgatgacatcgaggaagcaggcattgtggccagagagtttggtgtcaatgtatttatagtttctgtggccaagcctatccctgaagaactggggatggttcaggatgtcacatttgttgacaaggctgtctgtcggaataatggcttcttctcttaccacatgcccaactggtttggcaccacaaaatacgtaaagcctctggtacagaagctgtgcactcatgaacaaatgatgtgcagcaagacctgttataactcagtgaacattgcctttctaattgatggctccagcagtgttggagatagcaatttccgcctcatgcttgaatttgtttccaacatagccaagacttttgaaatctcggacattggtgccaagatagctgctgtacagtttacttatgatcagcgcacggagttcagtttcactgactatagcaccaaagagaatgtcctagctgtcatcagaaacatccgctatatgagtggtggaacagctactggtgatgccatttccttcactgttagaaatgtgtttggccctataagggagagccccaacaagaacttcctagtaattgtcacagatgggcagtcctatgatgatgtccaaggccctgcagctgctgcacatgatgcaggaatcactatcttctctgttggtgtggcttgggcacctctggatgacctgaaagatatggcttctaaaccgaaggagtctcatgctttcttcacaagagagttcacaggattagaaccaattgtttctgatgtcatcagaggcatttgtagagatttcttagaatcccagcaataatggtaacattttgacaactgaaagaaaaagtacaaggggatccagtgtgtaaattgtattctcataatactgaaatgctttagcatactagaatcagatacaaaactattaagtatgtcaacagccatttaggcaaataagcactcctttaaagccgctgccttctggttacaatttacagtgtactttgttaaaaacactgctgaggcttcataatcatggctcttagaaactcaggaaagaggagataatgtggattaaaaccttaagagttctaaccatgcctactaaatgtacagatatgcaaattccatagctcaataaaagaatctgatacttagaccaaaa

SEQ ID NO: 120471 - DNA, 2536 bp, Homo sapiens
  Payload ID: 3614
  Gene Symbol: COCH
  Gene Name: cochlin
  Uniprot ID: O43405
  ENST ID: ENST00000396618
  CDS Start-End: 57-1709
gcactcgggcgcagccgggtggatctcgagcaggtgtgagcagcctatcagtcaccatgtccgcagcctggatcccggctctcggcctcggtgtgtgtctgctgctgctgccggggcccgcgggcagcgagggagccgctcccattgctatcacatgttttaccagaggcttggacatcaggaaagagaaagcagatgtcctctgcccagggggctgccctcttgaggaattctctgtgtatgggaacatagtatatgcttctgtatcgagcatatgtggggctgctgtccacaggggagtaatcagcaactcagggggacctgtacgagtctatagcctacctggtcgagaaaactattcctcagtagatgccaatggcatccagtctcaaatgctttctagatggtctgcttctttcacagtaactaaaggcaaaagtagtacacaggaggccacaggacaagcagtgtccacagcacatccaccaacaggtaaacgactaaagaaaacacccgagaagaaaactggcaataaagattgtaaagcagacattgcatttctgattgatggaagctttaatattgggcagcgccgatttaatttacagaagaattttgttggaaaagtggctctaatgttgggaattggaacagaaggaccacatgtgggccttgttcaagccagtgaacatcccaaaatagaattttacttgaaaaactttacatcagccaaagatgttttgtttgccataaaggaagtaggtttcagagggggtaattccaatacaggaaaagccttgaagcatactgctcagaaattcttcacggtagatgctggagtaagaaaagggatccccaaagtggtggtggtatttattgatggttggccttctgatgacatcgaggaagcaggcattgtggccagagagtttggtgtcaatgtatttatagtttctgtggccaagcctatccctgaagaactggggatggttcaggatgtcacatttgttgacaaggctgtctgtcggaataatggcttcttctcttaccacatgcccaactggtttggcaccacaaaatacgtaaagcctctggtacagaagctgtgcactcatgaacaaatgatgtgcagcaagacctgttataactcagtgaacattgcctttctaattgatggctccagcagtgttggagatagcaatttccgcctcatgcttgaatttgtttccaacatagccaagacttttgaaatctcggacattggtgccaagatagctgctgtacagtttacttatgatcagcgcacggagttcagtttcactgactatagcaccaaagagaatgtcctagctgtcatcagaaacatccgctatatgagtggtggaacagctactggtgatgccatttccttcactgttagaaatgtgtttggccctataagggagagccccaacaagaacttcctagtaattgtcacagatgggcagtcctatgatgatgtccaaggccctgcagctgctgcacatgatgcaggaatcactatcttctctgttggtgtggcttgggcacctctggatgacctgaaagatatggcttctaaaccgaaggagtctcatgctttcttcacaagagagttcacaggattagaaccaattgtttctgatgtcatcagaggcatttgtagagatttcttagaatcccagcaataatggtaacattttgacaactgaaagaaaaagtacaaggggatccagtgtgtaaattgtattctcataatactgaaatgctttagcatactagaatcagatacaaaactattaagtatgtcaacagccatttaggcaaataagcactcctttaaagccgctgccttctggttacaatttacagtgtactttgttaaaaacactgctgaggcttcataatcatggctcttagaaactcaggaaagaggagataatgtggattaaaaccttaagagttctaaccatgcctactaaatgtacagatatgcaaattccatagctcaataaaagaatctgatacttagaccaaaagcaacattcgttctctaaccattctgtattgattatataagcaaaatgaaaagagaaacttaaatgaacacagctctttaacatggttcaggtacacatattttgacccaagtggatattttcttaaaaccaatcaataatagctagctattactgcagactataaaatctggatatagaaaggagacctgtatcaaactgcttttgtagtgtgttttcataacaacttatgactaaaaatatcacactgaataagagagcaggattgccaggtatttttctatttctctccttaattttatatgtatatagatatatttggcttatattctaagtcacctaagtacttaaaagttaagttggtaaagtatttactgactgcttataaacatttaaagacaaagacatttcaaataactgcagaaaaaatattgtagtttgaatatttaagcaataaaactgctagtgagttattgtaa

SEQ ID NO: 120472 - DNA, 1997 bp, Homo sapiens
  Payload ID: 3614
  Gene Symbol: COCH
  Gene Name: cochlin
  Uniprot ID: O43405
  ENST ID: ENST00000475087
  CDS Start-End: 368-1852
gccgggtggatctcgagcaggtgcggagccccgggcggcgggcgcgggtgcgagggatccctgacgcctctgtccctgtttctttgtcgctcccagcctgtctgtcgtcgttttggcgcccccgcctccccgcggtgcggggttgcacaccgatcctgggcttcgctcgatttgccgccgaggcgcctcccagacctagaggggcgctggcctggagcagcgggtcgtctgtgtcctctctcctctgcgccgcgcccggggatccgaagggtgcggggctctgaggaggtgacgcgcggggcctcccgcaccctggccttgcccgcattctccctctctcccaggtgtgagcagcctatcagtcaccatgtccgcagcctggatcccggctctcggcctcggtgtgtgtctgctgctgctgccggggcccgcgggcagcgagggagccgctcccattgctatcacatgttttaccagaggcttggacatcaggaaagagaaagcagatgtcctctgcccagggggctgccctcttgaggaattctctgtgtatgggaacatagtatatgcttctgtatcgagcatatgtggggctgctgtccacaggggagtaatcagcaactcagggggacctgtacgagtctatagcctacctggtcgagaaaactattcctcagtagatgccaatggcatccagtctcaaatgctttctagatggtctgcttctttcacagtaactaaaggcaaaagtagtacacaggaggccacaggacaagcagtgtccacagcacatccaccaacaggtaaacgactaaagaaaacacccgagaagaaaactggcaataaagattgtaaagcagacattgcatttctgattgatggaagctttaatattgggcagcgccgatttaatttacagaagaattttgttggaaaagtggctctaatgttgggaattggaacagaaggaccacatgtgggccttgttcaagccagtgaacatcccaaaatagaattttacttgaaaaactttacatcagccaaagatgttttgtttgccataaaggaagtaggtttcagagggggtaattccaatacaggaaaagccttgaagcatactgctcagaaattcttcacggtagatgctggagtaagaaaagggatccccaaagtggtggtggtatttattgatggttggccttctgatgacatcgaggaagcaggcattgtggccagagagtttggtgtcaatgtatttatagtttctgtggccaagcctatccctgaagaactggggatggttcaggatgtcacatttgttgacaaggctgtctgtcggaataatggcttcttctcttaccacatgcccaactggtttggcaccacaaaatacgtaaagcctctggtacagaagctgtgcactcatgaacaaatgatgtgcagcaagacctgttataactcagtgaacattgcctttctaattgatggctccagcagtgttggagatagcaatttccgcctcatgcttgaatttgtttccaacatagccaagacttttgaaatctcggacattggtgccaagatagctgctgtacagtttacttatgatcagcgcacggagttcagtttcactgactatagcaccaaagagaatgtcctagctgtcatcagaaacatccgctatatgagtggtggaacagctactggtgatgccatttccttcactgttagaaatgtgtttggccctataagggagagccccaacaagaacttcctagtaattgtcacagatgggcagtcctatgatgatgtccaaggccctgcagctgctgcacatgatgcagcaaaataagtttaaaagggaatctgtggcattcaaccgataaacagaagatcactaagagatgaaaaaaagctactcttggagctcacttcccccaacaagagcaccacattcctaacccctaaggcagcacacagagtccaaaaaaaaaaaa

SEQ ID NO: 120473 - DNA, 654 bp, Homo sapiens
  Payload ID: 3614
  Gene Symbol: COCH
  Gene Name: cochlin
  ENST ID: ENST00000557065
  CDS Start-End: 1-168
cccattgctatcacatgttttaccagaggcttggacatcaggaaagagaaagcagatgtcctctgcccagggggctgccctcttgaggaattctctgtgtatgggaacatagtatatgcttctgtatcgagcatatgtggggctgctgtccacagaaggcaaaagtagtacacaggaggccacaggacaagcagtgtccacagcacatccaccaacaggtaaacgactaaagaaaacacccgagaagaaaactggcaataaagattgtaaagcagacattgcatttctgattgatggaagctttaatattgggcagcgccgatttaatttacagaagaattttgttggaaaagtggctctaatgttgggaattggaacagaaggaccacatgtgggccttgttcaagccagtgaacatcccaaaatagaattttacttgaaaaactttacatcagccaaagatgttttgtttgccataaaggaagtaggtttcagagggggtaattccaatacaggaaaagccttgaagcatactgctcagaaattcttcacggtagatgctggagtaagaaaagggatccccaaagtggtggtggtatttattgatggttggccttctgatgacatcgaggaagcaggcattgtggccagaga

SEQ ID NO: 120474 - DNA, 2688 bp, Homo sapiens
  Payload ID: 3614
  Gene Symbol: COCH
  Gene Name: cochlin
  ENST ID: ENST00000460581
  CDS Start-End: 547-1863
gacctagaggggcgctggcctggagcagcgggtcgtctgtgtcctctctcctctgcgccgcgcccggggatccgaagggtgcggggctctgaggaggtgacgcgcggggcctcccgcaccctggccttgcccgcattctccctctctcccaggtgtgagcagcctatcagtcaccatgtccgcagcctggatcccggctctcggcctcggtgggtgcgcgcccctcacgaccccggccccttgctccgctgggtggaggctggagccagccctcacgcttctctcttcgcagctcccattgctatcacatgttttaccagaggcttggacatcaggaaagagaaagcagatgtcctctgcccagggggctgccctcttgaggaattctctgtgtatgggaacatagtatatgcttctgtatcgagcatatgtggggctgctgtccacaggggagtaatcagcaactcagggggacctgtacgagtctatagcctacctggtcgagaaaactattcctcagtagatgccaatggcatccagtctcaaatgctttctagatggtctgcttctttcacagtaactaaaggcaaaagtagtacacaggaggccacaggacaagcagtgtccacagcacatccaccaacaggtaaacgactaaagaaaacacccgagaagaaaactggcaataaagattgtaaagcagacattgcatttctgattgatggaagctttaatattgggcagcgccgatttaatttacagaagaattttgttggaaaagtggctctaatgttgggaattggaacagaaggaccacatgtgggccttgttcaagccagtgaacatcccaaaatagaattttacttgaaaaactttacatcagccaaagatgttttgtttgccataaaggaagtaggtttcagagggggtaattccaatacaggaaaagccttgaagcatactgctcagaaattcttcacggtagatgctggagtaagaaaagggatccccaaagtggtggtggtatttattgatggttggccttctgatgacatcgaggaagcaggcattgtggccagagagtttggtgtcaatgtatttatagtttctgtggccaagcctatccctgaagaactggggatggttcaggatgtcacatttgttgacaaggctgtctgtcggaataatggcttcttctcttaccacatgcccaactggtttggcaccacaaaatacgtaaagcctctggtacagaagctgtgcactcatgaacaaatgatgtgcagcaagacctgttataactcagtgaacattgcctttctaattgatggctccagcagtgttggagatagcaatttccgcctcatgcttgaatttgtttccaacatagccaagacttttgaaatctcggacattggtgccaagatagctgctgtacagtttacttatgatcagcgcacggagttcagtttcactgactatagcaccaaagagaatgtcctagctgtcatcagaaacatccgctatatgagtggtggaacagctactggtgatgccatttccttcactgttagaaatgtgtttggccctataagggagagccccaacaagaacttcctagtaattgtcacagatgggcagtcctatgatgatgtccaaggccctgcagctgctgcacatgatgcaggaatcactatcttctctgttggtgtggcttgggcacctctggatgacctgaaagatatggcttctaaaccgaaggagtctcatgctttcttcacaagagagttcacaggattagaaccaattgtttctgatgtcatcagaggcatttgtagagatttcttagaatcccagcaataatggtaacattttgacaactgaaagaaaaagtacaaggggatccagtgtgtaaattgtattctcataatactgaaatgctttagcatactagaatcagatacaaaactattaagtatgtcaacagccatttaggcaaataagcactcctttaaagccgctgccttctggttacaatttacagtgtactttgttaaaaacactgctgaggcttcataatcatggctcttagaaactcaggaaagaggagataatgtggattaaaaccttaagagttctaaccatgcctactaaatgtacagatatgcaaattccatagctcaataaaagaatctgatacttagaccaaaagcaacattcgttctctaaccattctgtattgattatataagcaaaatgaaaagagaaacttaaatgaacacagctctttaacatggttcaggtacacatattttgacccaagtggatattttcttaaaaccaatcaataatagctagctattactgcagactataaaatctggatatagaaaggagacctgtatcaaactgcttttgtagtgtgttttcataacaacttatgactaaaaatatcacactgaataagagagcaggattgccaggtatttttctatttctctccttaattttatatgtatatagatatatttggcttatattctaagtcacctaagtacttaaaagttaagttggtaaagtatttactgactgcttataaacatttaaagacaaagacatttcaaataactgcagaaaaaatattgtagtttgaatatttaagcaataaaactgctagtgagttattgt

SEQ ID NO: 120475 - DNA, 2129 bp, Homo sapiens
  Payload ID: 3614
  Gene Symbol: COCH
  Gene Name: cochlin
  ENST ID: ENST00000468826
  CDS Start-End: 1-1304
attgtaaagcagacattgcatttctgattgatggaagctttaatattgggcagcgccgatttaatttacagaagaattttgttggaaaagtggctctaatgttgggaattggaacagaaggaccacatgtgggccttgttcaagccagtgaacatcccaaaatagaattttacttgaaaaactttacatcagccaaagatgttttgtttgccataaaggaagtaggtttcagagggggtaattccaatacagatataacattggagaagtatctctttgtaatgctaaaaagaagtgaaaatcaacagacttatctaatgaatgcagatgtggcagaaagaatgagtagcactaccgttgactctgaagagagacttcttagaggaaaagccttgaagcatactgctcagaaattcttcacggtagatgctggagtaagaaaagggatccccaaagtggtggtggtatttattgatggttggccttctgatgacatcgaggaagcaggcattgtggccagagagtttggtgtcaatgtatttatagtttctgtggccaagcctatccctgaagaactggggatggttcaggatgtcacatttgttgacaaggctgtctgtcggaataatggcttcttctcttaccacatgcccaactggtttggcaccacaaaatacgtaaagcctctggtacagaagctgtgcactcatgaacaaatgatgtgcagcaagacctgttataactcagtgaacattgcctttctaattgatggctccagcagtgttggagatagcaatttccgcctcatgcttgaatttgtttccaacatagccaagacttttgaaatctcggacattggtgccaagatagctgctgtacagtttacttatgatcagcgcacggagttcagtttcactgactatagcaccaaagagaatgtcctagctgtcatcagaaacatccgctatatgagtggtggaacagctactggtgatgccatttccttcactgttagaaatgtgtttggccctataagggagagccccaacaagaacttcctagtaattgtcacagatgggcagtcctatgatgatgtccaaggccctgcagctgctgcacatgatgcaggaatcactatcttctctgttggtgtggcttgggcacctctggatgacctgaaagatatggcttctaaaccgaaggagtctcatgctttcttcacaagagagttcacaggattagaaccaattgtttctgatgtcatcagaggcatttgtagagatttcttagaatcccagcaataatggtaacattttgacaactgaaagaaaaagtacaaggggatccagtgtgtaaattgtattctcataatactgaaatgctttagcatactagaatcagatacaaaactattaagtatgtcaacagccatttaggcaaataagcactcctttaaagccgctgccttctggttacaatttacagtgtactttgttaaaaacactgctgaggcttcataatcatggctcttagaaactcaggaaagaggagataatgtggattaaaaccttaagagttctaaccatgcctactaaatgtacagatatgcaaattccatagctcaataaaagaatctgatacttagaccaaaagcaacattcgttctctaaccattctgtattgattatataagcaaaatgaaaagagaaacttaaatgaacacagctctttaacatggttcaggtacacatattttgacccaagtggatattttcttaaaaccaatcaataatagctagctattactgcagactataaaatctggatatagaaaggagacctgtatcaaactgcttttgtagtgtgttttcataacaacttatgactaaaaatatcacactgaataagagagcaggattgccaggtatttttctatttctctccttaattttatatgtatatagatatatttggcttatattctaagtcacctaagtacttaaaagttaagttggtaaagtatttactgactgcttataaacatttaaagacaaagacatttcaaataactgcagaaaaaatattgtagtttgaatatttaagcaataaaactgctagtgagttattgt

SEQ ID NO: 120476 - DNA, 554 bp, Homo sapiens
  Payload ID: 3614
  Gene Symbol: COCH
  Gene Name: cochlin
  ENST ID: ENST00000553772
  CDS Start-End: 57-299
gcactcgggcgcagccgggtggatctcgagcaggtgtgagcagcctatcagtcaccatgtccgcagcctggatcccggctctcggcctcggtgtgtgtctgctgctgctgccggggcccgcgggcagcgagggagccgctcccattgctatcacatgttttaccagaggcttggacatcaggaaagagaaagcagatgtcctctgcccagggggctgccctcttgaggaattctctgtgtatgggaacatagtatatgcttctgtatcgagcatatgtggggctgctgtccacaggtaaacgactaaagaaaacacccgagaagaaaactggcaataaagattgtaaagcagacattgcatttctgattgatggaagctttaatattgggcagcgccgatttaatttacagaagaattttgttggaaaagtggctctaatgttgggaattggaacagaaggaccacatgtgggccttgttcaagccagtgaacatcccaaaatagaattttacttgaaaaactttacatcagccaaagatgttttgtttgccat

SEQ ID NO: 120477 - DNA, 775 bp, Homo sapiens
  Payload ID: 3614
  Gene Symbol: COCH
  Gene Name: cochlin
  ENST ID: ENST00000556908
  CDS Start-End: 195-775
gccgccgaggcgcctcccagacctagaggggcgctggcctggagcagcgggtcgtctgtgtcctctctcctctgcgccgcgcccggggatccgaagggtgcggggctctgaggaggtgacgcgcggggcctcccgcaccctggccttgcccgcattctccctctctcccaggtgtgagcagcctatcagtcaccatgtccgcagcctggatcccggctctcggcctcgctcccattgctatcacatgttttaccagaggcttggacatcaggaaagagaaagcagatgtcctctgcccagggggctgccctcttgaggaattctctgtgtatgggaacatagtatatgcttctgtatcgagcatatgtggggctgctgtccacaggggagtaatcagcaactcagggggacctgtacgagtctatagcctacctggtcgagaaaactattcctcagtagatgccaatggcatccagtctcaaatgctttctagatggtctgcttctttcacagtaactaaaggcaaaagtagtacacaggaggccacaggacaagcagtgtccacagcacatccaccaacaggtaaacgactaaagaaaacacccgagaagaaaactggcaataaagattgtaaagcagacattgcatttctgattgatggaagctttaatattgggcagcgccgatttaatttacagaagaattttgttggaaaagtggctctaatgttgggaattggaacagaaggaccacatgtgggccttgttcaagccag

SEQ ID NO: 120478 - DNA, 782 bp, Homo sapiens
  Payload ID: 3614
  Gene Symbol: COCH
  Gene Name: cochlin
  ENST ID: ENST00000555881
  CDS Start-End: 177-782
agacctagaggggcgctggcctggagcagcgggtcgtctgtgtcctctctcctctgcgccgcgcccggggatccgaagggtgcggggctctgaggaggtgacgcgcggggcctcccgcaccctggccttgcccgcattctccctctctcccaggtgtgagcagcctatcagtcaccatgtccgcagcctggatcccggctctcggcctcggtgtgtgtctgctgctgctgccggggcccgcgggcagcgagggagccggtaaacgactaaagaaaacacccgagaagaaaactggcaataaagattgtaaagcagacattgcatttctgattgatggaagctttaatattgggcagcgccgatttaatttacagaagaattttgttggaaaagtggctctaatgttgggaattggaacagaaggaccacatgtgggccttgttcaagccagtgaacatcccaaaatagaattttacttgaaaaactttacatcagccaaagatgttttgtttgccataaaggaagtaggtttcagagggggtaattccaatacaggaaaagccttgaagcatactgctcagaaattcttcacggtagatgctggagtaagaaaagggatccccaaagtggtggtggtatttattgatggttggccttctgatgacatcgaggaagcaggcattgtggccagagagtttggtgtcaatgtatttatagtttctgtggccaagcctatccctgaagaactggggatggttcaggatgtcacatttgttgacaag

SEQ ID NO: 120479 - DNA, 4637 bp, Homo sapiens
  Payload ID: 3615
  Gene Symbol: CDAN1
  Gene Name: codanin 1
  Uniprot ID: Q8IWY9
  ENST ID: ENST00000356231
  CDS Start-End: 25-3708
tcgccccagagcgccccgaccgggatggcggccgttttggagtcgctgctgcgagaagaggtgtcggtcgcagccgtcgtgcggtggatcgcgcgcagcacccagggttcggaggataacgctggggaggcggccgcgctgagctcactccgggccctgcggaaagaattcgtaccgttcctgttgaacttcctgagggagcagagcagccgcgtcctcccgcaggggcccccgacccccgccaagaccccgggcgcctcggcagccttgccagggaggccgggaggcccgccgcggggtagccgcggggcgcgcagccagcttttccctccgaccgaggcccagagcaccgctgccgaggcccctctggcccgccgcgggggcaggaggcggggcccggggccggcccgcgagcgtggaggccgcggcctggaggagggggtcagcggggagagcctgcccggagccgggggccggaggcttaggggctctggcagccccagccgccccagcctcacgctgtctgatccgccaaacctcagcaacctggaggagttccctcccgtaggctcggttccccccggccctacagggacgaagccttctcgcaggatcaacccaactccggtgagcgaagagcggtcactctccaagcccaagacctgcttcacctcacccccaatcagctgtgtccccagttcccaaccctcagccctggacactagcccttggggccttggccttcccccagggtgcagaagtctgcaagaggagcgagagatgctcaggaaggagcgctctaagcagctgcagcagtcacctacccccacctgtcccaccccagaattggggtcgcccctccccagccggacaggaagcctcacagatgaacctgcagaccctgccagagtgtcttcccgccagcgcctggagcttgtagcccttgtttactcctcgtgcattgctgagaacctggtaccaaacctcttcttggagcttttcttcgtctttcagctcctcactgcccggaggatggtgactgccaaggacagcgaccctgaactaagtccagctgtcctagattccctggaaagtccactgttccaaagcatccacgattgtgtcttctttgcagtgcaggttttggagtgtcactttcaggttctttccaacctggacaaagggaccttgaagctgctggctgagaatgagcggctgctgtgcttctcaccagctctgcaaggccgccttcgagctgcctatgagggcagtgttgccaaggtctctctggtgatgcctccctctactcaagctgtctcctttcagccagagactgacaatcgtgccaacttctccagtgaccgagcctttcatacttttaagaaacagagggatgtgttttatgaggtgctgcgagagtgggaagatcaccatgaggagcctggctgggattttgagaagggcttgggcagcagaatcagggccatgatgggtcagctctccgcagcctgcagccacagccactttgttcggcttttccaaaaacaactactccagatgtgtcagagccctggtggtgctgggggcaccgtcttgggcgaggccccagatgtgttgagtatgctgggagctgacaagctggggcggttgtggcgcctacaggaacggcttatggctcctcagagcagtggggggccctgcccaccccccaccttcccaggctgtcaaggcttctttagggacttcatccttagtgccagcagcttccagtttaaccagcatctcatggacagtctgagcttgaagatccaggagctcaatggtcttgccctgccccagcatgagcccaatgatgaagacggggagtcagacgtagactggcagggtgagcggaagcaatttgctgtggtgcttcttagcctgagacttttggctaaattcctgggctttgtggctttcctgccataccgggggcctgaacctcccccgaccggtgagcttcaggactccattctggccctcaggagccaggtccctccggtcctggatgtgcggactctgctgcagcgagggctgcaggcccgccgggcggtgctcaccgtgccctggctggtggagtttctctcctttgctgaccatgttgttcccttgctggaatattaccgggacatcttcactctcctgctgcgcctgcaccggagcttggtgttgtcgcaggagagtgaggggaagatgtgtttcctgaacaagctgctgctacttgctgtcctgggctggcttttccagattcccacagtccctgaggacttgttctttctggaagagggtccctcatatgcctttgaggtggacacagtagccccagagcatggcttggacaatgcgcctgtggtggaccagcagctgctctacacctgctgcccctacatcggagagctccggaaactgctcgcttcgtgggtgtcaggcagtagtggacggagtgggggcttcatgaggaaaatcacccccaccactaccaccagcctgggagcccagccttcccagaccagccaggggctgcaggcacagctcgcccaggcctttttccacaaccagccgccctccttgcgccggaccgtagagttcgtggcagaaagaattggatcaaactgtgtcaaacatatcaaggctacactggtggcagatctggtgcgccaggcagagtcacttctccaagagcagctggtgacacagggagaggaagggggagacccagcccagctgttggagatcttgtgttcccagctgtgccctcacggggcccaggcattggccctggggcgggagttctgtcaaaggaagagccctggggctgtgcgggcgctgcttccagaggagaccccggcagccgttctgagcagtgcagagaacattgctgtggggcttgcaacagagaaagcctgtgcttggctgtcagccaacatcacagcactgatcaggagggaggtgaaagcagcagtgagtcgcacacttcgagcccagggtcctgaacctgctgcccggggggagcggaggggctgctcccgcgcctgtgagcaccatgctcccctcccctcccacctcatctccgagataaaagacgtgctctccttggccgtggggccacgggaccctgacgagggagtctccccagagcatctggaacagctcctaggccagctgggccagacgctgcggtgccgccagttcctgtgcccacctgctgagcagcatctggcaaagtgctctgtggagttagcttccctcctcgttgcagatcaaattcctatcctagggcccccggcacagtacaggctggagagagggcaggctcgaaggcttctgcacatgctgctttccttgtggaaggaagactttcaggggccggttccgctgcagctgctgctgagcccaagaaatgtggggcttctggcagacacaaggccaagggagtgggacttgctgctattcttgctacgggagctggtggagaagggtctgatgggacggatggagatagaggcctgcctgggcagcctccaccaggcccagtggccaggggactttgctgaagaattagcaacactgtctaatctgtttctagccgagccccacctgccagaaccccagctaagagcctgtgagttggtgcagccaaaccggggcactgtgctggcccagagctagggctgagaagtggccctgccttgggcattgcaccagaaccctggacccccgcctcacgaggaggcccaagtgcccaatgcagaccctcactggttggggtgtagctgggtctacagtcagacttcctgctctaagggtgtcactgcctggcatcccaccacgcgaatcctagaggaaggagagttggcctgatttgggattatggcagaaaagtccagagatgccagtcctggagtagaagaggtggtgtttgtttatctcttggatactaaatgaaatgaggtgtgtgggcttgtcaacacagaattcaagcctcatttgctatcccagcatctcttaaaactttgtagtcttggaattcatgacagaggcaaatgactcctgcttaacttatgaagaaagttaaaacatgaatcttgggagtctacattttcttatcaccaggagctggactgccatctccttataaatgcctaacacaggccgggtctggtggctcatgcctgtaatcccagcactttgagaggcctgaggtcggcggactgcctgaggtcaggaattcaagaccagcctggccaacatggcaaaaccccatctctactaaaaataaaaaaattattagctgggcatggtggtgtgtgcctgtaatcccagctactcaggaggatgaggcaggagacctgcttgaacctggaggtggaggttgcagtgagccgaggtcgcaccactgcactccagtctgggtaacagagcgagactttctagaaaaagcctaacaaacagataaggtaggactcaaccaactgaaacctgactttccccctgtaccttcagcccctgtgcaggtagtaacctcttgagacctctccctgaccagggaccaagcacagggcatttagagctttttagaataaactggttttctttaa

SEQ ID NO: 120480 - DNA, 2562 bp, Homo sapiens
  Payload ID: 3615
  Gene Symbol: CDAN1
  Gene Name: codanin 1
  ENST ID: ENST00000562465
  CDS Start-End: 1-1044
gtccctccggtcctggatgtgcggactctgctgcagcgagggctgcaggcccgccgggcggtgctcaccgtgccctggctggtggagtttctctcctttgctgaccatgttgttcccttgctggaatattaccgggacatcttcactctcctgctgcgcctgcaccggagcttggtgttgtcgcaggagagtgaggggaagatgtgtttcctgaacaagctgctgctacttgctgtcctgggctggcttttccagattcccacagtccctgaggacttgttctttctggaagagggtccctcatatgcctttgaggtggacacagtagccccagagcatggcttggacaatgcgcctgtggtggaccagcagctgctctacacctgctgcccctacatcggagagctccggaaactgctcgcttcgtgggtgtcaggcagtagtggacggagtgggggcttcatgaggaaaatcacccccaccactaccaccagcctgggagcccagccttcccagaccagccaggggctgcaggcacagctcgcccaggcctttttccacaaccagccgccctccttgcgccggaccgtagagttcgtggcagaaagaattggatcaaactgtgtcaaacatatcaaggctacactggtggcagatctggtgcgccaggcagagtcacttctccaagagcagctggtgacacagggagaggaagggggagacccagcccagctgttggagatcttgtgttcccagctgtgccctcacggggcccaggcattggccctggggcgggagttctgtcaaaggaagagccctggggctgtgcgggcgctgcttccagaggagaccccggcagccgttctgagcagtgcagagaacattgctgtggggcttgcaacagagaaagcctgtgcttggctgtcagccaacatcacagcactgatcaggagggaggtgaaagcagcagtgagtcgcacacttcgagcccagggtcctgaacctgctgcccggggggagcggaggggctgctcccgcgcctgacgtgctctccttggccgtggggccacgggaccctgacgagggagtctccccagagcatctggaacagctcctaggccagctgggccagacgctgcggtgccgccagttcctgtgcccacctgctgagcagcatctggcaaagtgctctgtggagttagcttccctcctcgttgcagatcaaattcctatcctagggcccccggcacagtacaggctggagagagggcaggctcgaaggcttctgcacatgctgctttccttgtggaaggaagactttcaggggccggttccgctgcagctgctgctgagcccaagaaatgtggggcttctggcagacacaaggccaagggagtgggacttgctgctattcttgctacgggagctggtggagaagggtctgatgggacggatggagatagaggcctgcctgggcagcctccaccaggcccagtggccaggggactttgctgaagaattagcaacactgtctaatctgtttctagccgagccccacctgccagaaccccagctaagagcctgtgagttggtgcagccaaaccggggcactgtgctggcccagagctagggctgagaagtggccctgccttgggcattgcaccagaaccctggacccccgcctcacgaggaggcccaagtgcccaatgcagaccctcactggttggggtgtagctgggtctacagtcagacttcctgctctaagggtgtcactgcctggcatcccaccacgcgaatcctagaggaaggagagttggcctgatttgggattatggcagaaaagtccagagatgccagtcctggagtagaagaggtggtgtttgtttatctcttggatactaaatgaaatgaggtgtgtgggcttgtcaacacagaattcaagcctcatttgctatcccagcatctcttaaaactttgtagtcttggaattcatgacagaggcaaatgactcctgcttaacttatgaagaaagttaaaacatgaatcttgggagtctacattttcttatcaccaggagctggactgccatctccttataaatgcctaacacaggccgggtctggtggctcatgcctgtaatcccagcactttgagaggcctgaggtcggcggactgcctgaggtcaggaattcaagaccagcctggccaacatggcaaaaccccatctctactaaaaataaaaaaattattagctgggcatggtggtgtgtgcctgtaatcccagctactcaggaggatgaggcaggagacctgcttgaacctggaggtggaggttgcagtgagccgaggtcgcaccactgcactccagtctgggtaacagagcgagactttctagaaaaagcctaacaaacagataaggtaggactcaaccaactgaaacctgactttccccctgtaccttcagcccctgtgcaggtagtaacctcttgagacctctccctgaccagggaccaagcacagggcatttagagctttttagaataaactggttttctttaacaa

SEQ ID NO: 120481 - DNA, 285 bp, Homo sapiens
  Payload ID: 3615
  Gene Symbol: CDAN1
  Gene Name: codanin 1
  ENST ID: ENST00000563260
  CDS Start-End: 1-285
gccgtcgtgcggtggatcgcgcgcagcacccagggttcggaggtaacagcggtgacacgcccccaggataacgctggggaggcggccgcgctgagctcactccgggccctgcggaaagaattcgtaccgttcctgttgaacttcctgagggagcagagcagccgcgtcctcccgcaggggcccccgacccccgccaagaccccgggcgcctcggcagccttgccagggaggccgggaggcccgccgcggggtagccgcggggcgcgcagccagcttttccctccg

SEQ ID NO: 120482 - DNA, 1652 bp, Homo sapiens
  Payload ID: 3616
  Gene Symbol: COQ10A
  Gene Name: coenzyme Q10A
  Uniprot ID: Q96MF6
  ENST ID: ENST00000308197
  CDS Start-End: 262-1005
ccttccttcctctcccaggcccgagccatggcaacagcgtgacgtgggggtaccgagatctgcgggagcagcggtcccggcttcagttctagcctacccggcagcctggacgggagcaaggcgagaggtgctgccgcctcccgtcgcccctgcgctcagaggtcccgaaccagcccagccgctgcctcttgccgctccgcctttggagtgaggagggcgcagcccgcgtcagaacttagagggccaggcagggtcgcgcgcatggcctgggcgggctcgcggcgggtcccagctgggacgcgcgcggcagccgagcgctgctgccggctctcgctcagcccgggcgcgcaaccggccccgcccccaggccctctgccaccgccgcgaccaatgaggtttctgacctcctgcagcctcctcttgcctcgggctgcccagatcttggcggctgaggctggcttaccttcgagccgttccttcatgggatttgctgctcccttcaccaacaagcgaaaggcttactcggagcgtagaatcatggggtactcaatgcaggagatgtatgaggtggtgtccaacgtccaggagtatcgtgagtttgtgccctggtgtaagaagtctctggtggtatccagccgtaagggtcatttgaaagcccagctggaggttggctttccacctgtcatggaacgttacacctctgcagtttccatggtcaaacctcacatggtcaaggctgtttgtactgatggcaagctcttcaaccacttagagactatttggcgattcagccctggtattcctgcctatcctcgaacctgcactgtggacttttcgatttcctttgaatttcgttctctgctgcactcccagctggccaccatgttttttgatgaggttgtcaaacagaatgttgctgcctttgagcgtcgggcagccaccaagtttggtccagaaacagccatcccccgtgaactgatgttccatgaggtgcaccagacttgaggcaagggattgctccctgacctcccttctaccccacttccctacacaattctcttatttatttggtttggctcctgttccaatttgaaaggagtctgtgttcataatactgtttctcctctcaatttcccagaaattgggttctatgctggctggaaatgttgggggaaagagaaggcaaaggatgtggaaatgagatgtgcttaggaaagggtcaggcccatcgtaggagcaccatatgcctgcagccttttcactacgaattagaataaggactatgtggttgtctctggaccttatcaagacaccttagtgtctgaccaggggacgatagtaacttttctaaggattgaataaattgagcttttcttctggcacagaggtactgagtggtaagtaacttttaccctgcctgagattcctcaggagaaaaggcaacctgcctccagcctgaaatacataaagcctcattttaagactgtaagtccatgctgcctggctactagagagcaaggggctttcttaccaccagtgctgaggagaaaagtactgaacggaaacggagttgtctttgtactcttgagttgtaccttattcttccacttggcctgagtttttataaaatttcaataaattgtgacagtgtg

SEQ ID NO: 120483 - DNA, 1410 bp, Homo sapiens
  Payload ID: 3616
  Gene Symbol: COQ10A
  Gene Name: coenzyme Q10A
  Uniprot ID: Q96MF6
  ENST ID: ENST00000433805
  CDS Start-End: 114-761
gggggtcgctgcgaaccccggggttccgcggtggaggggtgctatactgggatgcaggcgcggcggggactggcagcaatcatgccctgggagctaacgtagagctttggataatgcttttgcaagttgtacgagaagggaagttctcggggtttctgacctcctgcagcctcctcttgcctcgggctgcccagatcttggcggctgaggctggcttaccttcgagccgttccttcatgggatttgctgctcccttcaccaacaagcgaaaggcttactcggagcgtagaatcatggggtactcaatgcaggagatgtatgaggtggtgtccaacgtccaggagtatcgtgagtttgtgccctggtgtaagaagtctctggtggtatccagccgtaagggtcatttgaaagcccagctggaggttggctttccacctgtcatggaacgttacacctctgcagtttccatggtcaaacctcacatggtcaaggctgtttgtactgatggcaagctcttcaaccacttagagactatttggcgattcagccctggtattcctgcctatcctcgaacctgcactgtggacttttcgatttcctttgaatttcgttctctgctgcactcccagctggccaccatgttttttgatgaggttgtcaaacagaatgttgctgcctttgagcgtcgggcagccaccaagtttggtccagaaacagccatcccccgtgaactgatgttccatgaggtgcaccagacttgaggcaagggattgctccctgacctcccttctaccccacttccctacacaattctcttatttatttggtttggctcctgttccaatttgaaaggagtctgtgttcataatactgtttctcctctcaatttcccagaaattgggttctatgctggctggaaatgttgggggaaagagaaggcaaaggatgtggaaatgagatgtgcttaggaaagggtcaggcccatcgtaggagcaccatatgcctgcagccttttcactacgaattagaataaggactatgtggttgtctctggaccttatcaagacaccttagtgtctgaccaggggacgatagtaacttttctaaggattgaataaattgagcttttcttctggcacagaggtactgagtggtaagtaacttttaccctgcctgagattcctcaggagaaaaggcaacctgcctccagcctgaaatacataaagcctcattttaagactgtaagtccatgctgcctggctactagagagcaaggggctttcttaccaccagtgctgaggagaaaagtactgaacggaaacggagttgtctttgtactcttgagttgtaccttattcttccacttggcctgagtttttataaaatttcaataaattgtgacagtgtgaa

SEQ ID NO: 120484 - DNA, 1369 bp, Homo sapiens
  Payload ID: 3616
  Gene Symbol: COQ10A
  Gene Name: coenzyme Q10A
  Uniprot ID: Q96MF6
  ENST ID: ENST00000546544
  CDS Start-End: 30-722
aaagcttgtttggacgaccttcgtctgggatgcactcttcttctccttcacctacaaatgatagaggattacgaagaactatacggttggctcctctttcctttggccttaggtttctgacctcctgcagcctcctcttgcctcgggctgcccagatcttggcggctgaggctggcttaccttcgagccgttccttcatgggatttgctgctcccttcaccaacaagcgaaaggcttactcggagcgtagaatcatggggtactcaatgcaggagatgtatgaggtggtgtccaacgtccaggagtatcgtgagtttgtgccctggtgtaagaagtctctggtggtatccagccgtaagggtcatttgaaagcccagctggaggttggctttccacctgtcatggaacgttacacctctgcagtttccatggtcaaacctcacatggtcaaggctgtttgtactgatggcaagctcttcaaccacttagagactatttggcgattcagccctggtattcctgcctatcctcgaacctgcactgtggacttttcgatttcctttgaatttcgttctctgctgcactcccagctggccaccatgttttttgatgaggttgtcaaacagaatgttgctgcctttgagcgtcgggcagccaccaagtttggtccagaaacagccatcccccgtgaactgatgttccatgaggtgcaccagacttgaggcaagggattgctccctgacctcccttctaccccacttccctacacaattctcttatttatttggtttggctcctgttccaatttgaaaggagtctgtgttcataatactgtttctcctctcaatttcccagaaattgggttctatgctggctggaaatgttgggggaaagagaaggcaaaggatgtggaaatgagatgtgcttaggaaagggtcaggcccatcgtaggagcaccatatgcctgcagccttttcactacgaattagaataaggactatgtggttgtctctggaccttatcaagacaccttagtgtctgaccaggggacgatagtaacttttctaaggattgaataaattgagcttttcttctggcacagaggtactgagtggtaagtaacttttaccctgcctgagattcctcaggagaaaaggcaacctgcctccagcctgaaatacataaagcctcattttaagactgtaagtccatgctgcctggctactagagagcaaggggctttcttaccaccagtgctgaggagaaaagtactgaacggaaacggagttgtctttgtactcttgagttgtaccttattcttccacttggcctgagtttttataaaatttcaataaattgtgacagtgtg

SEQ ID NO: 120485 - DNA, 793 bp, Homo sapiens
  Payload ID: 3616
  Gene Symbol: COQ10A
  Gene Name: coenzyme Q10A
  ENST ID: ENST00000553234
  CDS Start-End: 1-461
gacctcctgcagcctcctcttgcctcgggctgcccagatcttggcggctgaggctggcttaccttcgagccgttccttcatgggatttgctgctcccttcaccaacaagcgaaaggcttactcggagcgtagaatcatggggtactcaatgcaggagatgtatgaggtggtgtccaacgtccaggagtatcgctgtttgtactgatggcaagctcttcaaccacttagagactatttggcgattcagccctggtattcctgcctatcctcgaacctgcactgtggacttttcgatttcctttgaatttcgttctctgctgcactcccagctggccaccatgttttttgatgaggttgtcaaacagaatgttgctgcctttgagcgtcgggcagccaccaagtttggtccagaaacagccatcccccgtgaactgatgttccatgaggtgcaccagacttgaggcaagggattgctccctgacctcccttctaccccacttccctacacaattctcttatttatttggtttggctcctgttccaatttgaaaggagtctgtgttcataatactgtttctcctctcaatttcccagaaattgggttctatgctggctggaaatgttgggggaaagagaaggcaaaggatgtggaaatgagatgtgcttaggaaagggtcaggcccatcgtaggagcaccatatgcctgcagccttttcactacgaattagaataaggactatgtggttgtctctggaccttatcaagacaccttagtgtctgaccaggggacgat

SEQ ID NO: 120486 - DNA, 410 bp, Homo sapiens
  Payload ID: 3616
  Gene Symbol: COQ10A
  Gene Name: coenzyme Q10A
  ENST ID: ENST00000551814
  CDS Start-End: 1-194
ctcgaacctgcactgtggacttttcgatttcctttgaatttcgttctctgctgcactcccagctggccaccatgttttttgatgaggttgtcaaacagaatgttgctgcctttgagcgtcgggcagccaccaagtttggtccagaaacagccatcccccgtgaactgatgttccatgaggtgcaccagacttgagaaattgggttctatgctggctggaaatgttgggggaaagagaaggcaaaggatgtggaaatgagatgtgcttaggaaagggtcaggcccatcgtaggagcaccatatgcctgcagccttttcactacgaattagaataaggactatgtggttgtctctggaccttatcaagacaccttagtgtctgaccaggggacgatagtaacttttctaagg

SEQ ID NO: 120487 - DNA, 2239 bp, Homo sapiens
  Payload ID: 3617
  Gene Symbol: COQ10B
  Gene Name: coenzyme Q10B
  Uniprot ID: Q9H8M1
  ENST ID: ENST00000263960
  CDS Start-End: 139-855
aagaaggggcgtgtcaggctgcgcaggcggccagtccattggctggaagagaccggagccgggctccgggcccgaccagaggagggcggtgctgcagggctggtccgggaggtgacgaccggcttcggagagtctatcatggcagctcggactggtcatacggccttgagaagggtagtctcgggatgccgtccgaagtcggcgacagcggccggggcgcaggcgcccgtgcggaatggcagatatttagcttcctgtggtatactgatgagcagaactcttccactacatacctcaattttgcctaaggagatatgtgcacgaactttcttcaaaatcactgcaccattaataaacaaaaggaaagaatattcagagagaagaattttaggatattcaatgcaggaaatgtatgatgtagtatcgggagtggaggattacaagcattttgttccttggtgcaaaaaatcagatgttatatcaaagagatctggatattgtaaaacaagattagaaattggatttccacctgtgttggagcgatatacatcagtagtaaccttggtgaaacctcatttagtaaaggcatcttgtactgatgggagacttttcaatcatttggagactatttggcgttttagcccaggtcttcctggctacccaagaacttgtaccttggatttttcaatttcttttgaatttcgatcacttctacattcccagcttgccacactcttttttgatgaagttgtgaagcagatggtagctgcctttgaaagaagagcatgtaagctgtatggtccagaaacaaatatacctcgggagttaatgcttcatgaagtccatcacacataaaggcaaaaaagaactggtgccacctgcttctgactttagtttgttcacttttaggaagtattttcatgacatgttttcagaagccagaaagcatttgttaaacgcagctttggttataaacctgcaccattgaaaatttgcacatagaatatagactcacttgtacatagaattatttcttcaagtataattcaaaataatatggacattatcatgttctgcattacaataatgggatgtcatcaccattgctagaatactggcatgattcttctgagcagaagttgaaactgtaaatttaaaccttttaattatcaccttacctgaaagaggttagttaagatattcacacagtatgtattatattaaccatatcacacttaagttattaaattcagactatttgtaacttattgttatagggcctgccgtatggcttaggatatttgagtaatcatatatttaaagtaaaaactttgggctgggcacagtggctcacacctgtaatcccagcacttggggaagctgaggtgggcagatcagttgaggtcaggagttctagaccagcctggtcaacatggcgaaaccccatctctactaaaaatacaaaaattagctgggcgtggtggcacacacctgtaatcccagttacttgggaggctgaggcacaagaatcgcttgaacccgggaggcggaggttgcagttagccaagatcgccctgctgcactccagcctgggcaacagagggagactctgtctccaaaaacaaaaacaaaaactgttagtgaaggttccctgggacttttgatattttaaaaattgttcttatgactagtagataaattcattgccataatgaggctagctcccagataaacagtgtattttcttctttttttttttttttttggtgagtggtccagagctttaagctacttttccagtagtttgccactttctccgaggtagtttggctgctctttcagtaatgctaattgtgtgtcaaattttgtctacaacagtaggcaacagatgaagataagttggttgaatgtctccagcactatgcatccctattttctatttattgtgtacactcactttcagtaatgtgtttcaaactggtattttttaaaaaacaaatcaatgtaaggactgaagttgaagtagcaatgtaataaagttaatttgtttattttttgtacagttagtttggttattgaaatcttcctatattgtttaaatgtgtatttgcatagacatagtaaagtgttacagcatttcatgtcttaaaaatatctatgaagatatctaaaatatctatttctatgaagaaacagactttaacaaatataagcaaaattcagttttcttttaaccagt

SEQ ID NO: 120488 - DNA, 879 bp, Homo sapiens
  Payload ID: 3617
  Gene Symbol: COQ10B
  Gene Name: coenzyme Q10B
  ENST ID: ENST00000409398
  CDS Start-End: 69-635
cccgaccagaggagggcggtgctgcagggctggtccgggaggtgacgaccggcttcggagagtctatcatggcagctcggactggtcatacggccttgagaagggtagtctcgggatgccgtccgaagtcggcgacagcggccggggcgcaggcgcccgtgcggaatggcagatattcaatgcaggaaatgtatgatgtagtatcgggagtggaggattacaagcattttgttccttggtgcaaaaaatcagatgttatatcaaagagatctggatattgtaaaacaagattagaaattggatttccacctgtgttggagcgatatacatcagtagtaaccttggtgaaacctcatttagtaaaggcatcttgtactgatgggagacttttcaatcatttggagactatttggcgttttagcccaggtcttcctggctacccaagaacttgtaccttggatttttcaatttcttttgaatttcgatcacttctacattcccagcttgccacactcttttttgatgaagttgtgaagcagatggtagctgcctttgaaagaagagcatgtaagctgtatggtccagaaacaaatatacctcgggagttaatgcttcatgaagtccatcacacataaaggcaaaaaagaactggtgccacctgcttctgactttagtttgttcacttttaggaagtattttcatgacatgttttcagaagccagaaagcatttgttaaacgcagctttggttataaacctgcaccattgaaaatttgcacatagaatatagactcacttgtacatagaattatttcttcaagtataattcaaaataatatggacattatcatgttctgcattacaataatgggatgtcatc

SEQ ID NO: 120489 - DNA, 1355 bp, Homo sapiens
  Payload ID: 3617
  Gene Symbol: COQ10B
  Gene Name: coenzyme Q10B
  ENST ID: ENST00000409010
  CDS Start-End: 237-869
ttttttttgcgtttggcatctgagggactcaagagcggcgcgcatcaccttgggcccaaggctgtgttcgtggctcgtttgcctcgtgagaggcggtgaatcatcggcgaagcgactttggaagcaatttggccattggtgcctttgggctcttccggtctcctcccctatggcttgttgctactgctgttggaaagttttaactttgcgcagaagggttgccggctgctggctgtatgggagtttgtgtttggcgatatttagcttcctgtggtatactgatgagcagaactcttccactacatacctcaattttgcctaaggagatatgtgcacgaactttcttcaaaatcactgcaccattaataaacaaaaggaaagaatattcagagagaagaattttaggatattcaatgcaggaaatgtatgatgtagtatcgggagtggaggattacaagcattttgttccttggtgcaaaaaatcagatgttatatcaaagagatctggatattgtaaaacaagattagaaattggatttccacctgtgttggagcgatatacatcagtagtaaccttggtgaaacctcatttagtaaaggcatcttgtactgatgggagacttttcaatcatttggagactatttggcgttttagcccaggtcttcctggctacccaagaacttgtaccttggatttttcaatttcttttgaatttcgatcacttctacattcccagcttgccacactcttttttgatgaagttgtgaagcagatggtagctgcctttgaaagaagagcatgtaagctgtatggtccagaaacaaatatacctcgggagttaatgcttcatgaagtccatcacacataaaggcaaaaaagaactggtgccacctgcttctgactttagtttgttcacttttaggaagtattttcatgacatgttttcagaagccagaaagcatttgttaaacgcagctttggttataaacctgcaccattgaaaatttgcacatagaatatagactcacttgtacatagaattatttcttcaagtataattcaaaataatatggacattatcatgttctgcattacaataatgggatgtcatcaccattgctagaatactggcatgattcttctgagcagaagttgaaactgtaaatttaaaccttttaattatcaccttacctgaaagaggttagttaagatattcacacagtatgtattatattaaccatatcacacttaagttattaaattcagactatttgtaacttattgttatagggcctgccgtatggcttaggatatttgagtaatcatatatttaaagtaaaaactttgggctggg

SEQ ID NO: 120490 - DNA, 1641 bp, Homo sapiens
  Payload ID: 3618
  Gene Symbol: COQ2
  Gene Name: coenzyme Q2 4-hydroxybenzoate polyprenyltransferase
  Uniprot ID: Q96H96
  ENST ID: ENST00000311469
  CDS Start-End: 1-1266
atgaccccaatttcacaagtaaggatgaggaaaggttctgcccacaccgccgcccagcctggcagactaggattgcatcctgcgggtgccactgcgcatgcctgccggggaatgacgtcaatccgagctcgtcccggcctcaccagcgccatgctgggctcgcgagccgcggggttcgcgcggggcctgcgggctgtggcactggcgtggctgccgggctggcggggccgctccttcgccctggcgcgtgcggcaggcgcgccccacggtggtgacttgcagccccccgcctgtcccgagccgcgcgggcgccagctcagtttgtccgcggcggcggtggtggactctgcgccccgccccctgcagccgtacttgcgcctcatgcggttggacaagcccattggaacctggcttctgtatttaccatgtacctggagcattggtttggcagctgaaccaggttgttttccagattggtacatgctctccctctttggcactggagctattctgatgcgtggagcaggctgtactattaatgacatgtgggaccaggactatgataaaaaggttacaagaacagccaatcgtccaatagccgctggagacatttcaacttttcagtcctttgtttttcttgggggacagctaaccctggcactgggtgttcttctgtgtctaaattactacagtatagctctgggagcaggatccttacttcttgtcatcacctacccactaatgaaaagaatttcatactggcctcaactagccttgggcttgacatttaattggggagcgttacttggatggtctgctatcaagggttcctgtgatccatctgtttgcctgcctctttatttttctggagttatgtggacactaatatatgatactatttatgcccatcaggacaaaagagatgatgttttgattggtcttaagtcaacggctctgcggttcggagaaaataccaagccgtggctcagcggcttcagtgttgcaatgctgggggcactgagcctagtgggtgtgaacagtggacagactgctccctactacgctgccctgggtgctgtaggagcccatctgactcaccagatttacactctagacatccacagacctgaggattgttggaataaatttatctccaaccgaacactgggactaatagtttttttagggattgtccttgggaatttgtggaaagaaaagaagacagacaaaacaaagaagggtatagagaataaaatagaaaattaatgaatgaaatttatctaggaatttttaaaacattttttacaaaatataattagatttgaatacaaaatctgatacaatatgttaaagaattaagaacctgaagatgaagatttagagcatatttacctggattttacttatttgctagcaaaattcccccttgtcacagaaaccagggactcttcaggatttgagatggccttgagtattttagttgatacattcttctgcccattataattctcacctgaagttatggggattgcacgggttttggcactttagaaaaagcctgatgtgggtcttacataaatgaatgtctgtataagaaaatggactcttttttttagggaaaaataaaagcaactatgggaa

SEQ ID NO: 120491 - DNA, 1464 bp, Homo sapiens
  Payload ID: 3618
  Gene Symbol: COQ2
  Gene Name: coenzyme Q2 4-hydroxybenzoate polyprenyltransferase
  ENST ID: ENST00000311461
  CDS Start-End: 2-988
catgctgggctcgcgagccgcggggttcgcgcggggcctgcgggctgtggcactggcgtggctgccgggctggcggggccgctccttcgccctggcgcgtgcggcaggcgcgccccacggtggtgacttgcagccccccgcctgtcccgagccgcgcgggcgccagctcagtttgtccgcggcggcggtggtggactctgcgccccgccccctgcagccgtacttgcgcctcatgcggttggacaagcccattggaacctggcttctgtatttaccatgtacctggagcattggtttggcagctgaaccaggttgttttccagattggtacatgctctccctctttggcactggagctattctgatgcgtggagcaggctgtactattaatgacatgtgggaccaggactatgataaaaaggttacaagaacagccaatcgtccaatagccgctggagacatttcaacttttcagtcctttgtttttcttgggggacagctaaccctggcactgggtgttcttctgtgtctaaattactacagtatagctctgggagcaggatccttacttcttgtcatcacctacccactaatgaaaagaatttcatactggcctcaactagccttgggcttgacatttaattggggagcgttacttggatggtctgctatcaagggttcctgtgatccatctgtttgcctgcctctttatttttctggagttatgtggacactaatatatgatactatttatgcccatcaggacaaaagagatgatgttttgattggtcttaagtcaacggctctgcggttcggagaaaataccaagccgtggctcagcggcttcagtgttgcaatgctgggggcactgagcctagtgggtgtgaacagtggacagactgctccctactacgctgccctgggtgctgtaggagcccatctgactcaccagaaatggggtcttgagattttgcccaggctggtctgaaattcctggcttcaagcaatcttcctgccctggtctcccaaaagtgctgggattaccagtgtgagctaccaaccccagccaaggtatattattttttaaaaataatataggcctaaatccaaattttcccatctgattttcctggaattacttctgattcatgtctggaaaaatttcagtgatatctgaagcttgtggtttgagttgaattactctaaaagcaaactgacagataaagcttttaaaaaaaaatctgggtttctagtgatggttagtagactaattattcataaatttggtttctgctggcataaagaccaaggacagataagacatgaaatgcggaacatgtcaaagttctgccagtagagagcaggaagctgtcatttcaggatattcacccacaccacatcccctacctgtcagaaacttatgttgagaatctacattgttgacttgtaaatgaatgaactaaa

SEQ ID NO: 120492 - DNA, 1304 bp, Homo sapiens
  Payload ID: 3618
  Gene Symbol: COQ2
  Gene Name: coenzyme Q2 4-hydroxybenzoate polyprenyltransferase
  ENST ID: ENST00000503391
  CDS Start-End: 32-673
aatccgagctcgtcccggcctcaccagcgccatgctgggctcgcgagccgcggggttcgcgcggggcctgcgggctgtggcactggcgtggctgccgggctggcggggccgctccttcgccctggcgcgtgcggcaggcgcgccccacggtggtgacttgcagccccccgcctgtcccgagccgcgcgggcgccagctcagtttgtccgcggcggcggtggtggactctgcgccccgccccctgcagccgtacttgcgcctcatgcggttggacaagcccattggaacctggcttctgtatttaccatgtacctggagcattggtttggcagctgaaccaggttgttttccagattggtacatgctctccctctttggcactggagctattctgatgcgtggagcaggctgtactattaatgacatgtgggaccaggactatgataaaaaggttacaagaacagccaatcgtccaatagccgctggagacatttcaacttttcagtcctttgtttttcttgggggacagctaaccctggcactgggtgttcttctgtgtctaaattactacagtatagctctgggagcaggatccttacttcttgtcatcacctacccactaatgaaaagaatttcatactggcctcaactagccttgggacaaaagagatgatgttttgattggtcttaagtcaacggctctgcggttcggagaaaataccaagccgtggctcagcggcttcagtgttgcaatgctgggggcactgagcctagtgggtgtgaacagtggacagactgctccctactacgctgccctgggtgctgtaggagcccatctgactcaccagatacgaccctatattttaaaatgcttaaaacatcttaacccattgcactggttccaattaaagaaggagcacttggtgggtgccagtggagcaggagctgtgaatgccagtcacagccacagcttgccagggttggaatctgctttaacacctatcagttgggtgatcttgggcaagttccctgacctctctgtggctcactcggggataatcataatacctttctcatgcatttcaaaattttctgtcttcccctgcgaatggagatttcatggtaagtgggaccttgtttgtcttattcattgaaatatccccaatataccatatcacaagggctgcctctccctcttcccggatttctttgctaaattgtttaatgcctctacctgatttttataatctggcctcaccctaatgtttcctccaactgaaagtacaccctccaccctctgggtg

SEQ ID NO: 120493 - DNA, 1301 bp, Homo sapiens
  Payload ID: 3618
  Gene Symbol: COQ2
  Gene Name: coenzyme Q2 4-hydroxybenzoate polyprenyltransferase
  ENST ID: ENST00000503915
  CDS Start-End: 1-678
ggttgttttccagattggtacatgctctccctctttggcactggagctattctgatgcgtggagcaggctgtactattaatgacatgtgggaccaggactatgataaaaaggttacaagaacagccaatcgtccaatagccgctggagacatttcaacttttcagtcctttgtttttcttgggggacagctaaccctggcactgggtgttcttctgtgtctaaattactacagtatagctctgggagcaggatccttacttcttgtcatcacctacccactaatgaaaagaatttcatactggcctcaactagccttgggcttgacatttaattggggagcgttacttggatggtctgctatcaagggttcctgtgatccatctgtttgcctgcctctttatttttctggagttatgtggacactaatatatgatactatttatgcccatcaggacaaaagagatgatgttttgattggtcttaagtcaacggctctgcggttcggagaaaataccaagccgtggctcagcggcttcagtgttgcaatgctgggggcactgagcctagtgggtgtgaacagtggacagactgctccctactacgctgccctgggtgctgtaggagcccatctgactcaccagaaatggggtcttgagattttgcccaggctggtctgaaattcctggcttcaagcaatcttcctgccctggtctcccaaaagtgctgggattaccagtgtgagctaccaaccccagccaagatttacactctagacatccacagacctgaggattgttggaataaatttatctccaaccgaacactgggactaatagtttttttagggattgtccttgggaatttgtggaaagaaaagaagacagacaaaacaaagaagggtatagagaataaaatagaaaattaatgaatgaaatttatctaggaatttttaaaacattttttacaaaatataattagatttgaatacaaaatctgatacaatatgttaaagaattaagaacctgaagatgaagatttagagcatatttacctggattttacttatttgctagcaaaattcccccttgtcacagaaaccagggactcttcaggatttgagatggccttgagtattttagttgatacattcttctgcccattataattctcacctgaagttatggggattgcacgggttttggcactttagaaaaagcctgatgtgggtcttacataaatgaatgtctgtataagaaaatggactcttttttttagggaaaaataaaagcaactatgggaa

SEQ ID NO: 120494 - DNA, 1335 bp, Homo sapiens
  Payload ID: 3619
  Gene Symbol: COQ3
  Gene Name: coenzyme Q3 methyltransferase
  Uniprot ID: Q9NZJ6
  ENST ID: ENST00000254759
  CDS Start-End: 26-1135
aaaagaggtgggatcgtttgtcgcgatgtggagtggccgtaagctgggctcctccgggggttggtttttaagagtgctggggcctggaggctgtaatacaaaagctgcgcgtcccttaatttcctcggcggtttatgtgaagaaccagctcagtgggactctacagattaaaccaggggttttcaatgaatacagaaccatatggttcaaatcctacaggacgatcttttcctgtttgaacagaataaagagtttcaggtacccttgggcgagactgtacagtacttcccaaaccactgtcgacagcggtgaggtaaaaaccttcttggccctggctcacaaatggtgggatgaacaaggagtatatgcacctcttcattccatgaatgacctgagggtgccatttattagggacaatcttctgaaaacaattcctaatcaccagccaggaaaacctttgttggggatgaagattcttgacgttggctgtggtggtgggctgttaactgaacctctagggcggcttggggcttcagttattggaatcgaccctgtggatgagaacattaaaacagcacaatgccataaatcatttgatccagtcctggataagagaatagagtacagagtgtgttccctggaagagattgtggaagagactgcagaaacatttgatgctgttgtagcttctgaagttgtagaacatgtgattgatctagaaacatttttacagtgctgctgtcaagtgttaaaacccggtggttctttattcattactacaatcaacaaaacacaactttcctatgccttgggaattgttttttcagagcaaattgcaagtattgtaccaaaaggtactcatacatgggagaagtttgtttcacctgaaacactagagagcattctggaatcaaatggtctgtcagttcaaacagtggtaggaatgctctataaccccttctcaggttactggcattggagtgaaaataccagccttaactatgcagcttatgctgtgaaatccagggtccaggaacacccagcctctgctgagtttgttttaaagggagaaacagaagagctccaagctaatgcctgcaccaatccagctgtgcatgaaaagctgaagaaatgaattgtttctgagaactatagtaatatggcttggatatctgatgttttcaaatacaaaaatgtacaatttatcctttgagagagaatcatgaagaaaagaaggtcaataaaaagggctaaaaccttggacaaaagtttttgttatttcgtctaatagctactttcaagggattctgtgaataaaaagttttgtcaagatat

SEQ ID NO: 120495 - DNA, 646 bp, Homo sapiens
  Payload ID: 3619
  Gene Symbol: COQ3
  Gene Name: coenzyme Q3 methyltransferase
  ENST ID: ENST00000369240
  CDS Start-End: 25-450
cagccaggaaaacctttgttggggatgaagattcttgacgttggctgtggtggtgggctgttaactgaacccggtggttctttattcattactacaatcaacaaaacacaactttcctatgccttgggaattgttttttcagagcaaattgcaagtattgtaccaaaaggtactcatacatgggagaagtttgtttcacctgaaacactagagagcattctggaatcaaatggtctgtcagttcaaacagtggtaggaatgctctataaccccttctcaggttactggcattggagtgaaaataccagccttaactatgcagcttatgctgtgaaatccagggtccaggaacacccagcctctgctgagtttgttttaaagggagaaacagaagagctccaagctaatgcctgcaccaatccagctgtgcatgaaaagctgaagaaatgaattgtttctgagaactatagtaatatggcttggatatctgatgttttcaaatacaaaaatgtacaatttatcctttgagagagaatcatgaagaaaagaaggtcaataaaaagggctaaaaccttggacaaaagtttttgttatttcgtctaatagctactttcaagggattctgtgaataaaaagttttgtcaag

SEQ ID NO: 120496 - DNA, 1182 bp, Homo sapiens
  Payload ID: 3619
  Gene Symbol: COQ3
  Gene Name: coenzyme Q3 methyltransferase
  ENST ID: ENST00000369242
  CDS Start-End: 148-1080
cgggggttggtttttaagagtgctggggcctggaggctgtaatacaaaagctgcgcgtcccttaatttcctcggcggtttatgtgaagaaccagctcagtgggactctacagattaaaccaggggttttcaatgaatacagaaccatatgttcaaatcctacaggacgatcttttcctgtttgaacagaataaagagtttcaggtacccttgggcgagactgtacagtacttcccaaaccactgtcgacagcggtgaggtaaaaaccttcttggccctggctcacaaatggtgggatgaacaaggagtatatgcacctcttcattccatgaatgacctgagggtgccatttattagggacaatcttctgaaaacaattcctaatcaccagccaggaaaacctttgttggggatgaagattcttgacgttggctgtggtggtgggctgttaactgaacctctagggcggcttggggcttcagttattggaatcgaccctgtggatgagaacattaaaacagcacaatgccataaatcatttgatccagtcctggataagagaatagagtacagagtgtgttccctggaagagattgtggaagagactgcagaaacatttgatgctgttgtagcttctgaagttgtagaacatgtgattgatctagaaacatttttacagtgctgctgtcaagtgttaaaacccggtggttctttattcattactacaatcaacaaaacacaactttcctatgccttgggaattgttttttcagagcaaattgcaagtattgtaccaaaaggtactcatacatgggagaagtttgtttcacctgaaacactagagagcattctggaatcaaatggtctgtcagttcaaacagtggtaggaatgctctataaccccttctcaggttactggcattggagtgaaaataccagccttaactatgcagcttatgctgtgaaatccagggtccaggaacacccagcctctgctgagtttgttttaaagggagaaacagaagagctccaagctaatgcctgcaccaatccagctgtgcatgaaaagctgaagaaatgaattgtttctgagaactatagtaatatggcttggatatctgatgttttcaaatacaaaaatgtacaatttatcctttgagagagaatcatgaagaaaagaagg

SEQ ID NO: 120497 - DNA, 1548 bp, Homo sapiens
  Payload ID: 3620
  Gene Symbol: COQ4
  Gene Name: coenzyme Q4
  Uniprot ID: Q9Y3A0
  ENST ID: ENST00000300452
  CDS Start-End: 324-1121
gggaaaaccggctgtggagaaggaaatagggcccggcgctgagtgagcgtggttgcgtgtcctttgcagacactttctggggcgaggtgacatggcgagagtcttggatcggtggacgtagacggtagacagttcgcgtgcgtttccttcgcctacttggcctacatgccttctgcccgtgaagcgatgtttcccctcgaaaggccgtaggctacgccgtcagaatcggtttttcagtgagttttgacccctccgacgctccgtcgcctgacagaatcgcggcgttcttcgtacccgcccatcctccgcggacgcccgctgccatggcgactctgctgcgccctgtcctccgtcggctctgcgggctcccgggcctacagcggcctgcggcagaaatgcccctccgggctaggagcgacggcgccggcccgctatactcgcaccacctccccacctccccgctgcagaaagggctgttggccgccggctccgcggcgatggcgctctataacccctaccgccacgacatggtcgcagttctaggggagaccacaggacaccgcaccctgaaggtcctcagggaccagatgaggagggatccagagggtgcccagatcctgcaggagcgtccccggatttcgacatccaccctcgacctgggcaagctccagagcctgccggaaggctccctcggtcgcgagtatctccgtttcctggatgtgaacagggtctccccagacacccgagcacccacccgcttcgtggatgatgaggagctagcgtatgtgattcagcggtaccgggaggtgcacgacatgcttcacaccctgctggggatgcccaccaacatcctgggggagatcgtggtgaaatggtttgaggctgtccagactggcctgcccatgtgcatcctgggtgcattctttggaccgatccgacttggcgctcagagcctgcaagtgctggtctcggagttgatcccatgggccgttcagaacgggcgcagagccccatgtgtcctcaacctgtactatgagcggcgctgggagcagtccctgagggctctgcgggaggagctgggcattacagcaccacccatgcacgtccagggcttggcctgagctcctgagccagcggggcctggcctacctcccccatcccctgcttcccttggaggcagagggctcccttgactacctttgttcctcttctttgaacactgacccttggacaacatttatcataatttgtcataaccactgctgagtggccttgaggacgaaccccgcagggagcaagcagtacagtggcattcccagggggaccagcagctacccaaggagaaccatgcatgaacagtatcagtcgtctgggctcatgctgggatgtcgcagtgctcctgttgcaactcctcccagccagccaggtttgctgggggccaggctgggtgtcctcacaggagtgagggctacacccaattccaaaagcctgagaagagagaagtggagggggaggcgagtgtgtgaataaaggctcccatcaggtcaa

SEQ ID NO: 120498 - DNA, 928 bp, Homo sapiens
  Payload ID: 3620
  Gene Symbol: COQ4
  Gene Name: coenzyme Q4
  ENST ID: ENST00000372875
  CDS Start-End: 8-463
cgctgccatggcgactctgctgcgccctgtcctccgtcggctctgcgggctcccgggcctacagcggcctgcggcagaaatgcccctccgggctaggagcgacggcgccggcccgctatactcgcaccacctccccacctccccgctgcagaaagggctgttggccgccggctccgcggcgatggcgctctataacccctaccgccacgacatggtcgcagttctaggggagaccacaggacaccgcaccctgaaggtcctcagggaccagatgaggagggatccagagggtgcccagatcctgcaggagcgtccccggatttcgacatccaccctcgacctgggcaagctccagagcctgccggaaggctccctcggtcgcgagtatctccgtttcctggatgtgaacgtgagttttcagctcctgtgtatctggcagtcaccagacaggacagaggaatagcacaggcatgacaccctgaggaaagaggagccctgagctgccaccattggcaggagtgctcttcaggctcatgccaaggctttgtcattttctatgggataggcaaatgggtgggaacatgcctgcaattgataatactggccagtgttcattaacctcgcactgcatgcctgatgccagcctcatccgtgatcttgctgaatccccccacaactctgtcaagtatgttctattattatcctcttttagcagataaggaaacagaggctcagagcagtgaagcaaacttgctaattccacataactggtattaatggagatagtaatcaatcccagatcatgctcttcactgctgtactgtatccctttattccagggacattgctttccctacggtatggcaggtgtggcactctccagcccctccagccccaggcagggaggacaaggagagggggaaagggg

SEQ ID NO: 120499 - DNA, 781 bp, Homo sapiens
  Payload ID: 3620
  Gene Symbol: COQ4
  Gene Name: coenzyme Q4
  ENST ID: ENST00000608951
  CDS Start-End: 278-568
gcgtggttgcgtgtcctttgcagacactttctggggcgaggtgacatggcgagagtcttggatcggtggacgtagacggtagacagttcgcgtgcgtttccttcgcctacttggcctacatgccttctgcccgtgaagcgatgtttcccctcgaaaggccgtaggctacgccgtcagaatcggtttttcagtgagttttgacccctccgacgctccgtcgcctgacagaatcgcggcgttcttcgtacccgcccatcctccgcggacgcccgctgccatggcgactctgctgcgccctgtcctccgtcggctctgcgggctcccgggcctacagcggcctgcggcagaaatgcccctccgggctaggagcgacggcgccggcccgctatactcgcaccacctccccacctccccgctgcagaaagggctgttggccgccggctccgcggcgatggcgctctataacccctaccgccacgattcctggatcccacctaaacgcactgaatctgaatctgaatctgcagtggagggagaaatgggcgtgaaaccgaaagtctgtctttaaactacttgggagaatctgtcatgcagccatattgagaacatctagactaaatagatgattcataagtaccgatcagtttataatatcctactagaaagtcaactccgaggtcgaggaccatgtctgcctcgttccactgcatctgcagccttctggatagtgcctggcacatagtaaatgctcaataaatgtttgctggatgtgtgactagaa

SEQ ID NO: 120500 - DNA, 956 bp, Homo sapiens
  Payload ID: 3620
  Gene Symbol: COQ4
  Gene Name: coenzyme Q4
  ENST ID: ENST00000609948
  CDS Start-End: 316-576
cggctgtggagaaggaaatagggcccggcgctgagtgagcgtggttgcgtgtcctttgcagacactttctggggcgaggtgacatggcgagagtcttggatcggtggacgtagacggtagacagttcgcgtgcgtttccttcgcctacttggcctacatgccttctgcccgtgaagcgatgtttcccctcgaaaggccgtaggctacgccgtcagaatcggtttttcagtgagttttgacccctccgacgctccgtcgcctgacagaatcgcggcgttcttcgtacccgcccatcctccgcggacgcccgctgccatggcgactctgctgcgccctgtcctccgtcggctctgcgggctcccgggcctacagcggcctgcggcagaaatgcccctccgggctaggagcgacggcgccggcccgctatactcgcaccacctccccacctccccgctgcagaaagggctgttggccgccggctccgcggcgatggcgctctataacccctaccgccacggtaaggccgcccgcgcctcgcccccgtgggggcggcttggagccgtttcctgtgggtaactggaacatagcctaggtcggggtacccaaacctggttgcagctcgtaaccactcggaacgtttatgaaaatgcagattcctggatcccacctaaacgcactgaatctgaatctgaatctgcagtggagggagaaatgggcgtgaaaccgaaagtctgtctttaaactacttgggagaatctgtcatgcagccatattgagaacatctagactaaatagatgattcataagtaccgatcagtttataatatcctactagaaagtcaactccgaggtcgaggaccatgtctgcctcgttccactgcatctgcagccttctggatagtgcctggcacatagtaaatgctcaataaatgtttgctggatgtgtgactagaaca

SEQ ID NO: 120501 - DNA, 1535 bp, Homo sapiens
  Payload ID: 3621
  Gene Symbol: COQ5
  Gene Name: coenzyme Q5, methyltransferase
  Uniprot ID: Q5HYK3
  ENST ID: ENST00000288532
  CDS Start-End: 42-1025
aacaaggcgtactctctggccgttgtcactcgactaccaagatggcggcccccgggagctgtgctctatggagctattgcggccgtgggtggtcgcgggcgatgcggggctgccagctcctcgggcttcgtagctcttggcccggggacctactaagtgctcggctcttgtcccaagagaagcgggcagcggaaacgcactttgggtttgagactgtgtcggaagaggagaaggggggcaaagtctatcaggtgtttgaaagtgtggctaagaagtatgatgtgatgaatgatatgatgagtcttggtatccatcgtgtttggaaggatttgctgctctggaagatgcacccgcttcctgggacccagctgcttgatgttgctggaggcacaggtgacattgcattccggttccttaattatgttcagtcccagcatcagagaaaacagaagaggcagttaagggcccaacaaaatttatcctgggaagaaattgccaaagagtaccagaatgaagaagattccttgggcgggtctcgtgtcgtggtgtgtgacatcaacaaggagatgctaaaggttggaaagcagaaagccttggctcaaggatacagagctggacttgcatgggtattaggagatgctgaagaactgccctttgatgatgacaagtttgatatttacaccattgcctttgggatccggaatgtcacacacattgatcaggcactccaggaagctcatcgggtgctgaaaccaggaggacggtttctctgtctggaatttagccaagtgaacaatcccctcatatccaggctttatgatctatatagcttccaggtcatccctgtcctgggagaggtcatcgctggagactggaagtcctatcagtaccttgtagagagtatccgaaggtttccgtctcaggaagagttcaaggacatgatagaagatgcaggctttcacaaggtgacttacgaaagtctaacatcaggcattgtggccattcattctggcttcaaactttaattcctttcctatcatggagcatgaaccagtcatatcctgttgaaagcctggaactgaaggataatctggcaaatgagacagcagcagagcatctcctcttaaggatacgtgccttggactcatgtttgaatcgaacagtctcaaagtggaagaacaaattcttgtcacttttttacagctttctttggagctgcttcagtccatctcccagaggcatttggtctgtatctttgctcaactgctaatttctcttggctgtagggtgtgtggttaaggtacaaccacccctaaagctcagttttgaagtgagtgtatttatagcttctctgctggtgctgccttctagagggatgatagatcatttgaacccaatgacaatttttaaccagaaaatttaattgtacctgaatcaacctttcagcctaggacgaagtctaggcccaagtcagagtattaatgatcatgagaattgtgtgctgaaccagtaaacgagtttaccttttgatggta

SEQ ID NO: 120502 - DNA, 992 bp, Homo sapiens
  Payload ID: 3621
  Gene Symbol: COQ5
  Gene Name: coenzyme Q5, methyltransferase
  ENST ID: ENST00000445328
  CDS Start-End: 21-782
gttgtcactcgactaccaagatggcggcccccgggagctgtgctctatggagctattgcggccgtgggtggtcgcgggcgatgcggggctgccagctcctcgggcttcgtagctcttggcccggggacctactaagtgctcggctcttgtcccaagagaagcgggcagcggaaacgcactttgggtttgagactgtgtcggaagaggagaaggggggcaaagtctatcaggtgtttgaaagtgtggctaagaagtatgatgtgatgaatgatatgatgagtcttggtatccatcgtgtttggaaggatttgctgctctggaagatgcacccgcttcctgggacccagctgcttgatgttgctggaggcacaggacttgcatgggtattaggagatgctgaagaactgccctttgatgatgacaagtttgatatttacaccattgcctttgggatccggaatgtcacacacattgatcaggcactccaggaagctcatcgggtgctgaaaccaggaggacggtttctctgtctggaatttagccaagtgaacaatcccctcatatccaggctttatgatctatatagcttccaggtcatccctgtcctgggagaggtcatcgctggagactggaagtcctatcagtaccttgtagagagtatccgaaggtttccgtctcaggaagagttcaaggacatgatagaagatgcaggctttcacaaggtgacttacgaaagtctaacatcaggcattgtggccattcattctggcttcaaactttaattcctttcctatcatggagcatgaaccagtcatatcctgttgaaagcctggaactgaaggataatctggcaaatgagacagcagcagagcatctcctcttaaggatacgtgccttggactcatgtttgaatcgaacagtctcaaagtggaagaacaaattcttgtcacttttttacagctttctttggagctgcttcagtccatctccca

SEQ ID NO: 120503 - DNA, 972 bp, Homo sapiens
  Payload ID: 3621
  Gene Symbol: COQ5
  Gene Name: coenzyme Q5, methyltransferase
  ENST ID: ENST00000552443
  CDS Start-End: 333-972
tggcggcccccgggagctgtgctctatggagctattgcggccgtgggtggtcgcgggcgatgcggggctgccagctcctcgggcttcgtagctcttggcccggggacctactaagtgctcggctcttgtcccaagagaagcgggcagcggaaacgcactttgggtttgagactgtgtcggaagaggagaaggggggcaaagaactcctttaatgtgaaagtttttgctggcatcacttcttctgggacatcttcaacctttttgtcacagctccatttcttgttcatgttgtctatcaggtgtttgaaagtgtggctaagaagtatgatgtgatgaatgatatgatgagtcttggtatccatcgtgtttggaaggatttgctgctctggaagatgcacccgcttcctgggacccagctgcttgatgttgctggaggcacaggtgacattgcattccggttccttaattatgttcagtcccagcatcagagaaaacagaagaggcagttaagggcccaacaaaatttatcctgggaagaaattgccaaagagtaccagaatgaagaagattccttgggcgggtctcgtgtcgtggtgtgtgacatcaacaaggagatgctaaaggttggaaagcagaaagccttggctcaaggatacagagctggacttgcatgggtattaggagatgctgaagaactgccctttgatgatgacaagtttgatatttacaccattgcctttgggatccggaatgtcacacacattgatcaggcactccaggaagctcatcgggtgctgaaaccaggaggacggtttctctgtctggaatttagccaagtgaacaatcccctcatatccaggctttatgatctatatagcttccaggtcatccctgtcctgggagaggtcatcgctggagactggaagtcctatcagtaccttgtagagagtatccgaaggtttccgtctcagg

SEQ ID NO: 120504 - DNA, 552 bp, Homo sapiens
  Payload ID: 3621
  Gene Symbol: COQ5
  Gene Name: coenzyme Q5, methyltransferase
  ENST ID: ENST00000547943
  CDS Start-End: 25-552
ggccgttgtcactcgactaccaagatggcggcccccgggagctgtgctctatggagctattgcggccgtgggtggtcgcgggcgatgcggggctgccagctcctcgggcttcgtagctcttggcccggggacctactaagtgctcggctcttgtcccaagagaagcgggcagcggaaacgcactttgggtttgagactgtgtcggaagaggagaaggggggcaaaggtgacattgcattccggttccttaattatgttcagtcccagcatcagagaaaacagaagaggcagttaagggcccaacaaaatttatcctgggaagaaattgccaaagagtaccagaatgaagaagattccttgggcgggtctcgtgtcgtggtgtgtgacatcaacaaggagatgctaaaggttggaaagcagaaagccttggctcaaggatacagagctggacttgcatgggtattaggagatgctgaagaactgccctttgatgatgacaagtttgatatttacaccattgcctttgggatccggaatgtcacacacattgat

SEQ ID NO: 120505 - DNA, 574 bp, Homo sapiens
  Payload ID: 3621
  Gene Symbol: COQ5
  Gene Name: coenzyme Q5, methyltransferase
  ENST ID: ENST00000547736
  CDS Start-End: 301-574
actcgactaccaagatggcggcccccgggagctgtgctctatggagctattgcggccgtgggtggtcgcgggcgatgcggggctgccagctcctcgggcttcgtagctcttggcccggggacctactaagtgctcggctcttgtcccaagagaagcgggcagcggaaacgcactttgggtttgagactgtgtcggaagaggagaaggggggcaaagaactcctttaatgtgaaagtttttgctggcatcacttcttctgggacatcttcaacctttttgtcacagctccatttcttgttcatgttgagtctctctctgtcgcccaggctggaatgcagtggtccaatttcagctcactgcaacctctaccttccaggttccagtgattctcctgccccaaccacccgagtagctgggattacagtctatcaggtgtttgaaagtgtggctaagaagtatgatgtgatgaatgatatgatgagtcttggtatccatcgtgtttggaaggatttgctgctctggaagatgcacccgcttcctgggacccagctgcttgatgttgctggaggcacag

SEQ ID NO: 120506 - DNA, 560 bp, Homo sapiens
  Payload ID: 3621
  Gene Symbol: COQ5
  Gene Name: coenzyme Q5, methyltransferase
  ENST ID: ENST00000551769
  CDS Start-End: 169-560
gtctccgacacagcaacggatactcgcccctgggccgaggccgacctgctccgggaatggcgacgagtcgccaaacagcatctcaaagaacccggatggactgtatatatagtggagagggggtgagtctatcaggtgtttgaaagtgtggctaagaagtatgatgtgatgaatgatatgatgagtcttggtatccatcgtgtttggaaggatttgctgctctggaagatgcacccgcttcctgggacccagctgcttgatgttgctggaggcacaggtgacattgcattccggttccttaattatgttcagtcccagcatcagagaaaacagaagaggcagttaagggcccaacaaaatttatcctgggaagaaattgccaaagagtaccagaatgaagaagattccttgggcgggtctcgtgtcgtggtgtgtgacatcaacaaggagatgctaaaggttggaaagcagaaagccttggctcaaggatacagagctggacttgcatgggtattaggagatgctgaagaactgccctttgatgatgacaagtttgatat

SEQ ID NO: 120507 - DNA, 1520 bp, Homo sapiens
  Payload ID: 3622
  Gene Symbol: COQ6
  Gene Name: coenzyme Q6 monooxygenase
  ENST ID: ENST00000238709
  CDS Start-End: 8-1411
ctgcaccatggcggcccggcttgtcagccgatgcggggctgtgcgtgcagctccccacagcggcccgctggtgctggcgcaggtggtccggcgctcaacagacaccgtgtatgacgtggtggtgtcgggtggaggcctggtgggcgctgccatggcctgtgccttgggatatgatattcactttcatgacaagaaaatcctgttgctcgaagcaggtccaaagaaagtactggagaaattgtcagaaacttacagcaacagggtcagctccatttcccctggctctgcaacgcttctcagtagttttggtgcctgggaccatatctgcaacatgagatacagagcctttcggcgaatgcaggtgtgggacgcctgctcagaggccctgataatgtttgataaggataatttagatgacatgggctatatcgtggagaatgatgtcatcatgcatgctctcactaagcagttggaggctgtgtctgaccgagtgacggttctctacaggagcaaagccattcgctatacctggccttgtccatttcctatggccgactccagcccttgggttcatattaccctaggtgatggcagcaccttccagaccaaattgttgataggtgcagatggtcacaactccggagtacggcaggctgttggaatccagaatgtgagctggaactatgaccagtctgctgttgtggctactctgcatttatcagaggccacagaaaacaacgtagcctggcagagatttcttccctctgggcctattgctctgctcccgctctcagacaccttgagttccttggtttggtccacgtcccatgaacatgcagcagagctagttagcatggatgaggaaaaatttgtggatgccgttaactctgccttttggagtgatgctgaccacacggacttcatcgacacagctggtgccatgctgcagtatgctgtcagccttctgaagcccactaaggtctcggctcgccagctgcccccaagcgtagccagggtggatgccaaaagccgagttctgtttcctcttgggttgggacatgctgctgagtacgtcaggcctcgggtggcgctcattggggatgcagcccacagagtccatccgcttgcaggacagggtgtcaacatgggctttggggatatctccagcttggcccatcacctcagtacggcagccttcaatgggaaggacttaggttccgtgagccacctcacaggttatgaaacagaaagacagcgtcacaacactgctcttctggctgctacagacttactaaaaaggctctattctaccagtgcctccccgcttgtgttgctcaggacgtggggcttgcaggccacaaatgcagtgtctccactcaaagaacagattatggcctttgcaagcaaatgagtactcctctcctaaagaaagattacgttgatgaaaaagaacatcctgcccaggacccatcatacatattttcaagatcttatttaatttaataaacttactttacatt

SEQ ID NO: 120508 - DNA, 2118 bp, Homo sapiens
  Payload ID: 3622
  Gene Symbol: COQ6
  Gene Name: coenzyme Q6 monooxygenase
  Uniprot ID: Q9Y2Z9
  ENST ID: ENST00000334571
  CDS Start-End: 41-1447
gcctgcgggagttctgagtgcgacggcgcaggtctgcaccatggcggcccggcttgtcagccgatgcggggctgtgcgtgcagctccccacagcggcccgctggtgtcctggcgcaggtggtccggcgcctcaacagacaccgtgtatgacgtggtggtgtcgggtggaggcctggtgggcgctgccatggcctgtgccttgggatatgatattcactttcatgacaagaaaatcctgttgctcgaagcaggtccaaagaaagtactggagaaattgtcagaaacttacagcaacagggtcagctccatttcccctggctctgcaacgcttctcagtagttttggtgcctgggaccatatctgcaacatgagatacagagcctttcggcgaatgcaggtgtgggacgcctgctcagaggccctgataatgtttgataaggataatttagatgacatgggctatatcgtggagaatgatgtcatcatgcatgctctcactaagcagttggaggctgtgtctgaccgagtgacggttctctacaggagcaaagccattcgctatacctggccttgtccatttcctatggccgactccagcccttgggttcatattaccctaggtgatggcagcaccttccagaccaaattgttgataggtgcagatggtcacaactccggagtacggcaggctgttggaatccagaatgtgagctggaactatgaccagtctgctgttgtggctactctgcatttatcagaggccacagaaaacaacgtagcctggcagagatttcttccctctgggcctattgctctgctcccgctctcagacaccttgagttccttggtttggtccacgtcccatgaacatgcagcagagctagttagcatggatgaggaaaaatttgtggatgccgttaactctgccttttggagtgatgctgaccacacggacttcatcgacacagctggtgccatgctgcagtatgctgtcagccttctgaagcccactaaggtctcggctcgccagctgcccccaagcgtagccagggtggatgccaaaagccgagttctgtttcctcttgggttgggacatgctgctgagtacgtcaggcctcgggtggcgctcattggggatgcagcccacagagtccatccgcttgcaggacagggtgtcaacatgggctttggggatatctccagcttggcccatcacctcagtacggcagccttcaatgggaaggacttaggttccgtgagccacctcacaggttatgaaacagaaagacagcgtcacaacactgctcttctggctgctacagacttactaaaaaggctctattctaccagtgcctccccgcttgtgttgctcaggacgtggggcttgcaggccacaaatgcagtgtctccactcaaagaacagattatggcctttgcaagcaaatgagtactcctctcctaaagaaagattacgttgatgaaaaagaacatcctgcccaggacccatcatacatattttcaagatcttatttaatttaataaacttactttacattaaaattctctttttcttctttgcttaatgggcctgtggcacccaaataatgaatgataatttgctgtgaggagcgtatattagccagaccaaaggaaaaaacttcgaaggaagacttacaatttggttgaaaagagctttttattactaaaaaacccacaaggtgctgtctcactcatttccagttaatcatttctaaagagaaaatttacattttgtttttgttttaatgttggtcataaatttatacagttgttttttgatagaggtaagaattagactcgatgcatttttgttagaattgctgtttaaatgttaacatcagaatgcaaattaaatataaattgctttaacctttgttacaggtatactggactttctgaaaggaaaaccaggtctcattaatgctagttattactttatcacagcaccagatttccattttatttatggttcctctctgggacaccactgtcggtttaataaaacaataaataattcattgcacagatccgaagacctcaggaaccagatcacaagggaaaccgattagcagcagaatt

SEQ ID NO: 120509 - DNA, 1608 bp, Homo sapiens
  Payload ID: 3622
  Gene Symbol: COQ6
  Gene Name: coenzyme Q6 monooxygenase
  Uniprot ID: Q9Y2Z9
  ENST ID: ENST00000394026
  CDS Start-End: 168-1499
cctctccgggattcctttcccgggggcagtctcttttctctcctcacctgacggctcccctccgcgcctccgggggctccctcaggcctccccacggtcatttcagctggacagaggcagcagcgacagtgacagcgatagtggcagcagcggtggcagcgagagctatgcggggccagggtccacccctttctagctttggcgtctggttggcttccagggcagcctccgatccatcccgcccgaggaggcaaggatatgatattcactttcatgacaagaaaatcctgttgctcgaagcaggtccaaagaaagtactggagaaattgtcagaaacttacagcaacagggtcagctccatttcccctggctctgcaacgcttctcagtagttttggtgcctgggaccatatctgcaacatgagatacagagcctttcggcgaatgcaggtgtgggacgcctgctcagaggccctgataatgtttgataaggataatttagatgacatgggctatatcgtggagaatgatgtcatcatgcatgctctcactaagcagttggaggctgtgtctgaccgagtgacggttctctacaggagcaaagccattcgctatacctggccttgtccatttcctatggccgactccagcccttgggttcatattaccctaggtgatggcagcaccttccagaccaaattgttgataggtgcagatggtcacaactccggagtacggcaggctgttggaatccagaatgtgagctggaactatgaccagtctgctgttgtggctactctgcatttatcagaggccacagaaaacaacgtagcctggcagagatttcttccctctgggcctattgctctgctcccgctctcagacaccttgagttccttggtttggtccacgtcccatgaacatgcagcagagctagttagcatggatgaggaaaaatttgtggatgccgttaactctgccttttggagtgatgctgaccacacggacttcatcgacacagctggtgccatgctgcagtatgctgtcagccttctgaagcccactaaggtctcggctcgccagctgcccccaagcgtagccagggtggatgccaaaagccgagttctgtttcctcttgggttgggacatgctgctgagtacgtcaggcctcgggtggcgctcattggggatgcagcccacagagtccatccgcttgcaggacagggtgtcaacatgggctttggggatatctccagcttggcccatcacctcagtacggcagccttcaatgggaaggacttaggttccgtgagccacctcacaggttatgaaacagaaagacagcgtcacaacactgctcttctggctgctacagacttactaaaaaggctctattctaccagtgcctccccgcttgtgttgctcaggacgtggggcttgcaggccacaaatgcagtgtctccactcaaagaacagattatggcctttgcaagcaaatgagtactcctctcctaaagaaagattacgttgatgaaaaagaacatcctgcccaggacccatcatacatattttcaagatcttatttaatttaataaacttactttacatt

SEQ ID NO: 120510 - DNA, 1013 bp, Homo sapiens
  Payload ID: 3622
  Gene Symbol: COQ6
  Gene Name: coenzyme Q6 monooxygenase
  ENST ID: ENST00000557584
  CDS Start-End: 33-368
gagttctgagtgcgacggcgcaggtctgcaccatggcggcccggcttgtcagccgatgcggggctgtgcgtgcagctccccacagcggcccgctggtgtcctggcgcaggtggtccggcgcctcaacagacaccgtgtatgacgtggtggtgtcgggtggaggcctggtgggcgctgccatggcctgtgccttgggatatgatattcactttcatgacaagaaaatcctgttgctcgaagcaggtccaaagaaagtactggagaaattgtcagaaacttacagcaacagggtcagctccatttcccctggctctgcaacgcttctcagtagtgtgggacgcctgctcagaggccctgataatgtttgataaggataatttagatgacatgggctatatcgtggagaatgatgtcatcatgcatgctctcactaagcagttggaggctgtgtctgaccgagtgacggttctctacaggagcaaagccattcgctatacctggccttgtccatttcctatggccgactccagcccttgggttcatattaccctaggtgatggcagcaccttccagaccaaattgttgataggtgcagatggtcacaactccggagtacggcaggctgttggaatccagaatgtgagctggaactatgaccagtctgctgttgtggctactctgcatttatcagaggccacagaaaacaacgtagcctggcagagatttcttccctctgggcctattgctctgctcccggtaagaggtccttctgaccagtccgcccacatgcatgcaagcctttcctcttcactttctctcagcctttttctggtttcaagggaatctgcccaggctgtttgtaagttccctttttgtctttttatgcttgagagtttccaagtgcagcagagtcttagccgttggtattggtgttcttttgacacagctctcagacaccttgagttccttggtttggtccacgtcccatgaacatgcagcagagctagttagca

SEQ ID NO: 120511 - DNA, 1486 bp, Homo sapiens
  Payload ID: 3622
  Gene Symbol: COQ6
  Gene Name: coenzyme Q6 monooxygenase
  ENST ID: ENST00000554341
  CDS Start-End: 154-414
ctttcccgggggcagtctcttttctctcctcacctgacggctcccctccgcgcctccgggggctccctcaggcctccccacggtcatttcagctggacagaggcagcagcgacagtgacagcgatagtggcagcagcggtggcagcgagagctatgcggggccagggtccacccctttctagctttggcgtctggttggcttccagggcagcctccgatccatcccgcccgaggaggcaaggatatgatattcactttcatgacaagaaaatcctgttgctcgaagcaggtccaaagaaagtactggagaaattgtcagaaacttacagcaacagggtcagctccatttcccctggctctgcaacgcttctcagtagtgtgggacgcctgctcagaggccctgataatgtttgataaggataatttagatgacatgggctatatcgtggagaatgatgtcatcatgcatgctctcactaagcagttggaggctgtgtctgaccgagtgacggttctctacaggagcaaagccattcgctatacctggccttgtccatttcctatggccgactccagcccttgggttcatattaccctaggtgatggcagcaccttccagaccaaattgttgataggtgcagatggtcacaactccggagtacggcaggctgttggaatccagaatgtgagctggaactatgaccagtctgctgttgtggctactctgcatttatcagaggccacagaaaacaacgtagcctggcagagatttcttccctctgggcctattgctctgctcccgctctcagacaccttgagttccttggtttggtccacgtcccatgaacatgcagcagagctagttagcatggatgaggaaaaatttgtggatgccgttaactctgccttttggagtgatgctgaccacacggacttcatcgacacagctggtgccatgctgcagtatgctgtcagccttctgaagcccactaaggtctcggctcgccagctgcccccaagcgtagccagggtggatgccaaaagccgagttctgtttcctcttgggttgggacatgctgctgagtacgtcaggcctcgggtggcgctcattggggatgcagcccacagagtccatccgcttgcaggacagggtgtcaacatgggctttggggatatctccagcttggcccatcacctcagtacggcagccttcaatgggaaggacttaggttccgtgagccacctcacaggttatgaaacagaaagacagcgtcacaacactgctcttctggctgctacagacttactaaaaaggctctattctaccagtgcctccccgcttgtgttgctcaggacgtggggcttgcaggccacaaatgcagtgtctccactcaaaattatggcctttgcaagcaaatgagtactcctctcctaaagaaagattacgttgatgaaaaagaacatcctgcccaggacccatcataca

SEQ ID NO: 120512 - DNA, 864 bp, Homo sapiens
  Payload ID: 3622
  Gene Symbol: COQ6
  Gene Name: coenzyme Q6 monooxygenase
  ENST ID: ENST00000554320
  CDS Start-End: 78-864
cggaaaccgggccgcggaggcacgatgagagccgtgagagccctagcacgacttgcccaaagacaatttctcaggatatgatattcactttcatgacaagaaaatcctgttgctcgaagcaggtccaaagaaagtactggagaaattgtcagaaacttacagcaacagggtcagctccatttcccctggctctgcaacgcttctcagtagtgtgggacgcctgctcagaggccctgataatgtttgataaggataatttagatgacatgggctatatcgtggagaatgatgtcatcatgcatgctctcactaagcagttggaggctgtgtctgaccgagtgacggttctctacaggagcaaagccattcgctatacctggccttgtccatttcctatggccgactccagcccttgggttcatattaccctaggtgatggcagcaccttccagaccaaattgttgataggtgcagatggtcacaactccggagtacggcaggctgttggaatccagaatgtgagctggaactatgaccagtctgctgttgtggctactctgcatttatcagaggccacagaaaacaacgtagcctggcagagatttcttccctctgggcctattgctctgctcccgctctcagacaccttgagttccttggtttggtccacgtcccatgaacatgcagcagagctagttagcatggatgaggaaaaatttgtggatgccgttaactctgccttttggagtgatgctgaccacacggacttcatcgacacagctggtgccatgctgcagtatgctgtcagccttctgaagcccactaaggtctcggctcgccagctgcccccaagcgtagccaggg

SEQ ID NO: 120513 - DNA, 737 bp, Homo sapiens
  Payload ID: 3622
  Gene Symbol: COQ6
  Gene Name: coenzyme Q6 monooxygenase
  ENST ID: ENST00000555196
  CDS Start-End: 99-263
cttctccaggctactagtggccggaaaccgggccgcggaggcacgatgagagccgtgagagccctagcacgacttgcccaaagacaatttctcaggatatgatattcactttcatgacaagaaaatcctgttgctcgaagcaggtccaaagaaagtactggagaaattgtcagaaacttacagcaacagggtcagctccatttcccctggctctgcaacgcttctcagtagttttggtgcctgggaccatatctgcaacatgagatacagagcctttcggcgaatgcaggtgtgggacgcctgctcagaggccctgataatgtttgataaggataatttagatgacatgggctatatcgtggagaatgatgtcatcatgcatgctctcactaagcagttggaggctgtgtctgaagctgccaaacttttctgaagaggctatacaatttcactttcccaccagtctataagggttccagtttctccacatcctcaccaacgcttattttccttctgtaaaaaaaaactgtagccatcctgttgagagtgaagttgtatctcattgtagtagtggttgcatttccttaataactaatgatgctgagtatcttttcatgtccttactggccatttgtgtatccactttggagaaatgtctgttcaaaatattttgcctgtttttaaattggattatttgtttttgagttataggagttctttatatattttaaatataa

SEQ ID NO: 120514 - DNA, 649 bp, Homo sapiens
  Payload ID: 3622
  Gene Symbol: COQ6
  Gene Name: coenzyme Q6 monooxygenase
  ENST ID: ENST00000554920
  CDS Start-End: 26-628
gagtgcgacggcgcaggtctgcaccatggcggcccggcttgtcagccgatgcggggctgtgcgtgcagctccccacagcggcccgctggtgtcctggcgcaggtggtccggcgcctcaacagacaccgtgtatgacgtggtggtgtcgggtggaggcctggtgggcgctgccatggcctgtgccttgggatatgatattcactttcatgacaagaaaatcctgttgctcgaagcaggtccaaagaaagtactggagaaattgtcagaaacttacagcaacagggtcagctccatttcccctggctctgcaacgcttctcagtagttttggtgcctgggaccatatctgcaacatgagatacagagcctttcggcgaatgcaggtgtgggacgcctgctcagaggccctgataatgtttgataaggataatttagatgacatgggctatatcgtggagaatgatgtcatcatgcatgctctcactaagcagttggaggctgtgtctggaacagattatggcctttgcaagcaaatgagtactcctctcctaaagaaagattacgttgatgaaaaagaacatcctgcccaggacccatcatacatattttcaagatcttatttaatttaataaacttactttacattaaaa

SEQ ID NO: 120515 - DNA, 552 bp, Homo sapiens
  Payload ID: 3622
  Gene Symbol: COQ6
  Gene Name: coenzyme Q6 monooxygenase
  ENST ID: ENST00000554153
  CDS Start-End: 33-368
gagttctgagtgcgacggcgcaggtctgcaccatggcggcccggcttgtcagccgatgcggggctgtgcgtgcagctccccacagcggcccgctggtgtcctggcgcaggtggtccggcgcctcaacagacaccgtgtatgacgtggtggtgtcgggtggaggcctggtgggcgctgccatggcctgtgccttgggatatgatattcactttcatgacaagaaaatcctgttgctcgaagcaggtccaaagaaagtactggagaaattgtcagaaacttacagcaacagggtcagctccatttcccctggctctgcaacgcttctcagtagtgtgggacgcctgctcagaggccctgataatgtttgataaggataatttagatgacatgggctatatcgtggagaatgatgtcatcatgcatgctctcactaagcagttggaggctgtgtctgaccgagtgacggttctctacaggagcaaagccattcgctatacctggccttgtccatttcctatggccgactccagcccttgggttcatattacccta

SEQ ID NO: 120516 - DNA, 1538 bp, Homo sapiens
  Payload ID: 3622
  Gene Symbol: COQ6
  Gene Name: coenzyme Q6 monooxygenase
  ENST ID: ENST00000629426
  CDS Start-End: 248-1429
cgggattggagtgctctgctccggacgcactacgtaggtgggcctgcgggagttctgagtgcgacggcgcaggtctgcaccatggcggcccggcttgtcagccgatgcggggctgtgcgtgcagctccccacagcggcccgctggtgtcctggcgcaggtggtccggcgcctcaacagacaccgtgtatgacgtggtggtgtcgggtggaggcctggtgggcgctgccatggcctgtgccttgggatatgatattcactttcatgacaagaaaatcctgttgctcgaagcaggtccaaagaaagtactggagaaattgtcagaaacttacagcaacagggtcagctccatttcccctggctctgcaacgcttctcagtagtgtgggacgcctgctcagaggccctgataatgtttgataaggataatttagatgacatgggctatatcgtggagaatgatgtcatcatgcatgctctcactaagcagttggaggctgtgtctgaccgagtgacggttctctacaggagcaaagccattcgctatacctggccttgtccatttcctatggccgactccagcccttgggttcatattaccctaggtgatggcagcaccttccagaccaaattgttgataggtgcagatggtcacaactccggagtacggcaggctgttggaatccagaatgtgagctggaactatgaccagtctgctgttgtggctactctgcatttatcagaggccacagaaaacaacgtagcctggcagagatttcttccctctgggcctattgctctgctcccgctctcagacaccttgagttccttggtttggtccacgtcccatgaacatgcagcagagctagttagcatggatgaggaaaaatttgtggatgccgttaactctgccttttggagtgatgctgaccacacggacttcatcgacacagctggtgccatgctgcagtatgctgtcagccttctgaagcccactaaggtctcggctcgccagctgcccccaagcgtagccagggtggatgccaaaagccgagttctgtttcctcttgggttgggacatgctgctgagtacgtcaggcctcgggtggcgctcattggggatgcagcccacagagtccatccgcttgcaggacagggtgtcaacatgggctttggggatatctccagcttggcccatcacctcagtacggcagccttcaatgggaaggacttaggttccgtgagccacctcacaggttatgaaacagaaagacagcgtcacaacactgctcttctggctgctacagacttactaaaaaggctctattctaccagtgcctccccgcttgtgttgctcaggacgtggggcttgcaggccacaaatgcagtgtctccactcaaagaacagattatggcctttgcaagcaaatgagtactcctctcctaaagaaagattacgttgatgaaaaagaacatcctgcccaggacccatcatacatattttcaagatcttatttaatttaataaacttactttacatt

SEQ ID NO: 120517 - DNA, 2657 bp, Homo sapiens
  Payload ID: 3623
  Gene Symbol: COQ7
  Gene Name: coenzyme Q7 homolog, ubiquinone (yeast)
  Uniprot ID: Q99807
  ENST ID: ENST00000321998
  CDS Start-End: 67-720
gtccgagccaagggcactattggccagttccgttcaacgaagtggttgctttttttagttccggcaatgagttgcgccggggcggcggcggctccccgcctttggcggctgcgcccgggggcccggcggtccctctcagcttatggaagaagaaccagtgtcagatttcgcagttcaggaatgactttagacaatatcagtcgggcagctgtggatcgaataatccgggtggatcatgcaggcgaatatggagcaaaccgcatctatgccgggcagatggctgtcctgggtcggaccagcgtcgggccagtcattcagaaaatgtgggatcaagaaaaggaccatttgaaaaagttcaatgagttgatggttacgttcagggtccggccaacagttctgatgcccttgtggaacgtgctggggtttgcactgggggcggggaccgccttgctcgggaaggaaggtgccatggcctgcaccgtggcggtggaagagagcatagcacatcactacaacaaccagatcaggacgctgatggaggaggaccctgaaaaatacgaggaacttcttcagctgataaagaaatttcgggatgaagagcttgagcaccatgacataggcctcgaccatgatgcagaattggctccagcctatgccgtcctgaagagcattatccaggccggatgcagagtggcgatatatttatcagaaagattataaagtgtgtccagttttgcctgtctataaaagatgatagtaatttaccaagtgacatttgcagagaaacaggtgtacagttatcgttgtacttttgtacaatgtgaattttgttaataaattataaggtttgtttttttttttttaaactctgcagtgttgatttttctctgggttgttttttctgccatgagaccaacaggtcaccagccttgttcaagttacagcaaacgaagctgggccttgtttggtctcatacttaattttcttttatatacatgtttttcttttacatgcatatatatatattttattttattttatgttttttggagacagggcctcgctcttttgtccaggccgggtcacaactcactgcagcctggacctcctagcctcaagcaatccacccacctcagccttccaagtagctgggactacaggtgtgcaccaccacagctggctaattctatttttttatagaggcgaagtctcactatgtcgccaggctggtctctaactcctgggctcagtgatcctcccgtttcgacttcccaaagtgctgggattacaggtgtgagccacttcaccaggcccattttctcctaaaacttcaaggacaaatcattaataatgtaacaggaatctttaggagaaaaaacaatttggtttactgataacaaaagataattggaaacatgagagtatttgagattggccaagcagaactatgaagtccatcaagtaagtcaaagatcatcgtttctgttttgaattgtgggtgataatgggtgggagagtgctacagtctgtatgtctgtgtctccctagaattcatacgatgaaatcttcactctcaagttgatagaaggtggggcccttgggaagtgtgaggtcatgagagtggagccctcatgaatgggatcagtgccttatgaaaggccctagagagatacctcatcctctccacagtgtgagacttcaaggggaagtatgagacttctctgaggaagcagacccttcacaagcaaaatcagccagcactttgatcacggacttcccagcctctaggactgtgagcaataaatgtttgatgtttataagccacccagactgtggtattttgttatagcagcctgaacagactaagacgggggtgttgcttccatcaaaggatgtactaagttgtggattatttgtgaaattgaattacaaccttttccttaaggtcttttaccacctcccccccaaaaaaatcccccaaaactgattcagattttcatactttaatgaaatattttataatttgcaaatttttaagtaatttatgaaaaacctagatcagtggatctcctctctggctgcccattagaatgtcctgtggagattaaacttttttttttcagtttatggaccaagagttttgatttatttagggtggagttcaggatcagaatggtttcagaagctcccaggtgattccggagtgagttggagctgcaagcccctgagctagattataagatgcttctgggaaagaaccacattttaggaatttgcttcccacccagtgccctgcatttaatcagcacctgatgacttggcaggacttgccccaccagggtctggctttgaagggtagtggacaccaggatcctttggattaatcctctgccacctctctcttttcctcaaccgagagtgaatttatgtaattgagtgaaagtctacgaatcataattgtaataaattaaggctgggcatttgtttgaaattagataggataaagccaaaggtttgaacaagttgtggatggtttgtaaaaattaatcttacaaaataaatgctgtgtgtgaacacgttgattaaattcaaaagggtattatttggtttttctgtaaattgaaccttgaaataaaagcacaacaaggttttcttaa

SEQ ID NO: 120518 - DNA, 819 bp, Homo sapiens
  Payload ID: 3623
  Gene Symbol: COQ7
  Gene Name: coenzyme Q7 homolog, ubiquinone (yeast)
  Uniprot ID: Q99807
  ENST ID: ENST00000544894
  CDS Start-End: 134-673
agcggcgagagtgacaggaggacaggggttgtttcggcagtgacgcctggggagtgacgcaattgcacccctgtgcagtgatgtcacggcagcttatggaagaagaaccagtgtcagatttcgcagttcaggaatgactttagacaatatcagtcgggcagctgtggatcgaataatccgggtggatcatgcaggcgaatatggagcaaaccgcatctatgccgggcagatggctgtcctgggtcggaccagcgtcgggccagtcattcagaaaatgtgggatcaagaaaaggaccatttgaaaaagttcaatgagttgatggttacgttcagggtccggccaacagttctgatgcccttgtggaacgtgctggggtttgcactgggggcggggaccgccttgctcgggaaggaaggtgccatggcctgcaccgtggcggtggaagagagcatagcacatcactacaacaaccagatcaggacgctgatggaggaggaccctgaaaaatacgaggaacttcttcagctgataaagaaatttcgggatgaagagcttgagcaccatgacataggcctcgaccatgatgcagaattggctccagcctatgccgtcctgaagagcattatccaggccggatgcagagtggcgatatatttatcagaaagattataaagtgtgtccagttttgcctgtctataaaagatgatagtaatttaccaagtgacatttgcagagaaacaggtgtacagttatcgttgtacttttgtacaatgtgaattttgttaataaattataaggtttgtttttttttttttaaa

SEQ ID NO: 120519 - DNA, 2575 bp, Homo sapiens
  Payload ID: 3623
  Gene Symbol: COQ7
  Gene Name: coenzyme Q7 homolog, ubiquinone (yeast)
  ENST ID: ENST00000569127
  CDS Start-End: 887-1471
gtgcagtgatgtcacggcaggtgcggccagcgttccgagtcgaggacagttggcgacactgaaaattcagcgtctccgggagtctctctctttgtagtctttgcccagggccttgccaggcaaagggtagcccgacgaccagcagcctccgctacttctgggcgctcgctagaaatacagattctcgggccccaccccgacctacttggtcggtatctgtgatctgtgaacaggacctttaggtgatttgcatgcactgtaaactgtgaaagccatcagtgtagtggaaggagcatcgaatttagagtagagagacatggttttggaccctggttcctgctttccttgtttcatctgtgctgccttagaaaattgtcatgagcccgggcgcggtggctccggcctataatctcagcactttgggaggccgaggctggaggatcccctgaggtcaggagtttgagaccagcctggccaacatggtgaaaccccgcctctactaaaaatacaaaaatttgccaggcgtgatggcaggtgcctgtaatcccagctactcaggaggctgagacaggagaatcgcttgaacccgggaggcagagattgctttgaggcgagattgcaccactgcactgcaacctgggcgtcagagcgagactttgtctcccccgcgcaaaaaaaaaaaaaaaaaagaaatttcatgaagtcgttttctcaacgttaaattaccgtgtaccactttcgggatttttgcctaatggcagtactgcttgaacttttgattactagatgtgtttttttgtatagctatgtcccatttaaaaattaaattaatttccttgaaacaaaatccttatggtgaatgggaagccagtgccacttgccacaaatggcttatggaagaagaaccagtgtcagatttcgcagttcaggaatgactttagacaatatcagtcgggcagctgtggatcgaataatccgggtggatcatgcaggcgaatatggagcaaaccgcatctatgccgggcagatggctgtcctgggtcggaccagcgtcgggccagtcattcagaaaatgtgggatcaagaaaaggaccatttgaaaaagttcaatgagttgatggttacgttcagggtccggccaacagttctgatgcccttgtggaacgtgctggggtttgcactgggggcggggaccgccttgctcgggaaggaaggtgccatggcctgcaccgtggcggtggaagagagcatagcacatcactacaacaaccagatcaggacgctgatggaggaggaccctgaaaaatacgaggaacttcttcagctgataaagaaatttcgggatgaagagcttgagcaccatgacataggcctcgaccatgatgcagaattggctccagcctatgccgtcctgaagagcattatccaggccggatgcagagtggcgatatatttatcagaaagattataaagtgtgtccagttttgcctgtctataaaagatgatagtaatttaccaagtgacatttgcagagaaacaggtgtacagttatcgttgtacttttgtacaatgtgaattttgttaataaattataaggtttgtttttttttttttaaactctgcagtgttgatttttctctgggttgttttttctgccatgagaccaacaggtcaccagccttgttcaagttacagcaaacgaagctgggccttgtttggtctcatacttaattttcttttatatacatgtttttcttttacatgcatatatatatattttattttattttatgttttttggagacagggcctcgctcttttgtccaggccgggtcacaactcactgcagcctggacctcctagcctcaagcaatccacccacctcagccttccaagtagctgggactacaggtgtgcaccaccacagctggctaattctatttttttatagaggcgaagtctcactatgtcgccaggctggtctctaactcctgggctcagtgatcctcccgtttcgacttcccaaagtgctgggattacaggtgtgagccacttcaccaggcccattttctcctaaaacttcaaggacaaatcattaataatgtaacaggaatctttaggagaaaaaacaatttggtttactgataacaaaagataattggaaacatgagagtatttgagattggccaagcagaactatgaagtccatcaagtaagtcaaagatcatcgtttctgttttgaattgtgggtgataatgggtgggagagtgctacagtctgtatgtctgtgtctccctagaattcatacgatgaaatcttcactctcaagttgatagaaggtggggcccttgggaagtgtgaggtcatgagagtggagccctcatgaatgggatcagtgccttatgaaaggccctagagagatacctcatcctctccacagtgtgagacttcaaggggaagtatgagacttctctgaggaagcagacccttcacaagcaaaatcagccagcactttgatcacggacttcccagcctctaggactgtgagcaataaatgtttgatgtttataagcca

SEQ ID NO: 120520 - DNA, 703 bp, Homo sapiens
  Payload ID: 3623
  Gene Symbol: COQ7
  Gene Name: coenzyme Q7 homolog, ubiquinone (yeast)
  ENST ID: ENST00000566049
  CDS Start-End: 40-360
ttccgttcaacgaagtggttgctttttttagttccggcaatgagttgcgccggggcggcggcggctccccgcctttggcggctgcgcccgggggcccggcggtccctctcagcttatggaagaagaaccagtgtcagatttcgcagttcaggaatgactttagacaatatcagtcgggcagctgtggatcgaataatccgggtggatcatgcaggcgaatatggagcaaaccgcatctatgccgggcagatggctgtcctgggtcggaccagcgtcgggccagtcattcaggggcggggaccgccttgctcgggaaggaaggtgccatggcctgcaccgtggcggtggaagagagcatagcacatcactacaacaaccagatcaggacgctgatggaggaggaccctgaaaaatacgaggaacttcttcagctgataaagaaatttcgggatgaagagcttgagcaccatgacataggcctcgaccatgatgcagaattggctccagcctatgccgtcctgaagagcattatccaggccggatgcagagtggcgatatatttatcagaaagattataaagtgtgtccagttttgcctgtctataaaagatgatagtaatttaccaagtgacatttgcagagaaacaggtgtacagttatcgttgtacttttgtacaatgtgaattttgttaataaattataag

SEQ ID NO: 120521 - DNA, 714 bp, Homo sapiens
  Payload ID: 3623
  Gene Symbol: COQ7
  Gene Name: coenzyme Q7 homolog, ubiquinone (yeast)
  Uniprot ID: Q99807
  ENST ID: ENST00000568985
  CDS Start-End: 25-678
tggttgctttttttagttccggcaatgagttgcgccggggcggcggcggctccccgcctttggcggctgcgcccgggggcccggcggtccctctcagcttatggaagaagaaccagtgtcagatttcgcagttcaggaatgactttagacaatatcagtcgggcagctgtggatcgaataatccgggtggatcatgcaggcgaatatggagcaaaccgcatctatgccgggcagatggctgtcctgggtcggaccagcgtcgggccagtcattcagaaaatgtgggatcaagaaaaggaccatttgaaaaagttcaatgagttgatggttacgttcagggtccggccaacagttctgatgcccttgtggaacgtgctggggtttgcactgggggcggggaccgccttgctcgggaaggaaggtgccatggcctgcaccgtggcggtggaagagagcatagcacatcactacaacaaccagatcaggacgctgatggaggaggaccctgaaaaatacgaggaacttcttcagctgataaagaaatttcgggatgaagagcttgagcaccatgacataggcctcgaccatgatgcagaattggctccagcctatgccgtcctgaagagcattatccaggccggatgcagagtggcgatatatttatcagaaagattataaatgtgagacttcaaggggaagtatgagacttctctg

SEQ ID NO: 120522 - DNA, 590 bp, Homo sapiens
  Payload ID: 3623
  Gene Symbol: COQ7
  Gene Name: coenzyme Q7 homolog, ubiquinone (yeast)
  ENST ID: ENST00000566110
  CDS Start-End: 281-590
gttgctttttttagttccggcaatgagttgcgccggggcggcggcggctccccgcctttggcggctgcgcccgggggcccggcggtccctctcaggttaaacagagtccgtttatgggcacgcctggcccatggggaactgatttgtgacctccatcccaaagtgccctttctgctgtctgtaaaaggaacatctggattttacctgatcataacgaagaataaacacttgcatttcagcttatggaagaagaaccagtgtcagatttcgcagttcaggaatgactttagacaatatcagtcgggcagctgtggatcgaataatccgggtggatcatgcaggcgaatatggagcaaaccgcatctatgccgggcagatggctgtcctgggtcggaccagcgtcgggccagtcattcagaaaatgtgggatcaagaaaaggaccatttgaaaaagttcaatgagttgatggttacgttcagggtccggccaacagttctgatgcccttgtggaacgtgctggggtttgcactgggggcggggaccgccttgctcgggaaggaaggtgccatggcctgcaccgtggcggtgg

SEQ ID NO: 120523 - DNA, 739 bp, Homo sapiens
  Payload ID: 3623
  Gene Symbol: COQ7
  Gene Name: coenzyme Q7 homolog, ubiquinone (yeast)
  ENST ID: ENST00000561858
  CDS Start-End: 349-739
agagtgacaggaggacaggggttgtttcggcagtgacgcctggggagtgacgcaattgcacccctgtgcagtgatgtcacggcaggtgcggccagcgttccgagtcgaggacagttggcgacactgaaaattcagcgtctccgggagtctctctctttgtagtctttgcccagggccttgccaggcaaagggtagcccgacgaccagcagcctccgctacttctgggcgctcgctagaaatacagattctcgggccccaccccgacctacttggtcggtatctgtgatctgtgaacaggacctttagcttatggaagaagaaccagtgtcagatttcgcagttcaggaatgactttagacaatatcagtcgggcagctgtggatcgaataatccgggtggatcatgcaggcgaatatggagcaaaccgcatctatgccgggcagatggctgtcctgggtcggaccagcgtcgggccagtcattcagaaaatgtgggatcaagaaaaggaccatttgaaaaagttcaatgagttgatggttacgttcagggtccggccaacagttctgatgcccttgtggaacgtgctggggtttgcactgggggcggggaccgccttgctcgggaaggaaggtgccatggcctgcaccgtggcggtggaagagagcatagcacatcactacaacaaccagatcaggacgctgatggaggaggaccctgaaaaatacgaggaacttcttc

SEQ ID NO: 120524 - DNA, 840 bp, Homo sapiens
  Payload ID: 3623
  Gene Symbol: COQ7
  Gene Name: coenzyme Q7 homolog, ubiquinone (yeast)
  ENST ID: ENST00000569312
  CDS Start-End: 5-415
ggcaatgagttgcgccggggcggcggcggctccccgcctttggcggctgcgcccgggggcccggcggtccctctcagcttatggaagaagaaccagtgtcagatttcgcagttcaggaatgactttagacaatatcagtcgggcagctgtggatcgaataatccgggtggatcatgcaggcgaatatggagcaaaccgcatctatgccgggcagatggctgtcctgggtcggaccagcgtcgggccagtcattcagaaaatgtgggatcaagaaaaggaccatttgaaaaagttcaatgagttgatggttacgttcagggtccggccaacagttctgatgcccttgtggaacgtgctggggtttgcactgggtacgtgtctctctagaagagcttatgcaagcttggggatctaggatgattaaatccttcaggggcggggaccgccttgctcgggaaggaaggtgccatggcctgcaccgtggcggtggaagagagcatagcacatcactacaacaaccagatcaggacgctgatggaggaggaccctgaaaaatacgaggaacttcttcagctgataaagaaatttcgggatgaagagcttgagcaccatgacataggcctcgaccatgatgcagaattggctccagcctatgccgtcctgaagagcattatccaggccggatgcagagtggcgatatatttatcagaaagattataaagtgtgtccagttttgcctgtctataaaagatgatagtaatttaccaagtgacatttgcagagaaacaggtgtacagttatcgttgtacttttgtacaatgtgaattttgttaataaatt

SEQ ID NO: 120525 - DNA, 1677 bp, Homo sapiens
  Payload ID: 3624
  Gene Symbol: COQ9
  Gene Name: coenzyme Q9
  Uniprot ID: O75208
  ENST ID: ENST00000262507
  CDS Start-End: 70-1026
cgccctccttagggccgtggtcccgtagctaccggtcgcgtcgccgtgggcgacgtgcccgcttccaaaatggcggcggcggcggtatctggtgcgcttggccgggcgggctggaggctcctgcagctgcgatgcctgcccgtggcccgttgccgacaagccctggtgccgcgtgccttccatgcttcagctgtggggctaaggtcttcagatgagcagaagcagcagcctcccaactcattttctcagcagcattctgagacacagggggcagaaaaacctgatccagagtcttctcattcaccccccaggtatacagaccagggcggcgaggaggaggaggactatgaaagtgaggagcagttgcagcaccgcatcctgacggcagcccttgagtttgtgcccgcccacgggtggacagcagaggcgattgcagaaggagcccagtctctgggtctctccagtgcagcagccagcatgttcgggaaggatggcagtgagctaatactgcattttgtgacccagtgcaatacccggctcacacgtgtgctagaagaggagcagaagctggtacagttgggccaggcggagaagaggaagacagaccagttcctgagggatgcagtggaaaccagactgagaatgctgatcccatacattgagcactggccccgggccctcagcatcctcatgctccctcacaacatcccgtccagcctgagcctgctcaccagcatggtggatgacatgtggcattacgctggggaccagtccactgattttaactggtacacccgccgagccatgctggctgccatctacaacacaacagagctggtgatgatgcaggactcctctccagactttgaggacacttggcgcttcctggaaaaccgggttaatgatgcaatgaacatgggccacactgccaagcaggtaaagtccacaggagaggcactggtgcaaggactcatgggtgcagcagtgacgctcaagaacttgacaggtctaaaccagcgtcggtgagaggaaggggtataagctacaatgcctagaagagaatgagcggacagattgaaagagctttgaaaagtataaggtgccatccacataacctggtgttcacgagaacacactaaaggactcctgagtcactaccacagccacctggaaaccacaaggcatttgatgctaccgttctggtcagggattgggctgcttcttcagttcctaataccagaccaagcctcctgatgcctttctgcactgcaactgtgtgattgaaaaatgagatgttcatccaagcagtcaagccacagaaacccagcatgtccctgtcacaatctcatgggcaccttgatcatgtcttaaccttcccttaaccttggggctcccaagccagagtcaaggtctgacgccacctcaaggtgacagctcatctccagcacagcacaggcgtgtgcacacagaggtgttccttgcagccccctccctctcaggtgtcctgagatgctgttcctgggagccccctcagaaaactgcctcacctgagacaagtgcctgctggacagaggtgtgattccaggcctggtgtcacatgacaccagcatgcattgcaggattattagtgtattttgagtctgtaaaaataataaatatgtttgaagtagtttccca

SEQ ID NO: 120526 - DNA, 935 bp, Homo sapiens
  Payload ID: 3624
  Gene Symbol: COQ9
  Gene Name: coenzyme Q9
  ENST ID: ENST00000564655
  CDS Start-End: 25-935
gtgggcgacgtgcccgcttccaaaatggcggcggcggcggtatctggtgcgcttggccgggcgggctggaggctcctgcagctgcgatgcctgcccgtttctgtttcagtggcccgttgccgacaagccctggtgccgcgtgccttccatgcttcagctgtggggctaaggtcttcagatgagcagaagcagcagcctcccaactcattttctcagcagcattctgagacacagggggcagaaaaacctgatccagagtcttctcattcaccccccaggtatacagaccagggcggcgaggaggaggaggactatgaaagtgaggagcagttgcagcaccgcatcctgacggcagcccttgagtttgtgcccgcccacgggtggacagcagaggcgattgcagaaggagcccagtctctgggtctctccagtgcagcagccagcatgttcgggaaggatggcagtgagctaatactgcattttgtgacccagtgcaatacccggctcacacgtgtgctagaagaggagcagaagctggtacagttgggccaggcggagaagaggaagacagaccagttcctgagggatgcagtggaaaccagactgagaatgctgatcccatacattgagcactggccccgggccctcagcatcctcatgctccctcacaacatcccgtccagcctgagcctgctcaccagcatggtggatgacatgtggcattacgctggggaccagtccactgattttaactggtacacccgccgagccatgctggctgccatctacaacacaacagagctggtgatgatgcaggactcctctccagactttgaggacacttggcgcttcctggaaaaccgggttaatgatgcaatgaacatgggccacactgccaagcaggtaaagtccacaggagaggcactggtgcaagg

SEQ ID NO: 120527 - DNA, 845 bp, Homo sapiens
  Payload ID: 3624
  Gene Symbol: COQ9
  Gene Name: coenzyme Q9
  ENST ID: ENST00000564115
  CDS Start-End: 20-586
cgacgtgcccgcttccaaaatggcggcggcggcggtatctggtgcgcttggccgggcgggctggaggctcctgcagctgcgatgcctgcccgtggcccgttgccgacaagccctggtgccgcgtgccttccatgcttcagctgtggggctaaggtcttcagatgagcagaagcagcagcctcccaactcattttctcagcagcattctgagacacagggggcagaaaaacctgatccagagtcttctcattcaccccccaggtatacagaccagggcggcgaggaggaggaggactatgaaagtgaggagcagttgcagcaccgcatcctgacggcagcccttgagtttgtgcccgcccacgggtggacagcagaggcgattgcagaaggagcccagtctctgggtctctccagtgcagcagccagcatgttcgggaaggatggcagtgagctaatactgcattttgtgacccagtgcaatacccggctcacacgtgtgctagaagaggagcagaagctggtacagttgggccaggcggagccctcagcatcctcatgctccctcacaacatcccgtccagcctgagcctgctcaccagcatggtggatgacatgtggcattacgctggggaccagtccactgattttaactggtacacccgccgagccatgctggctgccatctacaacacaacagagctggtgatgatgcaggactcctctccagactttgaggacacttggcgcttcctggaaaaccgggttaatgatgcaatgaacatgggccacactgccaagcaggtaaagtccacaggagaggcactggtgcaaggactcatgggtgc

SEQ ID NO: 120528 - DNA, 399 bp, Homo sapiens
  Payload ID: 3624
  Gene Symbol: COQ9
  Gene Name: coenzyme Q9
  ENST ID: ENST00000563166
  CDS Start-End: 1-309
cagctgcgatgcctgcccgtggcccgttgccgacaagccctggtgccgcgtgccttccatgcttcagctgtggggctaaggtcttcagatgagcagaagcagcagcctcccaactcattttctcagcagcattctgagacacagggggcagaaaaacctgatccagagtcttctcattcaccccccaggtatacagaccagggcggcgaggaggaggaggactatgaaagtgaggagcagttgcagcaccgcatcctgacggcagcccttgagtttgtgcccgcccacgggtggacagcagaggtgtgattccaggcctggtgtcacatgacaccagcatgcattgcaggattattagtgtattttgagtctgtaaaaataataaatatgtttgaagta

SEQ ID NO: 120529 - DNA, 713 bp, Homo sapiens
  Payload ID: 3624
  Gene Symbol: COQ9
  Gene Name: coenzyme Q9
  ENST ID: ENST00000563391
  CDS Start-End: 445-713
gcctggctagcttcggccctgctccgctgtctgtgaggggcagatgcagcggggcagggcctgtcacccccatttcatggagttggcagagcctcagagagggctcgggtggcccgttgccgacaagccctggtgccgcgtgccttccatgcttcagctgtggggctaaggtcttcagatgagcagaagcagcagcctcccaactcattttctcagcagcattctgagacacagggggcagaaaaacctgatccagagtcttctcattcaccccccaggtatacagaccagggcggcgaggaggaggaggactatgaaagtgaggagcagttgcagcaccgcatcctgacggcagcccttgagtttgtgcccgcccacgggtggacagcagaggcgattgcagaaggagcccagtctctgggtctctccagtgcagcagccagcatgttcgggaaggatggcagtgagctaatactgcattttgtgacccagtgcaatacccggctcacacgtgtgctagaagaggagcagaagctggtacagttgggccaggcggagaagaggaagacagaccagttcctgagggatgcagtggaaaccagactgagaatgctgatcccatacattgagcactggccccgggccctcagcatcctcatgctccctcacaacatcccgtccagcctgagcctgctcaccagcatggtggatga

SEQ ID NO: 120530 - DNA, 882 bp, Homo sapiens
  Payload ID: 3624
  Gene Symbol: COQ9
  Gene Name: coenzyme Q9
  ENST ID: ENST00000567933
  CDS Start-End: 10-633
gcttccaaaatggcggcggcggcggtatctggtgcgcttggccgggcgggctggaggctcctgcagctgcgatgcctgcccgtggcccgttgccgacaagccctggtgccgcgtgccttccatgcttcagctgtggggctaaggtcttcagatgagcagaagcagcagcctcccaactcattttctcagcagcattctgagacacagggggcagaaaaacctgatccagagtcttctcattcaccccccaggtatacagaccagggcggcgaggaggaggaggactatgaaagtgaggagcagttgcagcaccgcatcctgacggcagcccttgagtttgtgcccgcccacgggtggacagcagaggcgattgcagaaggagcccagtttaactggtacacccgccgagccatgctggctgccatctacaacacaacagagctggtgatgatgcaggactcctctccagactttgaggacacttggcgcttcctggaaaaccgggttaatgatgcaatgaacatgggccacactgccaagcaggtaaagtccacaggagaggcactggtgcaaggactcatgggtgcagcagtgacgctcaagaacttgacaggtctaaaccagcgtcggtgagaggaaggggtataagctacaatgcctagaagagaatgagcggacagattgaaagagctttgaaaagtataaggtgccatccacataacctggtgttcacgagaacacactaaaggactcctgagtcactaccacagccacctggaaaccacaaggcatttgatgctaccgttctggtcagggattgggctgcttcttcagttcctaataccagaccaagcctcctgatgcctttctgcactgcaactg

SEQ ID NO: 120531 - DNA, 1482 bp, Homo sapiens
  Payload ID: 3624
  Gene Symbol: COQ9
  Gene Name: coenzyme Q9
  ENST ID: ENST00000567072
  CDS Start-End: 13-864
cccgcttccaaaatggcggcggcggcggtatctggtgcgcttggccgggcgggctggaggctcctgcagctgcgatgcctgcccgtggcccgttgccgacaagccctggtgccgcgtgccttccatgcttcagctgtggggctaaggtcttcagatgagcagaagcagcagcctcccaactcattttctcagcagcattctgagacacagggggcagaaaaacctgatccagagtcttctcattcaccccccaggtatacagaccagggcggcgaggaggaggaggactatgaaagtgaggagcagttgcagcaccgcatcctgacggcagcccttgagtttgtgcccgcccacgggtggacagcagaggcgattgcagaaggagcccagtctctgggtctctccagtgcagcagccagcatgttcgggaaggatggcagtgagctaatactgcattttgtgacccagtgcaatacccggctcacacgtgtgctagaagaggagcagaagctggccctcagcatcctcatgctccctcacaacatcccgtccagcctgagcctgctcaccagcatggtggatgacatgtggcattacgctggggaccagtccactgattttaactggtacacccgccgagccatgctggctgccatctacaacacaacagagctggtgatgatgcaggactcctctccagactttgaggacacttggcgcttcctggaaaaccgggttaatgatgcaatgaacatgggccacactgccaagcaggtaaagtccacaggagaggcactggtgcaaggactcatgggtgcagcagtgacgctcaagaacttgacaggtctaaaccagcgtcggtgagaggaaggggtataagctacaatgcctagaagagaatgagcggacagattgaaagagctttgaaaagtataaggtgccatccacataacctggtgttcacgagaacacactaaaggactcctgagtcactaccacagccacctggaaaccacaaggcatttgatgctaccgttctggtcagggattgggctgcttcttcagttcctaataccagaccaagcctcctgatgcctttctgcactgcaactgtgtgattgaaaaatgagatgttcatccaagcagtcaagccacagaaacccagcatgtccctgtcacaatctcatgggcaccttgatcatgtcttaaccttcccttaaccttggggctcccaagccagagtcaaggtctgacgccacctcaaggtgacagctcatctccagcacagcacaggcgtgtgcacacagaggtgttccttgcagccccctccctctcaggtgtcctgagatgctgttcctgggagccccctcagaaaactgcctcacctgagacaagtgcctgctggacagaggtgtgattccaggcctggtgtcacatgacaccagcatgcattgcaggattattagtgtattttgagtctgt

SEQ ID NO: 120532 - DNA, 581 bp, Homo sapiens
  Payload ID: 3624
  Gene Symbol: COQ9
  Gene Name: coenzyme Q9
  ENST ID: ENST00000565964
  CDS Start-End: 66-581
ctccttagggccgtggtcccgtagctaccggtcgcgtcgccgtgggcgacgtgcccgcttccaaaatggcggcggcggcggtatctggtgcgcttggccgggcgggctggaggctcctgcagctgcgatgcctgcccgtggcccgttgccgacaagccctggtgccgcgtgccttccatgcttcagctgtggggctaaggtcttcagatgagcagaagcagcagcctcccaactcattttctcagcagcattctgagacacagggggcagaaaaacctgatccagagtcttctcattcaccccccaggtatacagaccagggcggcgaggaggaggaggactatgaaagtgaggagcagttgcagcaccgcatcctgacggcagcccttgagtttgtgcccgcccacgggtggacagcagaggcgattgcagaaggagcccaggccctcagcatcctcatgctccctcacaacatcccgtccagcctgagcctgctcaccagcatggtggatgacatgtggcattacgctggggaccagtccactgattttaactggtacacccgccgagccatgctggct

SEQ ID NO: 120533 - DNA, 1234 bp, Homo sapiens
  Payload ID: 3625
  Gene Symbol: CFL1
  Gene Name: cofilin 1 (non-muscle)
  Uniprot ID: P23528
  ENST ID: ENST00000308162
  CDS Start-End: 235-735
ggccggcgggaagactccgttacccagcgagcgaggcggcggcgcagggccagcggactccatttcccgtcggctcgcggtgggagcgccggaagcccgccccacccctcattgtgcggctcctactaaacggaaggggccgggagaggccgcgttcagtcgggtcccggcagcggctgcagcgctctcgtcttctgcggctctcggtgccctctccttttcgtttccggaaacatggcctccggtgtggctgtctctgatggtgtcatcaaggtgttcaacgacatgaaggtgcgtaagtcttcaacgccagaggaggtgaagaagcgcaagaaggcggtgctcttctgcctgagtgaggacaagaagaacatcatcctggaggagggcaaggagatcctggtgggcgatgtgggccagactgtcgacgacccctacgccacctttgtcaagatgctgccagataaggactgccgctatgccctctatgatgcaacctatgagaccaaggagagcaagaaggaggatctggtgtttatcttctgggcccccgagtctgcgccccttaagagcaaaatgatttatgccagctccaaggacgccatcaagaagaagctgacagggatcaagcatgaattgcaagcaaactgctacgaggaggtcaaggaccgctgcaccctggcagagaagctggggggcagtgccgtcatctccctggagggcaagcctttgtgagccccttctggccccctgcctggagcatctggcagccccacacctgcccttgggggttgcaggctgcccccttcctgccagaccggaggggctggggggatcccagcagggggagggcaatcccttcaccccagttgccaaacagaccccccaccccctggattttccttctccctccatcccttgacggttctggccttcccaaactgcttttgatcttttgattcctcttgggctgaagcagaccaagttccccccaggcaccccagttgtgggggagcctgtattttttttaacaacatccccattccccacctggtcctcccccttcccatgctgccaacttctaaccgcaatagtgactctgtgcttgtctgtttagttctgtgtataaatggaatgttgtggagatgacccctccctgtgccggctggttcctctcccttttcccctggtcacggctactcatggaagcaggaccagtaagggaccttcgatt

SEQ ID NO: 120534 - DNA, 758 bp, Homo sapiens
  Payload ID: 3625
  Gene Symbol: CFL1
  Gene Name: cofilin 1 (non-muscle)
  ENST ID: ENST00000534769
  CDS Start-End: 49-663
cctggacttccgcaagtcgcccctgcggggctggactgttctctccagatggtgagtccggggcatggtcacctgcgggagagaaaagagttaactccacactccacgaatccggcagctgcgaggatctgggatgcaacctactcagatggttacgtgagaccggcctccggtgtggctgtctctgatggtgtcatcaaggtgttcaacgacatgaaggtgcgtaagtcttcaacgccagaggaggtgaagaagcgcaagaaggcggtgctcttctgcctgagtgaggacaagaagaacatcatcctggaggagggcaaggagatcctggtgggcgatgtgggccagactgtcgacgacccctacgccacctttgtcaagatgctgccagataaggactgccgctatgccctctatgatgcaacctatgagaccaaggagagcaagaaggaggatctggtgtttatcttctgggcccccgagtctgcgccccttaagagcaaaatgatttatgccagctccaaggacgccatcaagaagaagctgacagggatcaagcatgaattgcaagcaaactgctacgaggaggtcaaggaccgctgcaccctggcagagaagctggggggcagtgccgtcatctccctggagggcaagcctttgtgagccccttctggccccctgcctggagcatctggcagccccacacctgcccttgggggttgcaggctgcccccttcctgccagaccggaggggctgg

SEQ ID NO: 120535 - DNA, 567 bp, Homo sapiens
  Payload ID: 3625
  Gene Symbol: CFL1
  Gene Name: cofilin 1 (non-muscle)
  ENST ID: ENST00000526975
  CDS Start-End: 296-567
cgggagtccgggcgggggcggtgctgtggaatgtccccgactacaacccccgctcggagccggccggcgggaagactccgttacccagcgagcgaggcggcggcgcagggccagcggactccatttcccgtcggctcgcggtgggagcgccggaagcccgccccacccctcattgtgcggctcctactaaacggaaggggccgggagaggccgcgttcagtcgggtcccggcagcggctgcagcgctctcgtcttctgcggctctcggtgccctctccttttcgtttccggaaacatggcctccggtgtggctgtctctgatggtgtcatcaaggtgttcaacgacatgaaggtgcgtaagtcttcaacgccagaggaggtgaagaagcgcaagaaggcggtgctcttctgcctgagtgaggacaagaagaacatcatcctggaggagggcaaggagatcctggtgggcgatgtgggccagactgtcgacgacccctacgccacctttgtcaagatgctgccagataaggactgccgctatgccctctatgatgcaacctatgagac

SEQ ID NO: 120536 - DNA, 962 bp, Homo sapiens
  Payload ID: 3625
  Gene Symbol: CFL1
  Gene Name: cofilin 1 (non-muscle)
  ENST ID: ENST00000527344
  CDS Start-End: 152-601
acgtggccggcttcttctgcagttccggggagtttgggggaccagatttaccttggattgcccctccctctcctggctcgggcaccccgaagcacgacgcagagcctccggtgtggctgtctctgatggtgtcatcaaggtgttcaacgacatgaaggtgcgtaagtcttcaacgccagaggaggtgaagaagcgcaagaaggcggtgctcttctgcctgagtgaggacaagaagaacatcatcctggaggagggcaaggagatcctggtgggcgatgtgggccagactgtcgacgacccctacgccacctttgtcaagatgctgccagataaggactgccgctatgccctctatgatgcaacctatgagaccaaggagagcaagaaggaggatctggtgtttatcttctgggcccccgagtctgcgccccttaagagcaaaatgatttatgccagctccaaggacgccatcaagaagaagctgacagggatcaagcatgaattgcaagcaaactgctacgaggaggtcaaggaccgctgcaccctggcagagaagctggggggcagtgccgtcatctccctggagggcaagcctttgtgagccccttctggccccctgcctggagcatctggcagccccacacctgcccttgggggttgcaggctgcccccttcctgccagaccggaggggctggggggatcccagcagggggagggcaatcccttcaccccagttgccaaacagaccccccaccccctggattttccttctccctccatcccttgacggttctggccttcccaaactgcttttgatcttttgattcctcttgggctgaagcagaccaagttccccccaggcaccccagttgtgggggagcctgtattttttttaacaacatccccattccccacctggtcctcccccttcccatgctgccaacttctaaccgcaatagtg

SEQ ID NO: 120537 - DNA, 860 bp, Homo sapiens
  Payload ID: 3625
  Gene Symbol: CFL1
  Gene Name: cofilin 1 (non-muscle)
  ENST ID: ENST00000524553
  CDS Start-End: 129-578
ctcctggctcgggcaccccgaagcacgacgcagagtaggaagagtttaaagacctcgaggcctctgggcacttgagtttggcctccggtgtggctgtctctgatggtgtcatcaaggtgttcaacgacatgaaggtgcgtaagtcttcaacgccagaggaggtgaagaagcgcaagaaggcggtgctcttctgcctgagtgaggacaagaagaacatcatcctggaggagggcaaggagatcctggtgggcgatgtgggccagactgtcgacgacccctacgccacctttgtcaagatgctgccagataaggactgccgctatgccctctatgatgcaacctatgagaccaaggagagcaagaaggaggatctggtgtttatcttctgggcccccgagtctgcgccccttaagagcaaaatgatttatgccagctccaaggacgccatcaagaagaagctgacagggatcaagcatgaattgcaagcaaactgctacgaggaggtcaaggaccgctgcaccctggcagagaagctggggggcagtgccgtcatctccctggagggcaagcctttgtgagccccttctggccccctgcctggagcatctggcagccccacacctgcccttgggggttgcaggctgcccccttcctgccagaccggaggggctggggggatcccagcagggggagggcaatcccttcaccccagttgccaaacagaccccccaccccctggattttccttctccctccatcccttgacggttctggccttcccaaactgcttttgatcttttgattcctcttgggctgaagcagaccaagttccccccaggcaccccagttgtgggggagcc

SEQ ID NO: 120538 - DNA, 1878 bp, Homo sapiens
  Payload ID: 3625
  Gene Symbol: CFL1
  Gene Name: cofilin 1 (non-muscle)
  Uniprot ID: P23528
  ENST ID: ENST00000525451
  CDS Start-End: 717-1217
aactgcgaagcccccctctctctccccgttgctcttggaaactctaaggctcagaaaagggggcgctagcctcatattcatgtagggtcgctcgcgggaggcggggtcaagctgctgtctccacctggagcgccgggagtccgggcgggggcggtgctgtggaatgtccccgactacaacccccggtcgggattccaggctaatcaatagttgcttcgattcagaaatgcaaaaccctaacctcactcaaaaatttcaggccaagggatccagataataccagatgggtcttaagaaagccgttttgctgtgggataaagagccgcttagtcggggatcgttttcgggtcattttactgagcgccgcctcgccgggctcagagcggttcctgggaaattggaccaatgggctcgcgctgcgcgctgcggtgccgcccaggacctgggcctacatttccctacatgcactgcagctcggagccggccggcgggaagactccgttacccagcgagcgaggcggcggcgcagggccagcggactccatttcccgtcggctcgcggtgggagcgccggaagcccgccccacccctcattgtgcggctcctactaaacggaaggggccgggagaggccgcgttcagtcgggtcccggcagcggctgcagcgctctcgtcttctgcggctctcggtgccctctccttttcgtttccggaaacatggcctccggtgtggctgtctctgatggtgtcatcaaggtgttcaacgacatgaaggtgcgtaagtcttcaacgccagaggaggtgaagaagcgcaagaaggcggtgctcttctgcctgagtgaggacaagaagaacatcatcctggaggagggcaaggagatcctggtgggcgatgtgggccagactgtcgacgacccctacgccacctttgtcaagatgctgccagataaggactgccgctatgccctctatgatgcaacctatgagaccaaggagagcaagaaggaggatctggtgtttatcttctgggcccccgagtctgcgccccttaagagcaaaatgatttatgccagctccaaggacgccatcaagaagaagctgacagggatcaagcatgaattgcaagcaaactgctacgaggaggtcaaggaccgctgcaccctggcagagaagctggggggcagtgccgtcatctccctggagggcaagcctttgtgagccccttctggccccctgcctggagcatctggcagccccacacctgcccttgggggttgcaggctgcccccttcctgccagaccggaggggctggggggatcccagcagggggagggcaatcccttcaccccagttgccaaacagaccccccaccccctggattttccttctccctccatcccttgacggttctggccttcccaaactgcttttgatcttttgattcctcttgggctgaagcagaccaagttccccccaggcaccccagttgtgggggagcctgtattttttttaacaacatccccattccccacctggtcctcccccttcccatgctgccaacttctaaccgcaatagtgactctgtgcttgtctgtttagttctgtgtataaatggaatgttgtggagatgacccctccctgtgccggctggttcctctcccttttcccctggtcacggctactcatggaagcaggaccagtaagggaccttcgattaaaaaaaaaaaagacaataataaaaaggctcattaatgggatgtgtttttcaaggttgggacacaggagacttcaggattgggggtgcactgggataatggtgctatctctctcctctgtactccacacccaaccagcccctgcacacccttatctggctcc

SEQ ID NO: 120539 - DNA, 636 bp, Homo sapiens
  Payload ID: 3625
  Gene Symbol: CFL1
  Gene Name: cofilin 1 (non-muscle)
  ENST ID: ENST00000531413
  CDS Start-End: 108-557
ggagcgccgggagtccgggcgggggcggtgctgtggaatgtccccgactacaacccccggcctccggtgtggctgtctctgatggtgtcatcaaggtgttcaacgacatgaaggtgcgtaagtcttcaacgccagaggaggtgaagaagcgcaagaaggcggtgctcttctgcctgagtgaggacaagaagaacatcatcctggaggagggcaaggagatcctggtgggcgatgtgggccagactgtcgacgacccctacgccacctttgtcaagatgctgccagataaggactgccgctatgccctctatgatgcaacctatgagaccaaggagagcaagaaggaggatctggtgtttatcttctgggcccccgagtctgcgccccttaagagcaaaatgatttatgccagctccaaggacgccatcaagaagaagctgacagggatcaagcatgaattgcaagcaaactgctacgaggaggtcaaggaccgctgcaccctggcagagaagctggggggcagtgccgtcatctccctggagggcaagcctttgtgagccccttctggccccctgcctggagcatctggcagccccacacctgcccttgggggttgcaggctgcccccttcctgcc

SEQ ID NO: 120540 - DNA, 737 bp, Homo sapiens
  Payload ID: 3625
  Gene Symbol: CFL1
  Gene Name: cofilin 1 (non-muscle)
  ENST ID: ENST00000534784
  CDS Start-End: 500-737
cccggttggggcgtgggtgcctgcgattaaggccttgcaccgcaaggcttggagggggcatcgcagagaccgcggcccgttcgggagcgcatctaacgagctgcgttctcacccgtgcatcgggcgagggctggaacggcgctgtctgtcggcgcgtgcgcgcacgctcaggcccggccgccggtgccgaagccctgggccagcgaggccttcccggatgggcctgagtgagggtggagccgagtttagggaagtgacccaggcgggcaccgcccggaaaccaccccgccccctgtatacggcccgagggctgagaaaaccgaaggttatgtagcttgcccaggctcctgcctgcaggagatgggtctgatacacccgttgttttagggcgattccacagggttagggacctggagatgctgctgcctctcggatacgcgtttctgcattggcctccggtgtggctgtctctgatggtgtcatcaaggtgttcaacgacatgaaggtgcgtaagtcttcaacgccagaggaggtgaagaagcgcaagaaggcggtgctcttctgcctgagtgaggacaagaagaacatcatcctggaggagggcaaggagatcctggtgggcgatgtgggccagactgtcgacgacccctacgccacctttgtcaagatgctgccagataaggactgccgctatgccctctatgatgcaacctatgagaccaaggagagcaagaagg

SEQ ID NO: 120541 - DNA, 1062 bp, Homo sapiens
  Payload ID: 3625
  Gene Symbol: CFL1
  Gene Name: cofilin 1 (non-muscle)
  ENST ID: ENST00000531407
  CDS Start-End: 286-735
gctggtgcgcccgcgcggacaccggccgcggggggaggggttcggggcgcgcgctggggcgcccctcgcggaacggccggcgtcgcgcctttcttcttaggggcgcgctctcgactggagcatgcggcgtccaaacccggcccgggggcggcgaggaaaaagcgcgcgagaggtctcggcgcgcgcgccccacccaaggctgttcctgtctgcgcgtcaccctccctcggcagccgggcctccggtgtggctgtctctgatggtgtcatcaaggtgttcaacgacatgaaggtgcgtaagtcttcaacgccagaggaggtgaagaagcgcaagaaggcggtgctcttctgcctgagtgaggacaagaagaacatcatcctggaggagggcaaggagatcctggtgggcgatgtgggccagactgtcgacgacccctacgccacctttgtcaagatgctgccagataaggactgccgctatgccctctatgatgcaacctatgagaccaaggagagcaagaaggaggatctggtgtttatcttctgggcccccgagtctgcgccccttaagagcaaaatgatttatgccagctccaaggacgccatcaagaagaagctgacagggatcaagcatgaattgcaagcaaactgctacgaggaggtcaaggaccgctgcaccctggcagagaagctggggggcagtgccgtcatctccctggagggcaagcctttgtgagccccttctggccccctgcctggagcatctggcagccccacacctgcccttgggggttgcaggctgcccccttcctgccagaccggaggggctggggggatcccagcagggggagggcaatcccttcaccccagttgccaaacagaccccccaccccctggattttccttctccctccatcccttgacggttctggccttcccaaactgcttttgatcttttgattcctcttgggctgaagcagaccaagttccccccaggcaccccagttgtgggggagcctgtattttttttaacaacatccccattccccacctggtcctcccc

SEQ ID NO: 120542 - DNA, 855 bp, Homo sapiens
  Payload ID: 3625
  Gene Symbol: CFL1
  Gene Name: cofilin 1 (non-muscle)
  ENST ID: ENST00000532134
  CDS Start-End: 377-855
accagcagtatcactcgggctcctgagtgccgagctggccagtagctgccagagcctcccgctttgggctgggcaggaacctgaaaggtacagaggagttctgaacatgaaagccagccagtcatctttgaataagtccccagcaggctttgtggccctgggttaaaatactaagtcgaaaagaggataagtcatttgctcaaggccaggcatcactggtgagatttggactcaggcttgccaaatcccccaagccagaaaatcatactcccgcactcccactttgccttccactccccttgccccttcctcactggcatggaagagtcctggacttccgcaagtcgcccctgcggggctggactgttctctccagatggcctccggtgtggctgtctctgatggtgtcatcaaggtgttcaacgacatgaaggtgcgtaagtcttcaacgccagaggaggtgaagaagcgcaagaaggcggtgctcttctgcctgagtgaggacaagaagaacatcatcctggaggagggcaaggagatcctggtgggcgatgtgggccagactgtcgacgacccctacgccacctttgtcaagatgctgccagataaggactgccgctatgccctctatgatgcaacctatgagaccaaggagagcaagaaggaggatctggtgtttatcttctgggcccccgagtctgcgccccttaagagcaaaatgatttatgccagctccaaggacgccatcaagaagaagctgacagggatcaagcatgaattgcaagcaaactgctacgaggaggtcaaggaccgctgcaccctggcagagaagctggggggcagtgccgtcatctc

SEQ ID NO: 120543 - DNA, 647 bp, Homo sapiens
  Payload ID: 3625
  Gene Symbol: CFL1
  Gene Name: cofilin 1 (non-muscle)
  ENST ID: ENST00000530413
  CDS Start-End: 280-647
atcctgtaaaatgagggaaggggttgttgaactaggtgatcagaggccatggctgccattctgaggttgtgtcccatctggttctttgacagtgacttgggtgggaaaactagtgacttgccttgggaagggcactagtgaccactcgggacgtggactgagatcttctgaaaaaacaaggggcagttccctagaatccttttcttgacgtatacgtggcatgtctcctaggcctccggtgtggctgtctctgatggtgtcatcaaggtgttcaacgacatgaaggtgcgtaagtcttcaacgccagaggaggtgaagaagcgcaagaaggcggtgctcttctgcctgagtgaggacaagaagaacatcatcctggaggagggcaaggagatcctggtgggcgatgtgggccagactgtcgacgacccctacgccacctttgtcaagatgctgccagataaggactgccgctatgccctctatgatgcaacctatgagaccaaggagagcaagaaggaggatctggtgtttatcttctgggcccccgagtctgcgccccttaagagcaaaatgatttatgccagctccaaggacgccatcaagaagaagctgacagggatcaagcatgaattgcaagcaaactgcta

SEQ ID NO: 120544 - DNA, 6747 bp, Homo sapiens
  Payload ID: 3626
  Gene Symbol: CFL2
  Gene Name: cofilin 2 (muscle)
  Uniprot ID: Q9Y281
  ENST ID: ENST00000298159
  CDS Start-End: 151-651
ggcccgccgagccccgccacctccctcgggctgcagctcccggcgtgccccgcactctccgctgcccacccgctcgcccgcccctccttctcctcccagtgccacagagccgaagcccgagctgccgccgcagccacagccgagggcactatggcttctggagttacagtgaatgatgaagtcatcaaagtttttaatgatatgaaagtaaggaaatcttctacacaagaggagatcaaaaagagaaagaaagcagttctcttctgtttaagcgatgacaaaagacaaataattgtagaggaagcaaagcagatcttggtgggtgacattggtgatactgtagaggacccctacacatcttttgtgaagttgctacctctgaatgattgccgatatgctttgtacgatgccacatacgaaacaaaagagtctaagaaagaagacctagtatttatattctgggctcctgaaagtgcacctttaaaaagcaagatgatttatgctagctctaaagatgccattaaaaagaaatttacaggtattaaacatgagtggcaagtaaatggcttggatgatattaaggaccgttcgacacttggagagaaattgggaggcaatgtagtagtttcacttgaaggaaaaccattataaaatgacagtcaagtgccatctggatcttaaggagcttccatttctccagctcagtccattggaatagtattaggttttggttttttgttgtatttccccctttccactgggcccttccaacacaatgaatgaaggaaatatcatttatttaagcagcctatcagtgattgccattagactgttgaatactgttacttttatatagaacccaaggaatgccttcctgtcatattttagccaaaacaactggttatatgcctcccttgcagcaagcactacaatgtatgtgatcgtcaatgtgaatagcttagaatactgcaaaggataagctaattgaatgccttgaaagtattatccactggtcagatggtcaacttttttcagtattatttatagttggcacttgattgcagttctgtgaggcttgagcattcatacacctcacctgccttggcaagcctattttagtgatatggcagcacggatataacactatgcattaaaagcactttttgtaataagtttaatatcctaaaaggaatgccaattaagttttgttaactgtgtcatcaacttatcctagtacctcagtgttcattcctgttacctgcatatcttcttaaaagaaatagctgttattaatgcctttttgttttccattgagtgtacactactgaataagtgtaggagttttatgtttaccatgtgagtcctgcaacactaaagatattttgaatatcagtcatgatggcaatttctgtataaaagagccttaaatggaacattgttttgagatcaaactccccaccctcacaaaaatggccacgttgcaataaaaattgtggcatattacagaacgttgccttgttttccttggaaattttgcaaaatgttatgtgaaacaacttctagggtaaaaacagctattactaatctctgcactggtcatttgagaattttttttgtacagcattcatgtgtgatattttccagatttgttggatctatttggtttaaaaagtattctatcttaaggccaactaatataaaataccattgttaaagaatggtacttttataaacattagtgtatttatttcctatgtgttaatatgaagatcagaaattattttttgcactttggcataaatacttttcaatatctgatttgttctctggataaattagcatagttatttttttattcacatttacatttctaagtagttgtatagtagaagcaggaagctcttattgcttatttggtcgtaatgaaaataatttgtaaaatgtcctttaaaagtttaatgatacttctgatgtttcggaacagtcatttcacctactatttctgaatatattttgcaaattgaattggaataggaattgataatagcagtcttaaacattagtagtgggatttggctatggtccagactgtgctccttatagagaatttgatctgctcagtgtgagcggtttgctgttagccagggctatttatggcaaacacatgcttttgtatcttgtcatagttatccacaaatggcaaaactggacttgattctactggtatgcaaaacaggcatgctagtaagcagtcagtcgtggctcagaacttaaccccatagctcagaggaatgcttttagcagaaaacaggaaagaaaatatcccttaaaaattttttttgaatgtgtggaagtaattttagtataattagattttttccatatttttgaaagatttttcagatgtgaacattaaaaatagggattaaatgtctaggcttccatttaaaattatatgaatggtttgggatctttttgcactgagcaattttatttcaggcttccagctgtccctgtgagttatcctggacatttcgatggtttttggtaaggccaaactctgataagcaaaacagagaatactgacgtatacttaaccatatgtgtaactgatacttggcaccatggaatttttcattgagttatttcctcattcttttaaaaaataagggactataaatcagttatgtagtatcttttgtttttgtagctgattccttaactttcttgtatgcctctagtaatttcagagattaaatattgctttaaactgtgatactttgatttgctagattgacaaaactgatactaatataattaagttcatctttgaaatacatctttgtgcgtagagccaaaaaaagagataaaattaataatagttcacttgttatttgagattaatttggcatttgaaatgatcattttattttacaatcatttataatgaatcaatgttccagttagctttaaaaggtatacggtgctaattagtaaaatattgaaggcaatattttactgctagcttgcaaagttatgagagtttaaaaaataaaatatatgaaaatatgtaaagctgttgagatgtgtttacttatacttcagaacattaaaagtttaaaaactggtatttcagatcaaagaggcatcattatctttattctgtttttcaggattttagttggtaatactttctcatttatcaataacaattttctttaaaaactgagtgttacagcaattaattttagcattttcagacaaatgggaacagttggcatgtgtcccaaactggctatcagctgttgttttccatcattatctaaaatagtgtggccagcattgtgtattgaaatgtgcctttttcgtacattggaagagaagcctcttactgggtttgagtttctctgatacagaacatttgtagcagctaatttatggaatctggcaaataagctttgggaggaaattcttttaaaagtgttttcttgttaaggaataatctcaacaatggtaaatcatcaagaggttgagaagactcttaggtttgccactcagaaaaaacagtctcattttgctcttcataggtcctgtttttgcttgcacatttaatagtaggtggagatgcaaaacaacgtgaatgttcatttttttatgaatagtattaaagctactagaggtgggcaggcaggtcccagtaaatgttgcctttttttttttttttttttgagacagggtctcactctgttgcccaggctggagtgcagtgtcaaaatttcagctcacttcaaactcaaccttcccagctcagatgatcctcccacctcagcctcccaagtagctgggactacaggcatgcaccaccatgcctaattttttttttttttttttttgtatctcttttgtagagactgagtttggccatgttgcctaggctgatctccaactcctgggctcaagctgtcctctgacctccgcctcccaaaagtgctaggattgcatgcatgagccaccacttcaaaagctcaaatactgcttttgaagacagcatgagtttatggatgttctgtctcctttcagcccataaagaagtctgaggcttttcttttgctctggaacatccaactaattgctttatttccatgtagaagtagaggaatcatccctccacttaaatttcctctcataatgcaatttggcaaattaaatctctaaatctcagttttttaacccatagtatgggaacggtaatatctgtttaccatgtttcctgagtactaaatatggaaatggtttttgaaaacaggaaaatgctatgtaaatgcaataatctgtttaaactattcattcttaattactgtatgtaagtagataaatattaaatgtttttgttaaaagatgtattacagatcattgaacctctatttttgtaacttccgtgtgtgtacatatatatatgtatatatatatgtatatatacacacatacacacacatttttttcttcttttttggacagggtttcactctattgcccaggctgctgtgcagtggcacaatcatagctcaatataaccttgaactcctgggctcaagtgatcctcccacctcaagctcctgagcagctgggattatagacatacaccaccatgcccagctaattttttttttttttttttttttgagacaaagtctcactgtatcacccacgctggagggcggtggtgtgatctcggctcactgcaacctctgcctcctgggttcaagcaattctcctgcctcagcctcccgaatagctgggactacaggcatatgccaccacacctggctaatttttgtatttttaatacagatgggatttcaccatgttggccaggctggtctcaaactcctgacctcaggtgatctgcctgcctcagcctcccaaagtgctgggattacaggcatgagccaccatgcccggcctgcccagctaatttaaaaaaaaaaaaattgttgagacggggtctcactgtgttgtctaggctagtcttgaattcctggccttaagcaatccacccatctcaacttcccaaagcactgggattataggtgtgaaccactgggctgagcctatttagtgtgtatatagagatggggtttcaacatgttggctaggctggtcttgaactcctgaccttaggagatccgcccaccttggcttcccaaactgctgggattatgggcttgagccactgcactggccctatttagtatatttttaaagtagcatctttcaagaatatttgaaaaacaatcctaagattgttttctaaaaaagctcatgctcataaaaatctaaaaagttgtatatttcaaagatgttctgaaatatttcagtattgtaaacttatggaatctgtgccaaacgaggattgtatagacacagaaagctggtgtctcttaatccttttccagaaacttggatatatccctcccctacccatctttctaagaagagatagtactttatgttatagtgggtaagtcctaggactttggcattagattgcttggttgtttacatagagccctttaacacttagtaactggatagtcttagacaaatcgtataacctcttggaagcttagttactacatctataaaatggggatgattgtactccgtctcataggattgtgagcataactgaaagcacttggaatagttcctagcacataataagggctcagtaggatgatcctataagatttacaggccaaaccagaacactttttgaaaatgaaagggagagctattaattatgccaagacaacaggcttgagataggccaatcccaagcaaaccaggaggtgttgtccagaagtataggctaatattaaaatgtaatacttaaacaatgaactgtatgaaagactcaagatcatcatttattaattttaattatataatgtattagcatactgacttgaggatctcacgaagtatatgagtggtcttaagtaaacctcagagagatcgaatttggctttttaagcctttttaatagcgttccttctgacttttttttttttttggagatggagtcttcctctgtcacccaggctggagtgcagtgacgcgatattggctcgctgcaagctccaccttctgggttcacgccattctcctgcctcagtctcccgagtagctgggactacaggtgtccgccaccacgcccggctaactttttgtatttttagtagaggtggggtttcaccgtgttagccaggatggtctccatctcctgacctcatgatccgcccaccttggcctcccaaagtgctgggattacaagcatgagcctccttttgactttcatacttgtaaactgtcagatattatgttttgctactatcagtatgctttgtctatagcagcttctgctaatagttgcttttcatctcgtggatttggaaaaccaggtttgttataattatgtataagcaaataaataggcccagagtgaagacttgagagcaaaatgcctgaacacatgcaccttatttttgggggctgtttaaataactttgtgatgtactttcagggtttgggttgttttttgtttgttttaataaaaggtatgtaaaagagctgaactgtaaataggtattactgtatctcagggaggtgtctgcagtattattagtatttaaggaaatcatacttgctgttgacagtacctgtatcattaaaggctcacaaaga

SEQ ID NO: 120545 - DNA, 3131 bp, Homo sapiens
  Payload ID: 3626
  Gene Symbol: CFL2
  Gene Name: cofilin 2 (muscle)
  Uniprot ID: Q9Y281
  ENST ID: ENST00000341223
  CDS Start-End: 153-653
aaacatttcagggatgggacaacttgtatttgtccctttcgcttccacgtccaaacccctttaagaaggatgaatgggcaggatgagttagactccttcgctgtatcgtctactgattcttaaaatgtgacaaatctgattggacgacttacatggcttctggagttacagtgaatgatgaagtcatcaaagtttttaatgatatgaaagtaaggaaatcttctacacaagaggagatcaaaaagagaaagaaagcagttctcttctgtttaagcgatgacaaaagacaaataattgtagaggaagcaaagcagatcttggtgggtgacattggtgatactgtagaggacccctacacatcttttgtgaagttgctacctctgaatgattgccgatatgctttgtacgatgccacatacgaaacaaaagagtctaagaaagaagacctagtatttatattctgggctcctgaaagtgcacctttaaaaagcaagatgatttatgctagctctaaagatgccattaaaaagaaatttacaggtattaaacatgagtggcaagtaaatggcttggatgatattaaggaccgttcgacacttggagagaaattgggaggcaatgtagtagtttcacttgaaggaaaaccattataaaatgacagtcaagtgccatctggatcttaaggagcttccatttctccagctcagtccattggaatagtattaggttttggttttttgttgtatttccccctttccactgggcccttccaacacaatgaatgaaggaaatatcatttatttaagcagcctatcagtgattgccattagactgttgaatactgttacttttatatagaacccaaggaatgccttcctgtcatattttagccaaaacaactggttatatgcctcccttgcagcaagcactacaatgtatgtgatcgtcaatgtgaatagcttagaatactgcaaaggataagctaattgaatgccttgaaagtattatccactggtcagatggtcaacttttttcagtattatttatagttggcacttgattgcagttctgtgaggcttgagcattcatacacctcacctgccttggcaagcctattttagtgatatggcagcacggatataacactatgcattaaaagcactttttgtaataagtttaatatcctaaaaggaatgccaattaagttttgttaactgtgtcatcaacttatcctagtacctcagtgttcattcctgttacctgcatatcttcttaaaagaaatagctgttattaatgcctttttgttttccattgagtgtacactactgaataagtgtaggagttttatgtttaccatgtgagtcctgcaacactaaagatattttgaatatcagtcatgatggcaatttctgtataaaagagccttaaatggaacattgttttgagatcaaactccccaccctcacaaaaatggccacgttgcaataaaaattgtggcatattacagaacgttgccttgttttccttggaaattttgcaaaatgttatgtgaaacaacttctagggtaaaaacagctattactaatctctgcactggtcatttgagaattttttttgtacagcattcatgtgtgatattttccagatttgttggatctatttggtttaaaaagtattctatcttaaggccaactaatataaaataccattgttaaagaatggtacttttataaacattagtgtatttatttcctatgtgttaatatgaagatcagaaattattttttgcactttggcataaatacttttcaatatctgatttgttctctggataaattagcatagttatttttttattcacatttacatttctaagtagttgtatagtagaagcaggaagctcttattgcttatttggtcgtaatgaaaataatttgtaaaatgtcctttaaaagtttaatgatacttctgatgtttcggaacagtcatttcacctactatttctgaatatattttgcaaattgaattggaataggaattgataatagcagtcttaaacattagtagtgggatttggctatggtccagactgtgctccttatagagaatttgatctgctcagtgtgagcggtttgctgttagccagggctatttatggcaaacacatgcttttgtatcttgtcatagttatccacaaatggcaaaactggacttgattctactggtatgcaaaacaggcatgctagtaagcagtcagtcgtggctcagaacttaaccccatagctcagaggaatgcttttagcagaaaacaggaaagaaaatatcccttaaaaattttttttgaatgtgtggaagtaattttagtataattagattttttccatatttttgaaagatttttcagatgtgaacattaaaaatagggattaaatgtctaggcttccatttaaaattatatgaatggtttgggatctttttgcactgagcaattttatttcaggcttccagctgtccctgtgagttatcctggacatttcgatggtttttggtaaggccaaactctgataagcaaaacagagaatactgacgtatacttaaccatatgtgtaactgatacttggcaccatggaatttttcattgagttatttcctcattcttttaaaaaataagggactataaatcagttatgtagtatcttttgtttttgtagctgattccttaactttcttgtatgcctctagtaatttcagagattaaatattgctttaaactgtgatactttgatttgctagattgacaaaactgatactaatataattaagttcatctttgaaatacatctttgtgcgtagagccaaaaaaagagataaaattaataatagttcacttgttatttgagattaatttggcatttgaaatgatcattttattttacaatcatttataatgaatcaatgttccagttagctttaaaaggtatacggtgctaattagtaaaatattgaaggcaatattttactgctagcttgcaaagttatgagagtttaaaaaataaaatatatgaaaatatgtaaagctgttgagatgtgtttacttatacttcagaacattaaaagtttaaaaactggt

SEQ ID NO: 120546 - DNA, 1223 bp, Homo sapiens
  Payload ID: 3626
  Gene Symbol: CFL2
  Gene Name: cofilin 2 (muscle)
  ENST ID: ENST00000422678
  CDS Start-End: 38-214
agcccgagctgccgccgcagccacagccgagggcactatggcttctggagttacagtgaatgatgaagtcatcaaagtttttaatgatatgaaagtaaggaaatcttctacacaagaggagatcaaaaagagaaagaaagcagttctcttctgtttaagcgatgacaaaagacaaataattgtagaggaagcaaagcagatcttgggctcctgaaagtgcacctttaaaaagcaagatgatttatgctagctctaaagatgccattaaaaagaaatttacaggtattaaacatgagtggcaagtaaatggcttggatgatattaaggaccgttcgacacttggagagaaattgggaggcaatgtagtagtttcacttgaaggaaaaccattataaaatgacagtcaagtgccatctggatcttaaggagcttccatttctccagctcagtccattggaatagtattaggttttggttttttgttgtatttccccctttccactgggcccttccaacacaatgaatgaaggaaatatcatttatttaagcagcctatcagtgattgccattagactgttgaatactgttacttttatatagaacccaaggaatgccttcctgtcatattttagccaaaacaactggttatatgcctcccttgcagcaagcactacaatgtatgtgatcgtcaatgtgaatagcttagaatactgcaaaggataagctaattgaatgccttgaaagtattatccactggtcagatggtcaacttttttcagtattatttatagttggcacttgattgcagttctgtgaggcttgagcattcatacacctcacctgccttggcaagcctattttagtgatatggcagcacggatataacactatgcattaaaagcactttttgtaataagtttaatatcctaaaaggaatgccaattaagttttgttaactgtgtcatcaacttatcctagtacctcagtgttcattcctgttacctgcatatcttcttaaaagaaatagctgttattaatgcctttttgttttccattgagtgtacactactgaataagtgtaggagttttatgtttaccatgtgagtcctgcaacactaaagatattttgaatatcagtcatgatggcaatttctgtataaaagagccttaaatggaacattgttttgagatcaaactccccaccctcacaaaaatggccacgt

SEQ ID NO: 120547 - DNA, 1387 bp, Homo sapiens
  Payload ID: 3626
  Gene Symbol: CFL2
  Gene Name: cofilin 2 (muscle)
  ENST ID: ENST00000554470
  CDS Start-End: 284-349
cgcgctctgaggtcaggccgaggacgcggacagccggggagccggggccgcgagacagaagggccggcctgggagcgggtggcgccggctggggaccaggcgtgcccacgtgaccgccccgcccgctgcctgcggcccgccgagccccgccacctccctcgggctgcagctcccggcgtgccccgcactctccgctgcccacccgctcgcccgcccctccttctcctcccagtgccacagagccgaagcccgagctgccgccgcagccacagccgagggcactatggcttctggagttacagtgaatgatgaagtcatcaaagtttttaatgatatgaaaggctcctgaaagtgcacctttaaaaagcaagatgatttatgctagctctaaagatgccattaaaaagaaatttacaggtattaaacatgagtggcaagtaaatggcttggatgatattaaggaccgttcgacacttggagagaaattgggaggcaatgtagtagtttcacttgaaggaaaaccattataaaatgacagtcaagtgccatctggatcttaaggagcttccatttctccagctcagtccattggaatagtattaggttttggttttttgttgtatttccccctttccactgggcccttccaacacaatgaatgaaggaaatatcatttatttaagcagcctatcagtgattgccattagactgttgaatactgttacttttatatagaacccaaggaatgccttcctgtcatattttagccaaaacaactggttatatgcctcccttgcagcaagcactacaatgtatgtgatcgtcaatgtgaatagcttagaatactgcaaaggataagctaattgaatgccttgaaagtattatccactggtcagatggtcaacttttttcagtattatttatagttggcacttgattgcagttctgtgaggcttgagcattcatacacctcacctgccttggcaagcctattttagtgatatggcagcacggatataacactatgcattaaaagcactttttgtaataagtttaatatcctaaaaggaatgccaattaagttttgttaactgtgtcatcaacttatcctagtacctcagtgttcattcctgttacctgcatatcttcttaaaagaaatagctgttattaatgcctttttgttttccattgagtgtacactactgaataagtgtaggagttttatgtttaccatgtgagtcctgcaacactaaagatattttgaatatcagtcatgatggcaatttctgtataaaagagccttaaatggaacattgttttgagatcaaactccccaccctcacaaaaatggccacgttgcaataaaaattgtggcatattacagaa

SEQ ID NO: 120548 - DNA, 546 bp, Homo sapiens
  Payload ID: 3626
  Gene Symbol: CFL2
  Gene Name: cofilin 2 (muscle)
  Uniprot ID: Q9Y281
  ENST ID: ENST00000556161
  CDS Start-End: 90-539
tcgcttcctaattttacttaacacgcgaggctttaaaattggcttctggagttacagtgaatgatgaagtcatcaaagtttttaatgatatgaaagtaaggaaatcttctacacaagaggagatcaaaaagagaaagaaagcagttctcttctgtttaagcgatgacaaaagacaaataattgtagaggaagcaaagcagatcttggtgggtgacattggtgatactgtagaggacccctacacatcttttgtgaagttgctacctctgaatgattgccgatatgctttgtacgatgccacatacgaaacaaaagagtctaagaaagaagacctagtatttatattctgggctcctgaaagtgcacctttaaaaagcaagatgatttatgctagctctaaagatgccattaaaaagaaatttacaggtattaaacatgagtggcaagtaaatggcttggatgatattaaggaccgttcgacacttggagagaaattgggaggcaatgtagtagtttcacttgaaggaaaaccattataaaatgaca

SEQ ID NO: 120549 - DNA, 632 bp, Homo sapiens
  Payload ID: 3626
  Gene Symbol: CFL2
  Gene Name: cofilin 2 (muscle)
  Uniprot ID: Q9Y281
  ENST ID: ENST00000555765
  CDS Start-End: 170-619
acagccgagggcactatggtaagacgagcgcgctggccgggaggccgcggcgaggcgagaaaagccccccgcacggccccgggagtgaggccgccattttaacctgattttggcctccaaggcttctggagttacagtgaatgatgaagtcatcaaagtttttaatgatatgaaagtaaggaaatcttctacacaagaggagatcaaaaagagaaagaaagcagttctcttctgtttaagcgatgacaaaagacaaataattgtagaggaagcaaagcagatcttggtgggtgacattggtgatactgtagaggacccctacacatcttttgtgaagttgctacctctgaatgattgccgatatgctttgtacgatgccacatacgaaacaaaagagtctaagaaagaagacctagtatttatattctgggctcctgaaagtgcacctttaaaaagcaagatgatttatgctagctctaaagatgccattaaaaagaaatttacaggtattaaacatgagtggcaagtaaatggcttggatgatattaaggaccgttcgacacttggagagaaattgggaggcaatgtagtagtttcacttgaaggaaaaccattataaaatgacagtcaag

SEQ ID NO: 120550 - DNA, 2625 bp, Homo sapiens
  Payload ID: 3627
  Gene Symbol: CCHCR1
  Gene Name: coiled-coil alpha-helical rod protein 1
  Uniprot ID: Q8TD31
  ENST ID: ENST00000376266
  CDS Start-End: 124-2472
aggggcagaggcggggccgggagcgaggcgtagggggtgtggccaaagcgcagtagggggctctcgcggttggggaacatagatggctggagacagaatctagagccttcaaataatgtggagatgtttccaccttcaggttccactgggctgattcccccctcccactttcaagctcggcccctttcaactctgccaagaatggctcccacctggctctcagacattcccctggtccaacccccaggccatcaagatgtctcagagaggcggctagacacccagagacctcaagtgaccatgtgggaacgggatgtttccagtgacaggcaggagccagggcggagaggcaggtcctgggggctggaggggtcacaggccctgagccagcaggctgaggtgatcgttcggcagctgcaagagctgcggcggctggaggaggaggtccggctcctgcgggagacctcgctgcagcagaagatgaggctagaggcccaggccatggagctagaggctctggcacgggcggagaaggccggccgagctgaggctgagggcctgcgtgctgctttggctggggctgaggttgtccggaagaacttggaagaggggagccagcgggagctggaagaggttcagaggctgcaccaagagcagctgtcctctttgacacaggctcacgaggaggctctttccagtttgaccagcaaggctgagggcttggagaagtctctgagtagtctggaaaccagaagagcaggggaagccaaggagctggccgaggctcagagggaggccgagctgcttcggaagcagctgagcaagacccaggaagacttggaggctcaggtgaccctggttgagaatctaagaaaatatgttggggaacaagtgccttctgaggtccacagccagacatgggaactggagcgacagaagcttctggaaaccatgcagcacttgcaggaggaccgggacagcctgcatgccaccgcggagctgctgcaggtgcgggtgcagagcctcacacacatcctcgccctgcaggaggaggagctgaccaggaaggttcaaccttcagattccctggagcctgagtttaccaggaagtgccagtccctgctgaaccgctggcgggagaaggtgtttgccctcatggtgcagctaaaggcccaggagctggaacacagtgactctgttaagcagctgaagggacaggtggcctcactccaggaaaaagtgacatcccagagccaggagcaggccatcctgcagcgatccctgcaggacaaagccgcagaggtggaggtggagcgtatgggtgccaagggcctgcagttggagctgagccgtgctcaggaggccaggcgtcggtggcagcagcagacagcctcagccgaggagcagctgaggcttgtggtcaatgctgtcagcagctctcagatctggctcgagaccaccatggctaaggtggaaggggctgccgcccagcttcccagcctcaacaaccgactcagctatgctgtccgcaaggtccacaccattcggggcctgattgctcgaaagcttgcccttgctcagctgcgccaggagagctgtcccctaccaccaccggtcacagacgtgagccttgagttgcagcagttgcgggaagaacggaaccgcctggatgcagaactgcagctgagtgcccgcctcatccagcaggaggtgggccgggctcgggagcaaggggaggcagagcggcagcagctgagcaaggtggcccagcagctggagcaggagctgcagcagacccaggagtccctggctagcttggggctgcagctggaggtagcacgccagggccagcaggagagcacagaggaggctgccagtctgcggcaggagctgacccagcagcaggaactctacgggcaagccctgcaagaaaaggtggctgaagtggaaactcggctgcgggagcaactctcagacacagagaggaggctgaacgaggctcggagggagcatgccaaggccgtggtctccttacgccagattcagcgcagagccgcccaggaaaaggagcggagccaggaactcaggcgtctgcaggaggaggcccggaaggaggaggggcagcgactggcccggcgcttgcaggagctagagagggataagaacctcatgctggccaccttgcagcaggaaggtctcctctcccgttacaagcagcagcgactgttgacagttcttccttccctactggataagaagaaatctgtggtgtccagccccaggcctccagagtgttcagcatctgcacctgtagcagcagcagtgcccaccagggagtccataaaagggtccctctctgtcctgctcgatgacctgcaggacctgagtgaagccatttccaaagaggaagctgtttgtcaaggagacaaccttgacagatgctccagctccaatccccagatgagcagctaagcagctgacagttggagggaaagccagcctgggggctgggaggatcctggagaagtgggtggggacagaccagcccttccccatcctggggttgccctgggggataccagctgagtctgaattctgctctaaataaagacgactacagaagga

SEQ ID NO: 120551 - DNA, 2600 bp, Homo sapiens
  Payload ID: 3627
  Gene Symbol: CCHCR1
  Gene Name: coiled-coil alpha-helical rod protein 1
  Uniprot ID: Q8TD31
  ENST ID: ENST00000383341
  CDS Start-End: 99-2447
aggcgtagggggagtggccaaagcgcagtagggggctctcgcggttggggaacatagatggctgaagacagaatctagagccttcaaataatgtggagatgtttccaccttcaggttccactgggctgattcccccctcccactttcaagctcggcccctttcaactctgccaagaatggctcccacctggctctcagacattcccctggtccaacccccaggccatcaagatgtctcagagaggcggctagacacccagagacctcaagtgaccatgtgggaacgggatgtttccagtgacaggcaggagccagggcggagaggcaggtcctgggggctggaggggtcacaggccctgagccagcaggctgaggtgatcgttcggcagctgcaagagctgcggtggctggaggaggaggtctggctcctgcgggagacctcgctgcagcagaagatgaggctagaggcccaggccatggagctagaggctctggcacgggcggagaaggccggccgagctgaggctgagggcctgcgtgctgctttggctggggctgaggttgtccggaagaacttggaagaggggaggcagcgggagctggaagaggttcagaggctgcaccaagagcagctgtcctctttgacacaggctcacgaggaggctctttccagtttgaccagcaaggctgagggcttggagaagtctctgagtagtctggaaaccagaagagcaggggaagccaaggagctggccgaggctcagagggaggccgagctgcttcggaagcagctgagcaagacccaggaagacttggaggctcaggtgaccctggttgagaatctaagaaaatatgttggggaacaagtcccttctgaggtccacagccagacatgggaactggagcgacagaagcttctggaaaccatgcagcacttgcaggaggaccgggacagcctgcatgccaccgcggagctgctgcaggtgcgggtgcagagcctcacacacatcctcgccctgcaggaggaggagctgaccaggaaggttcaaccttcagattccctggagcctgagtttaccaggaagtgccagtccctgctgaaccgctggcgggagaaggtgtttgccctcatggtgcagctaaaggcccaggagctggaacacagtgactctgttaagcagctgaagggacaggtggcctcactccaggaaaaagtgacatcccagagccaggagcaggccatcctgcagcgatccctgcaggacaaagccgcagaggtggaggtggagcgtatgggtgccaagggcctgcagttggagctgagccgtgctcaggaggccaggcgttggtggcagcagcagacagcctcagccgaggagcagttgaggcttgtggtcaatgctgtcagcagctctcagatctggctcgagaccaccatggctaaggtggaaggggctgccgcccagcttcccagcctcaacaaccgactcagctatgctgtccgcaaggtccacaccattcggggcctgattgctcgaaagcttgcccttgctcagctgcgccaggagagctgtcccctaccaccaccggtcacagatgtgagccttgagttgcagcagctgcgggaagaacggaaccgcctggatgcagaactgcagctgagtgcccgcctcatccagcaggaggtgggccgggctcgggagcaaggggaggcagagcggcagcagctgagcaaggtggcccagcagctggagcaggagctgcagcagacccaggagtccctggctagcttggggctgcagctggaggtagcacgccagtgccagcaggagagcacagaggaggctgccagtctgcggcaggagctgacccagcagcaggaactctacgggcaagccctgcaagaaaaggtggctgaagtggaaactcggctgcgggagcaactctcagacacagagaggaggctgaacgaggctcggagggagcatgccaaggccgtggtctccttgcgccagattcagcgcagagccgcccaggaaaaggagcggagccaggaactcaggcgtctgcaggaggaggcccggaaggaggaggggcagcgactggcccggcgcttgcaggagctagagagggataagaacctcatgctggccaccttgcagcaggaaggtctcctctcccgttacaagcagcagcgactgttgacagttcttccttccctactggataagaagaaatctgtggtgtccagccccaggcctccagagtgttcagcatctgcacctgtagcagcagcagtgcccaccagggagtccataaaagggtccctctctgtcctgctcgatgacctgcaggacctgagtgaagccatttccaaagaggaagctgtttgtcaaggagacaaccttgacagatgctccagctgcaatccccagatgagcagctaagcagctgacagttggagggaaagccagcctgggggctgggaggatcctggagaagtgggtggggacagaccagcccttccccatcctggggttgccctgggggataccagctgagtctgaattctgctctaaataaagacgactacagaagga

SEQ ID NO: 120552 - DNA, 2600 bp, Homo sapiens
  Payload ID: 3627
  Gene Symbol: CCHCR1
  Gene Name: coiled-coil alpha-helical rod protein 1
  Uniprot ID: Q8TD31
  ENST ID: ENST00000383527
  CDS Start-End: 99-2447
aggcgtagggggtgtggccaaagcgcagtagggggctctcgcggttggggaacatagatggctggagacagaatctagagccttcaaataatgtggagatgtttccaccttcaggttccactgggctgattcccccctcccactttcaagctcggcccctttcaactctgccaagaatggctcccacctggctctcagacattcccctggtccaacccccaggccatcaagatgtctcagagaggcggctagacacccagagacctcaagtgaccatgtgggaacgggatgtttccagtgacaggcaggagccagggcggagaggcaggtcctgggggctggaggggtcacaggccctgagccagcaggctgaggtgatcgttcggcagctgcaagagctgcggcggctggaggaggaggtccggctcctgcgggagacctcgctgcagcagaagatgaggctagaggcccaggccatggagctagaggctctggcacgggcggagaaggccggccgagctgaggctgagggcctgcgtgctgctttggctggggctgaggttgtccggaagaatttggaagaggggagccagcgggagctggaagaggttcagaggctgcaccaagagcagctgtcctctttgacacaggctcacgaggaggctctttccagtttgaccagcaaggctgagggcttggagaagtctctgagtagtctggaaaccagaagagcaggggaagccaaggagctggccgaggctcagagggaggccgagctgcttcggaagcagctgagcaagacccaggaagacttggaggctcaggtgaccctggttgagaatctaagaaaatatgttggggaacaagtcccttctgaggtccacagccagacatgggaactggagcgacagaagcttctggaaaccatgcagcacttgcaggaggaccgggacagcctgcatgccaccgcggagctgctgcaggtgcgggtgcagagcctcacacacatcctcgccctgcaggaggaggagctgaccaggaaggttcaaccttcagattccctggagcctgagtttaccaggaagtgccagtccctgctgaaccgctggcgggagaaggtgtttgccctcatggtgcagctaaaggcccaggagctggaacacagtgactctgttaagcagctgaagggacaggtggcctcactccaggaaaaagtgacatcccagagccaggagcaggccatcctgcagcgatccctgcaggacaaagccgcagaggtggaggtggagcgtatgggtgccaagggcctgcagttggagctgagccgtgctcaggaggccaggcgtcggtggcagcagcagacagcctcagctgaggagcagctgaggcttgtggtcaatgctgtcagcagctctcagatctggctcgagaccaccatggctaaggtggaaggggctgccgcccagcttcccagcctcaacaaccgactcagctatgctgtccgcaaggtccacaccattcggggcctgattgctcgaaagcttgcccttgctcagctgcgccaggagagctgtcccctaccaccaccggtcacagatgtgagccttgagttgcagcagctgcgggaagaacggaaccgcctggatgcagaactgcagctgagtgcccgcctcatccagcaggaggtgggccgggctcgggagcaaggggaggcagagcggcagcagctgagcaaggtggcccagcagctggagcaggagctgcagcagacccaggagtccctggctagcttggggctgcagctggaggtagcacgccagggccagcaggagagcacagaggaggctgccagtctgcggcaggagctgacccagcagcaggaactctacgggcaagccctgcaagaaaaggtggctgaagtggaaactcggctgcgggagcaactctcagacacagagaggaggctgaacgaggctcggagggagcatgccaaggccgtggtctccttgcgccagattcagcgcagagccgcccaggaaaaggagcggagccaggaactcaggcgtctgcaggaggaggcccggaaggaggaggggcagcgactggcccggcgcttgcaggagctagagagggataagaacctcatgctggccaccttgcagcaggaaggtctcctctcccgttacaagcagcagcgactgttgacagttcttccttccctactggataagaagaaatctgtggtgtccagccccaggcctccagagtgttcagcttctgcacctgtagcagcagcagtgcccaccagggagtccataaaagggtccctctctgtcctgctcgatgacctgcaggacctgagtgaagccatttccaaagaggaagctgtttgtcaaggagacaaccttgacagatgctccagctccaatccccagatgagcagctaagcagctgacagttggagggaaagccagcctgggggctgggaggatcctggagaagtgggtggggacagaccagcccttccccatcctggggttgccctgggggataccagctgagtctgaattctgctctaaataaagacgactacagaagga

SEQ ID NO: 120553 - DNA, 2490 bp, Homo sapiens
  Payload ID: 3627
  Gene Symbol: CCHCR1
  Gene Name: coiled-coil alpha-helical rod protein 1
  ENST ID: ENST00000396263
  CDS Start-End: 153-2342
tgtggccaaagcgcagtagggggctctcgcggttggggctttctctttggaaggtggcctgaaaattgaattggagtgtctttgtttctcctcttgtccaggggaacatagatggctggagacagaatctagagccttcaaataatgtggagatgtttccaccttcaggttccactgggctgattcccccctcccactttcaagctcggcccctttcaactctgccaagaatggctcccacctggctctcagacattcccctggtccaacccccaggccatcaagatgtctcagagaggcggctagacacccagagacctcaagtgaccatgtgggaacgggatgtttccagtgacaggcaggagccagggcggagaggcaggtcctgggggctggaggggtcacaggccctgagccagcaggctgaggtgatcgttcggcagctgcaagagctgcggcggctggaggaggaggtccggctcctgcgggagacctcgctgcagcagaagatgaggctagaggcccaggccatggagctagaggctctggcacgggcggagaaggccggccgagctgaggctgagggcctgcgtgctgctttggctggggctgaggttgtccggaagaacttggaagaggggagccagcgggagctggaagaggttcagaggctgcaccaagagcagctgtcctctttgacacaggctcacgaggaggctctttccagtttgaccagcaaggctgagggcttggagaagtctctgagtagtctggaaaccagaagagcaggggaagccaaggagctggccgaggctcagagggaggccgagctgcttcggaagcagctgagcaagacccaggaagacttggaggctcaggtgaccctggttgagaatctaagaaaatatgttggggaacaagtgccttctgaggtccacagccagacatgggaactggagcgacagaagcttctggaaaccatgcagcacttgcaggaggaccgggacagcctgcatgccaccgcggagctgctgcaggtgcgggtgcagagcctcacacacatcctcgccctgcaggaggaggagctgaccaggaaggttcaaccttcagattccctggagcctgagtttaccaggaagtgccagtccctgctgaaccgctggcgggagaaggtgtttgccctcatggtgcagctaaaggcccaggagctggaacacagtgactctgttaagcagctgaagggacaggtggcctcactccaggaaaaagtgacatcccagagccaggagcaggccatcctgcagcgatccctgcaggacaaagccgcagaggtggaggtggagcgtatgggtgccaagggcctgcagttggagctgagccgtgctcaggaggccaggcgtcggtggcagcagcagacagcctcagccgaggagcagctgaggcttgtggtcaatgctgtcagcagctgtcccctaccaccaccggtcacagacgtgagccttgagttgcagcagttgcgggaagaacggaaccgcctggatgcagaactgcagctgagtgcccgcctcatccagcaggaggtgggccgggctcgggagcaaggggaggcagagcggcagcagctgagcaaggtggcccagcagctggagcaggagctgcagcagacccaggagtccctggctagcttggggctgcagctggaggtagcacgccagggccagcaggagagcacagaggaggctgccagtctgcggcaggagctgacccagcagcaggaactctacgggcaagccctgcaagaaaaggtggctgaagtggaaactcggctgcgggagcaactctcagacacagagaggaggctgaacgaggctcggagggagcatgccaaggccgtggtctccttacgccagattcagcgcagagccgcccaggaaaaggagcggagccaggaactcaggcgtctgcaggaggaggcccggaaggaggaggggcagcgactggcccggcgcttgcaggagctagagagggataagaacctcatgctggccaccttgcagcaggaaggtctcctctcccgttacaagcagcagcgactgttgacagttcttccttccctactggataagaagaaatctgtggtgtccagccccaggcctccagagtgttcagcatctgcacctgtagcagcagcagtgcccaccagggagtccataaaagggtccctctctgtcctgctcgatgacctgcaggacctgagtgaagccatttccaaagaggaagctgtttgtcaaggagacaaccttgacagatgctccagctccaatccccagatgagcagctaagcagctgacagttggagggaaagccagcctgggggctgggaggatcctggagaagtgggtggggacagaccagcccttccccatcctggggttgccctgggggataccagctgagtctgaattctgctctaaataaagacgactacag

SEQ ID NO: 120554 - DNA, 2958 bp, Homo sapiens
  Payload ID: 3627
  Gene Symbol: CCHCR1
  Gene Name: coiled-coil alpha-helical rod protein 1
  Uniprot ID: Q8TD31
  ENST ID: ENST00000396268
  CDS Start-End: 190-2805
gtgcccactatgtgttaggactcgagaaagaggaggcgggcagcaggcatggaagctaaggggatagtagagagaagctgagagaacagccgcaggaaagatttgaataagatgtcaggacgctggcttttctgcctggggatctaggcggcctggattcccaaggtcttggggagggtctagccctgcatgtggccacattcagctggggccaggccttgggccagcactttaacagggaaggacccaagagtcatggcctgctggtgtctggatgggcttccctcaggccttgctgagccatggagagaactctggagatggcgctcaagacccctgcactgtgtacctcctttctcacctctggccaggagcagcagggaccatagaaacttaaggaggagggggaacatagatggctggagacagaatctagagccttcaaataatgtggagatgtttccaccttcaggttccactgggctgattcccccctcccactttcaagctcggcccctttcaactctgccaagaatggctcccacctggctctcagacattcccctggtccaacccccaggccatcaagatgtctcagagaggcggctagacacccagagacctcaagtgaccatgtgggaacgggatgtttccagtgacaggcaggagccagggcggagaggcaggtcctgggggctggaggggtcacaggccctgagccagcaggctgaggtgatcgttcggcagctgcaagagctgcggcggctggaggaggaggtccggctcctgcgggagacctcgctgcagcagaagatgaggctagaggcccaggccatggagctagaggctctggcacgggcggagaaggccggccgagctgaggctgagggcctgcgtgctgctttggctggggctgaggttgtccggaagaacttggaagaggggagccagcgggagctggaagaggttcagaggctgcaccaagagcagctgtcctctttgacacaggctcacgaggaggctctttccagtttgaccagcaaggctgagggcttggagaagtctctgagtagtctggaaaccagaagagcaggggaagccaaggagctggccgaggctcagagggaggccgagctgcttcggaagcagctgagcaagacccaggaagacttggaggctcaggtgaccctggttgagaatctaagaaaatatgttggggaacaagtgccttctgaggtccacagccagacatgggaactggagcgacagaagcttctggaaaccatgcagcacttgcaggaggaccgggacagcctgcatgccaccgcggagctgctgcaggtgcgggtgcagagcctcacacacatcctcgccctgcaggaggaggagctgaccaggaaggttcaaccttcagattccctggagcctgagtttaccaggaagtgccagtccctgctgaaccgctggcgggagaaggtgtttgccctcatggtgcagctaaaggcccaggagctggaacacagtgactctgttaagcagctgaagggacaggtggcctcactccaggaaaaagtgacatcccagagccaggagcaggccatcctgcagcgatccctgcaggacaaagccgcagaggtggaggtggagcgtatgggtgccaagggcctgcagttggagctgagccgtgctcaggaggccaggcgtcggtggcagcagcagacagcctcagccgaggagcagctgaggcttgtggtcaatgctgtcagcagctctcagatctggctcgagaccaccatggctaaggtggaaggggctgccgcccagcttcccagcctcaacaaccgactcagctatgctgtccgcaaggtccacaccattcggggcctgattgctcgaaagcttgcccttgctcagctgcgccaggagagctgtcccctaccaccaccggtcacagacgtgagccttgagttgcagcagttgcgggaagaacggaaccgcctggatgcagaactgcagctgagtgcccgcctcatccagcaggaggtgggccgggctcgggagcaaggggaggcagagcggcagcagctgagcaaggtggcccagcagctggagcaggagctgcagcagacccaggagtccctggctagcttggggctgcagctggaggtagcacgccagggccagcaggagagcacagaggaggctgccagtctgcggcaggagctgacccagcagcaggaactctacgggcaagccctgcaagaaaaggtggctgaagtggaaactcggctgcgggagcaactctcagacacagagaggaggctgaacgaggctcggagggagcatgccaaggccgtggtctccttacgccagattcagcgcagagccgcccaggaaaaggagcggagccaggaactcaggcgtctgcaggaggaggcccggaaggaggaggggcagcgactggcccggcgcttgcaggagctagagagggataagaacctcatgctggccaccttgcagcaggaaggtctcctctcccgttacaagcagcagcgactgttgacagttcttccttccctactggataagaagaaatctgtggtgtccagccccaggcctccagagtgttcagcatctgcacctgtagcagcagcagtgcccaccagggagtccataaaagggtccctctctgtcctgctcgatgacctgcaggacctgagtgaagccatttccaaagaggaagctgtttgtcaaggagacaaccttgacagatgctccagctccaatccccagatgagcagctaagcagctgacagttggagggaaagccagcctgggggctgggaggatcctggagaagtgggtggggacagaccagcccttccccatcctggggttgccctgggggataccagctgagtctgaattctgctctaaataaagacgactacagaagga

SEQ ID NO: 120555 - DNA, 2494 bp, Homo sapiens
  Payload ID: 3627
  Gene Symbol: CCHCR1
  Gene Name: coiled-coil alpha-helical rod protein 1
  ENST ID: ENST00000400351
  CDS Start-End: 152-2341
gtggccaaagcgcagtagggggctctcgcggttggggctttctctttggaaggtggcctgaaaattgaattggagtgtctttgtttctcctcttgtccaggggaacatagatggctgaagacagaatctagagccttcaaataatgtggagatgtttccaccttcaggttccactgggctgattcccccctcccactttcaagctcggcccctttcaactctgccaagaatggctcccacctggctctcagacattcccctggtccaacccccaggccatcaagatgtctcagagaggcggctagacacccagagacctcaagtgaccatgtgggaacgggatgtttccagtgacaggcaggagccagggcggagaggcaggtcctgggggctggaggggtcacaggccctgagccagcaggctgaggtgatcgttcggcagctgcaagagctgcggtggctggaggaggaggtctggctcctgcgggagacctcgctgcagcagaagatgaggctagaggcccaggccatggagctagaggctctggcacgggcggagaaggccggccgagctgaggctgagggcctgcgtgctgctttggctggggctgaggttgtccggaagaacttggaagaggggaggcagcgggagctggaagaggttcagaggctgcaccaagagcagctgtcctctttgacacaggctcacgaggaggctctttccagtttgaccagcaaggctgagggcttggagaagtctctgagtagtctggaaaccagaagagcaggggaagccaaggagctggccgaggctcagagggaggccgagctgcttcggaagcagctgagcaagacccaggaagacttggaggctcaggtgaccctggttgagaatctaagaaaatatgttggggaacaagtcccttctgaggtccacagccagacatgggaactggagcgacagaagcttctggaaaccatgcagcacttgcaggaggaccgggacagcctgcatgccaccgcggagctgctgcaggtgcgggtgcagagcctcacacacatcctcgccctgcaggaggaggagctgaccaggaaggttcaaccttcagattccctggagcctgagtttaccaggaagtgccagtccctgctgaaccgctggcgggagaaggtgtttgccctcatggtgcagctaaaggcccaggagctggaacacagtgactctgttaagcagctgaagggacaggtggcctcactccaggaaaaagtgacatcccagagccaggagcaggccatcctgcagcgatccctgcaggacaaagccgcagaggtggaggtggagcgtatgggtgccaagggcctgcagttggagctgagccgtgctcaggaggccaggcgttggtggcagcagcagacagcctcagccgaggagcagttgaggcttgtggtcaatgctgtcagcagctgtcccctaccaccaccggtcacagatgtgagccttgagttgcagcagctgcgggaagaacggaaccgcctggatgcagaactgcagctgagtgcccgcctcatccagcaggaggtgggccgggctcgggagcaaggggaggcagagcggcagcagctgagcaaggtggcccagcagctggagcaggagctgcagcagacccaggagtccctggctagcttggggctgcagctggaggtagcacgccagtgccagcaggagagcacagaggaggctgccagtctgcggcaggagctgacccagcagcaggaactctacgggcaagccctgcaagaaaaggtggctgaagtggaaactcggctgcgggagcaactctcagacacagagaggaggctgaacgaggctcggagggagcatgccaaggccgtggtctccttgcgccagattcagcgcagagccgcccaggaaaaggagcggagccaggaactcaggcgtctgcaggaggaggcccggaaggaggaggggcagcgactggcccggcgcttgcaggagctagagagggataagaacctcatgctggccaccttgcagcaggaaggtctcctctcccgttacaagcagcagcgactgttgacagttcttccttccctactggataagaagaaatctgtggtgtccagccccaggcctccagagtgttcagcatctgcacctgtagcagcagcagtgcccaccagggagtccataaaagggtccctctctgtcctgctcgatgacctgcaggacctgagtgaagccatttccaaagaggaagctgtttgtcaaggagacaaccttgacagatgctccagctgcaatccccagatgagcagctaagcagctgacagttggagggaaagccagcctgggggctgggaggatcctggagaagtgggtggggacagaccagcccttccccatcctggggttgccctgggggataccagctgagtctgaattctgctctaaataaagacgactacagaagga

SEQ ID NO: 120556 - DNA, 2958 bp, Homo sapiens
  Payload ID: 3627
  Gene Symbol: CCHCR1
  Gene Name: coiled-coil alpha-helical rod protein 1
  Uniprot ID: Q8TD31
  ENST ID: ENST00000400352
  CDS Start-End: 457-2805
gtgcccactatgtgttaggactcgagaaagaggaggcgggcagcaggcatggaagctaaggggatagtagagagaagctgagagaacagccgcaggaaagatttgaataagatgtcaggacgctggcttttctgcctggggatctaggcggcctggattcccaaggtcttggggagggtctagccctgcatgtggccacattcagctggggccaggccttgggccagcactttaacagggaaggacccaagagtcatggcctgctggtgtctggatgggcttccctcaggccttgctgagccatggagagaactctggagatggcgctcaagacccctgcactgtgtacctcctttctcacctctggccaggagcagcagggaccatagaaacttaaggaggagggggaacatagatggctgaagacagaatctagagccttcaaataatgtggagatgtttccaccttcaggttccactgggctgattcccccctcccactttcaagctcggcccctttcaactctgccaagaatggctcccacctggctctcagacattcccctggtccaacccccaggccatcaagatgtctcagagaggcggctagacacccagagacctcaagtgaccatgtgggaacgggatgtttccagtgacaggcaggagccagggcggagaggcaggtcctgggggctggaggggtcacaggccctgagccagcaggctgaggtgatcgttcggcagctgcaagagctgcggtggctggaggaggaggtctggctcctgcgggagacctcgctgcagcagaagatgaggctagaggcccaggccatggagctagaggctctggcacgggcggagaaggccggccgagctgaggctgagggcctgcgtgctgctttggctggggctgaggttgtccggaagaacttggaagaggggaggcagcgggagctggaagaggttcagaggctgcaccaagagcagctgtcctctttgacacaggctcacgaggaggctctttccagtttgaccagcaaggctgagggcttggagaagtctctgagtagtctggaaaccagaagagcaggggaagccaaggagctggccgaggctcagagggaggccgagctgcttcggaagcagctgagcaagacccaggaagacttggaggctcaggtgaccctggttgagaatctaagaaaatatgttggggaacaagtcccttctgaggtccacagccagacatgggaactggagcgacagaagcttctggaaaccatgcagcacttgcaggaggaccgggacagcctgcatgccaccgcggagctgctgcaggtgcgggtgcagagcctcacacacatcctcgccctgcaggaggaggagctgaccaggaaggttcaaccttcagattccctggagcctgagtttaccaggaagtgccagtccctgctgaaccgctggcgggagaaggtgtttgccctcatggtgcagctaaaggcccaggagctggaacacagtgactctgttaagcagctgaagggacaggtggcctcactccaggaaaaagtgacatcccagagccaggagcaggccatcctgcagcgatccctgcaggacaaagccgcagaggtggaggtggagcgtatgggtgccaagggcctgcagttggagctgagccgtgctcaggaggccaggcgttggtggcagcagcagacagcctcagccgaggagcagttgaggcttgtggtcaatgctgtcagcagctctcagatctggctcgagaccaccatggctaaggtggaaggggctgccgcccagcttcccagcctcaacaaccgactcagctatgctgtccgcaaggtccacaccattcggggcctgattgctcgaaagcttgcccttgctcagctgcgccaggagagctgtcccctaccaccaccggtcacagatgtgagccttgagttgcagcagctgcgggaagaacggaaccgcctggatgcagaactgcagctgagtgcccgcctcatccagcaggaggtgggccgggctcgggagcaaggggaggcagagcggcagcagctgagcaaggtggcccagcagctggagcaggagctgcagcagacccaggagtccctggctagcttggggctgcagctggaggtagcacgccagtgccagcaggagagcacagaggaggctgccagtctgcggcaggagctgacccagcagcaggaactctacgggcaagccctgcaagaaaaggtggctgaagtggaaactcggctgcgggagcaactctcagacacagagaggaggctgaacgaggctcggagggagcatgccaaggccgtggtctccttgcgccagattcagcgcagagccgcccaggaaaaggagcggagccaggaactcaggcgtctgcaggaggaggcccggaaggaggaggggcagcgactggcccggcgcttgcaggagctagagagggataagaacctcatgctggccaccttgcagcaggaaggtctcctctcccgttacaagcagcagcgactgttgacagttcttccttccctactggataagaagaaatctgtggtgtccagccccaggcctccagagtgttcagcatctgcacctgtagcagcagcagtgcccaccagggagtccataaaagggtccctctctgtcctgctcgatgacctgcaggacctgagtgaagccatttccaaagaggaagctgtttgtcaaggagacaaccttgacagatgctccagctgcaatccccagatgagcagctaagcagctgacagttggagggaaagccagcctgggggctgggaggatcctggagaagtgggtggggacagaccagcccttccccatcctggggttgccctgggggataccagctgagtctgaattctgctctaaataaagacgactacagaagga

SEQ ID NO: 120557 - DNA, 2495 bp, Homo sapiens
  Payload ID: 3627
  Gene Symbol: CCHCR1
  Gene Name: coiled-coil alpha-helical rod protein 1
  ENST ID: ENST00000400406
  CDS Start-End: 153-2342
tgtggccaaagcgcagtagggggctctcgcggttggggctttctctttggaaggtggcctgaaaattgaattggagtgtctttgtttctcctcttgtccaggggaacatagatggctggagacagaatctagagccttcaaataatgtggagatgtttccaccttcaggttccactgggctgattcccccctcccactttcaagctcggcccctttcaactctgccaagaatggctcccacctggctctcagacattcccctggtccaacccccaggccatcaagatgtctcagagaggcggctagacacccagagacctcaagtgaccatgtgggaacgggatgtttccagtgacaggcaggagccagggcggagaggcaggtcctgggggctggaggggtcacaggccctgagccagcaggctgaggtgatcgttcggcagctgcaagagctgcggcggctggaggaggaggtccggctcctgcgggagacctcgctgcagcagaagatgaggctagaggcccaggccatggagctagaggctctggcacgggcggagaaggccggccgagctgaggctgagggcctgcgtgctgctttggctggggctgaggttgtccggaagaatttggaagaggggagccagcgggagctggaagaggttcagaggctgcaccaagagcagctgtcctctttgacacaggctcacgaggaggctctttccagtttgaccagcaaggctgagggcttggagaagtctctgagtagtctggaaaccagaagagcaggggaagccaaggagctggccgaggctcagagggaggccgagctgcttcggaagcagctgagcaagacccaggaagacttggaggctcaggtgaccctggttgagaatctaagaaaatatgttggggaacaagtcccttctgaggtccacagccagacatgggaactggagcgacagaagcttctggaaaccatgcagcacttgcaggaggaccgggacagcctgcatgccaccgcggagctgctgcaggtgcgggtgcagagcctcacacacatcctcgccctgcaggaggaggagctgaccaggaaggttcaaccttcagattccctggagcctgagtttaccaggaagtgccagtccctgctgaaccgctggcgggagaaggtgtttgccctcatggtgcagctaaaggcccaggagctggaacacagtgactctgttaagcagctgaagggacaggtggcctcactccaggaaaaagtgacatcccagagccaggagcaggccatcctgcagcgatccctgcaggacaaagccgcagaggtggaggtggagcgtatgggtgccaagggcctgcagttggagctgagccgtgctcaggaggccaggcgtcggtggcagcagcagacagcctcagctgaggagcagctgaggcttgtggtcaatgctgtcagcagctgtcccctaccaccaccggtcacagatgtgagccttgagttgcagcagctgcgggaagaacggaaccgcctggatgcagaactgcagctgagtgcccgcctcatccagcaggaggtgggccgggctcgggagcaaggggaggcagagcggcagcagctgagcaaggtggcccagcagctggagcaggagctgcagcagacccaggagtccctggctagcttggggctgcagctggaggtagcacgccagggccagcaggagagcacagaggaggctgccagtctgcggcaggagctgacccagcagcaggaactctacgggcaagccctgcaagaaaaggtggctgaagtggaaactcggctgcgggagcaactctcagacacagagaggaggctgaacgaggctcggagggagcatgccaaggccgtggtctccttgcgccagattcagcgcagagccgcccaggaaaaggagcggagccaggaactcaggcgtctgcaggaggaggcccggaaggaggaggggcagcgactggcccggcgcttgcaggagctagagagggataagaacctcatgctggccaccttgcagcaggaaggtctcctctcccgttacaagcagcagcgactgttgacagttcttccttccctactggataagaagaaatctgtggtgtccagccccaggcctccagagtgttcagcttctgcacctgtagcagcagcagtgcccaccagggagtccataaaagggtccctctctgtcctgctcgatgacctgcaggacctgagtgaagccatttccaaagaggaagctgtttgtcaaggagacaaccttgacagatgctccagctccaatccccagatgagcagctaagcagctgacagttggagggaaagccagcctgggggctgggaggatcctggagaagtgggtggggacagaccagcccttccccatcctggggttgccctgggggataccagctgagtctgaattctgctctaaataaagacgactacagaagga

SEQ ID NO: 120558 - DNA, 2958 bp, Homo sapiens
  Payload ID: 3627
  Gene Symbol: CCHCR1
  Gene Name: coiled-coil alpha-helical rod protein 1
  Uniprot ID: Q8TD31
  ENST ID: ENST00000400412
  CDS Start-End: 190-2805
gtgcccactatgtgttaggactcgagaaagaggaggcgggcagcaggcatggaagctaaggggatagtagagagaagctgagagaacagccgcaggaaagatttgaataagatgtcaggacgctggcttttctgcctggggatctaggcggcctggattcccaaggtcttggggagggtctagccctgcatgtggccacattcagctggggccaggccttgggccagcactttaacagggaaggacccaagagtcatggcctgctggtgtctggatgggcttccctcaggccttgctgagccatggagagaactctggagatggcgctcaagacccctgcactgtgtacctcctttctcacctctggccaggagcagcagggaccatagaaacttaaggaggagggggaacatagatggctggagacagaatctagagccttcaaataatgtggagatgtttccaccttcaggttccactgggctgattcccccctcccactttcaagctcggcccctttcaactctgccaagaatggctcccacctggctctcagacattcccctggtccaacccccaggccatcaagatgtctcagagaggcggctagacacccagagacctcaagtgaccatgtgggaacgggatgtttccagtgacaggcaggagccagggcggagaggcaggtcctgggggctggaggggtcacaggccctgagccagcaggctgaggtgatcgttcggcagctgcaagagctgcggcggctggaggaggaggtccggctcctgcgggagacctcgctgcagcagaagatgaggctagaggcccaggccatggagctagaggctctggcacgggcggagaaggccggccgagctgaggctgagggcctgcgtgctgctttggctggggctgaggttgtccggaagaatttggaagaggggagccagcgggagctggaagaggttcagaggctgcaccaagagcagctgtcctctttgacacaggctcacgaggaggctctttccagtttgaccagcaaggctgagggcttggagaagtctctgagtagtctggaaaccagaagagcaggggaagccaaggagctggccgaggctcagagggaggccgagctgcttcggaagcagctgagcaagacccaggaagacttggaggctcaggtgaccctggttgagaatctaagaaaatatgttggggaacaagtcccttctgaggtccacagccagacatgggaactggagcgacagaagcttctggaaaccatgcagcacttgcaggaggaccgggacagcctgcatgccaccgcggagctgctgcaggtgcgggtgcagagcctcacacacatcctcgccctgcaggaggaggagctgaccaggaaggttcaaccttcagattccctggagcctgagtttaccaggaagtgccagtccctgctgaaccgctggcgggagaaggtgtttgccctcatggtgcagctaaaggcccaggagctggaacacagtgactctgttaagcagctgaagggacaggtggcctcactccaggaaaaagtgacatcccagagccaggagcaggccatcctgcagcgatccctgcaggacaaagccgcagaggtggaggtggagcgtatgggtgccaagggcctgcagttggagctgagccgtgctcaggaggccaggcgtcggtggcagcagcagacagcctcagctgaggagcagctgaggcttgtggtcaatgctgtcagcagctctcagatctggctcgagaccaccatggctaaggtggaaggggctgccgcccagcttcccagcctcaacaaccgactcagctatgctgtccgcaaggtccacaccattcggggcctgattgctcgaaagcttgcccttgctcagctgcgccaggagagctgtcccctaccaccaccggtcacagatgtgagccttgagttgcagcagctgcgggaagaacggaaccgcctggatgcagaactgcagctgagtgcccgcctcatccagcaggaggtgggccgggctcgggagcaaggggaggcagagcggcagcagctgagcaaggtggcccagcagctggagcaggagctgcagcagacccaggagtccctggctagcttggggctgcagctggaggtagcacgccagggccagcaggagagcacagaggaggctgccagtctgcggcaggagctgacccagcagcaggaactctacgggcaagccctgcaagaaaaggtggctgaagtggaaactcggctgcgggagcaactctcagacacagagaggaggctgaacgaggctcggagggagcatgccaaggccgtggtctccttgcgccagattcagcgcagagccgcccaggaaaaggagcggagccaggaactcaggcgtctgcaggaggaggcccggaaggaggaggggcagcgactggcccggcgcttgcaggagctagagagggataagaacctcatgctggccaccttgcagcaggaaggtctcctctcccgttacaagcagcagcgactgttgacagttcttccttccctactggataagaagaaatctgtggtgtccagccccaggcctccagagtgttcagcttctgcacctgtagcagcagcagtgcccaccagggagtccataaaagggtccctctctgtcctgctcgatgacctgcaggacctgagtgaagccatttccaaagaggaagctgtttgtcaaggagacaaccttgacagatgctccagctccaatccccagatgagcagctaagcagctgacagttggagggaaagccagcctgggggctgggaggatcctggagaagtgggtggggacagaccagcccttccccatcctggggttgccctgggggataccagctgagtctgaattctgctctaaataaagacgactacagaagga

SEQ ID NO: 120559 - DNA, 838 bp, Homo sapiens
  Payload ID: 3627
  Gene Symbol: CCHCR1
  Gene Name: coiled-coil alpha-helical rod protein 1
  ENST ID: ENST00000432736
  CDS Start-End: 483-838
tgcccactatgtgttaggactcgagaaagaggaggcgggcagcaggcatggaagctaaggggatagtagagagaagctgagagaacagccgcaggaaagatttgaataagatgtcaggacgctggcttttctgcctggggatctaggcggcctggattcccaaggtcttggggagggtctagccctgcatgtggccacattcagctggggccaggccttgggccagcactttaacagggaaggacccaagagtcatggcctgctggtgtctggatgggcttccctcaggccttgctgagccatggagagaactctggagatggcgctcaagacccctgcactgtgtacctcctttctcacctctggccaggagcagcagggaccatagaaacttaaggaggagggtaaaggcactgcccagaatcctgaaagggaacatagatggctgaagacagaatctagagccttcaaataatgtggagatgtttccaccttcaggttccactgggctgattcccccctcccactttcaagctcggcccctttcaactctgccaagaatggctcccacctggctctcagacattcccctggtccaacccccaggccatcaagatgtctcagagaggcggctagacacccagagacctcaagtgaccatgtgggaacgggatgtttccagtgacaggcaggagccagggcggagaggcaggtcctgggggctggaggggtcacaggccctgagccagcaggctgaggtgatcgttcggcagctgcaagagctgcggcggctggaggaggaggtccggctcctgcgggagacctcgctgcagcagaa

SEQ ID NO: 120560 - DNA, 700 bp, Homo sapiens
  Payload ID: 3627
  Gene Symbol: CCHCR1
  Gene Name: coiled-coil alpha-helical rod protein 1
  ENST ID: ENST00000439820
  CDS Start-End: 136-700
agggggtacaggggccaggtgaagggacagatgaagcgatcagaacagccttagagctcacgggctaactgggtgaagcctcgggggaacatagatggctggagacagaatctagagccttcaaataatgtggagatgtttccaccttcaggttccactgggctgattcccccctcccactttcaagctcggcccctttcaactctgccaagaatggctcccacctggctctcagacattcccctggtccaacccccaggccatcaagatgtctcagagaggcggctagacacccagagacctcaagtgaccatgtgggaacgggatgtttccagtgacaggcaggagccagggcggagaggcaggtcctgggggctggaggggtcacaggccctgagccagcaggctgaggtgatcgttcggcagctgcaagagctgcggcggctggaggaggaggtccggctcctgcgggagacctcgctgcagcagaagatgaggctagaggcccaggccatggagctagaggctctggcacgggcggagaaggccggccgagctgaggctgagggcctgcgtgctgctttggctggggctgaggttgtccggaagaatttggaagaggggagccagcgggagctggaagaggttcagaggctgcaccaagagcagctgtcctctttgacacaggctcacgaggagg

SEQ ID NO: 120561 - DNA, 740 bp, Homo sapiens
  Payload ID: 3627
  Gene Symbol: CCHCR1
  Gene Name: coiled-coil alpha-helical rod protein 1
  ENST ID: ENST00000457929
  CDS Start-End: 227-740
gccaggtgaagggacagatgaagagatcagaacagccttagagctcacgggctaactgggccttgctgagccatggagagaactctggagatggcgctcaagacccctgcactgtgtacctcctttctcacctctggccaggagcagcagggaccatagaaacttaaggaggagggggaacatagatggctgaagacagaatctagagccttcaaataatgtggagatgtttccaccttcaggtcagtgggaccagacaaggggagtggtggttgtctctgcctgggaaactgaccatctttgtttttgtaattcttcaggttccactgggctgattcccccctcccactttcaagctcggcccctttcaactctgccaagaatggctcccacctggctctcagacattcccctggtccaacccccaggccatcaagatgtctcagagaggcggctagacacccagagacctcaagtgaccatgtgggaacgggatgtttccagtgacaggcaggagccagggcggagaggcaggtcctgggggctggaggggtcacaggccctgagccagcaggctgaggtgatcgttcggcagctgcaagagctgcggcggctggaggaggaggtccggctcctgcgggagacctcgctgcagcagaagatgaggctagaggcccaggccatggagctagaggctctggcacgggcggagaaggccggccgagctgaggctgagggcc

SEQ ID NO: 120562 - DNA, 470 bp, Homo sapiens
  Payload ID: 3627
  Gene Symbol: CCHCR1
  Gene Name: coiled-coil alpha-helical rod protein 1
  ENST ID: ENST00000428174
  CDS Start-End: 91-470
ggggtgtggccaaagcgcagtagggggctctcgcggttggggaacatagatggctggagacagaatctagagccttcaaataatgtggagatgtttccaccttcaggtcagtgggaccagacaaggggagtggtggttgtctctgcctgggaaactgaccatctttgtttttgtaattcttcaggttccactgggctgattcccccctcccactttcaagctcggcccctttcaactctgccaagaatggctcccacctggctctcagacattcccctggtccaacccccaggccatcaagatgtctcagagaggcggctagacacccagagacctcaagtgaccatgtgggaacgggatgtttccagtgacaggcaggagccagggcggagaggcaggtcctgggggctggaggggtcacaggccctgagccagcaggctgaggtgatcgttcggcagctgcaagagct

SEQ ID NO: 120563 - DNA, 470 bp, Homo sapiens
  Payload ID: 3627
  Gene Symbol: CCHCR1
  Gene Name: coiled-coil alpha-helical rod protein 1
  ENST ID: ENST00000452419
  CDS Start-End: 91-470
ggggagtggccaaagcgcagtagggggctctcgcggttggggaacatagatggctgaagacagaatctagagccttcaaataatgtggagatgtttccaccttcaggtcagtgggaccagacaaggggagtggtggttgtctctgcctgggaaactgaccatctttgtttttgtaattcttcaggttccactgggctgattcccccctcccactttcaagctcggcccctttcaactctgccaagaatggctcccacctggctctcagacattcccctggtccaacccccaggccatcaagatgtctcagagaggcggctagacacccagagacctcaagtgaccatgtgggaacgggatgtttccagtgacaggcaggagccagggcggagaggcaggtcctgggggctggaggggtcacaggccctgagccagcaggctgaggtgatcgttcggcagctgcaagagct

SEQ ID NO: 120564 - DNA, 699 bp, Homo sapiens
  Payload ID: 3627
  Gene Symbol: CCHCR1
  Gene Name: coiled-coil alpha-helical rod protein 1
  ENST ID: ENST00000448162
  CDS Start-End: 135-699
gggggtacaggggccaggtgaagggacagatgaagagatcagaacagccttagagctcacgggctaactgggtgaagcctcgggggaacatagatggctggagacagaatctagagccttcaaataatgtggagatgtttccaccttcaggttccactgggctgattcccccctcccactttcaagctcggcccctttcaactctgccaagaatggctcccacctggctctcagacattcccctggtccaacccccaggccatcaagatgtctcagagaggcggctagacacccagagacctcaagtgaccatgtgggaacgggatgtttccagtgacaggcaggagccagggcggagaggcaggtcctgggggctggaggggtcacaggccctgagccagcaggctgaggtgatcgttcggcagctgcaagagctgcggcggctggaggaggaggtccggctcctgcgggagacctcgctgcagcagaagatgaggctagaggcccaggccatggagctagaggctctggcacgggcggagaaggccggccgagctgaggctgagggcctgcgtgctgctttggctggggctgaggttgtccggaagaacttggaagaggggagccagcgggagctggaagaggttcagaggctgcaccaagagcagctgtcctctttgacacaggctcacgaggagg

SEQ ID NO: 120565 - DNA, 922 bp, Homo sapiens
  Payload ID: 3627
  Gene Symbol: CCHCR1
  Gene Name: coiled-coil alpha-helical rod protein 1
  ENST ID: ENST00000451470
  CDS Start-End: 1-769
ccgcctggatgcagaactgcagctgagtgcccgcctcatccagcaggaggtgggccgggctcgggagcaaggggaggcagagcggcagcagctgagcaaggtggcccagcagctggagcaggagctgcagcagacccaggagtccctggctagcttggggctgcagctggaggtagcacgccagtgccagcaggagagcacagaggaggctgccagtctgcggcaggagctgacccagcagcaggaactctacgggcaagccctgcaagaaaaggtggctgaagtggaaactcggctgcgggagcaactctcagacacagagaggaggctgaacgaggctcggagggagcatgccaaggccgtggtctccttgcgccagattcagcgcagagccgcccaggaaaaggagcggagccaggaactcaggcgtctgcaggaggaggcccggaaggaggaggggcagcgactggcccggcgcttgcaggagctagagagggataagaacctcatgctgcagcgactgttgacagttcttccttccctactggataagaagaaatctgtggtgtccagccccaggcctccagagtgttcagcatctgcacctgtagcagcagcagtgcccaccagggagtccataaaagggtccctctctgtcctgctcgatgacctgcaggacctgagtgaagccatttccaaagaggaagctgtttgtcaaggagacaaccttgacagatgctccagctgcaatccccagatgagcagctaagcagctgacagttggagggaaagccagcctgggggctgggaggatcctggagaagtgggtggggacagaccagcccttccccatcctggggttgccctgggggataccagctgagtctgaattctgctctaaataaagacgactacagaagga

SEQ ID NO: 120566 - DNA, 922 bp, Homo sapiens
  Payload ID: 3627
  Gene Symbol: CCHCR1
  Gene Name: coiled-coil alpha-helical rod protein 1
  ENST ID: ENST00000431539
  CDS Start-End: 1-769
ccgcctggatgcagaactgcagctgagtgcccgcctcatccagcaggaggtgggccgggctcgggagcaaggggaggcagagcggcagcagctgagcaaggtggcccagcagctggagcaggagctgcagcagacccaggagtccctggctagcttggggctgcagctggaggtagcacgccagggccagcaggagagcacagaggaggctgccagtctgcggcaggagctgacccagcagcaggaactctacgggcaagccctgcaagaaaaggtggctgaagtggaaactcggctgcgggagcaactctcagacacagagaggaggctgaacgaggctcggagggagcatgccaaggccgtggtctccttgcgccagattcagcgcagagccgcccaggaaaaggagcggagccaggaactcaggcgtctgcaggaggaggcccggaaggaggaggggcagcgactggcccggcgcttgcaggagctagagagggataagaacctcatgctgcagcgactgttgacagttcttccttccctactggataagaagaaatctgtggtgtccagccccaggcctccagagtgttcagcatctgcacctgtagcagcagcagtgcccaccagggagtccataaaagggtccctctctgtcctgctcgatgacctgcaggacctgagtgaagccatttccaaagaggaagctgtttgtcaaggagacaaccttgacagatgctccagctccaatccccagatgagcagctaagcagctgacagttggagggaaagccagcctgggggctgggaggatcctggagaagtgggtggggacagaccagcccttccccatcctggggttgccctgggggataccagctgagtctgaattctgctctaaataaagacgactacagaagga

SEQ ID NO: 120567 - DNA, 922 bp, Homo sapiens; identical to SEQ ID NO: 120565
  Payload ID: 3627
  Gene Symbol: CCHCR1
  Gene Name: coiled-coil alpha-helical rod protein 1
  ENST ID: ENST00000420262
  CDS Start-End: 1-769

SEQ ID NO: 120568 - DNA, 1000 bp, Homo sapiens
  Payload ID: 3627
  Gene Symbol: CCHCR1
  Gene Name: coiled-coil alpha-helical rod protein 1
  ENST ID: ENST00000439536
  CDS Start-End: 53-1000
ggggaacatagatggctgaagacagaatctagagccttcaaataatgtggagatgtttccaccttcaggccatcaagatgtctcagagaggcggctagacacccagagacctcaagtgaccatgtgggaacgggatgtttccagtgacaggcaggagccagggcggagaggcaggtcctgggggctggaggggtcacaggccctgagccagcaggctgaggtgatcgttcggcagctgcaagagctgcggcggctggaggaggaggtccggctcctgcgggagacctcgctgcagcagaagatgaggctagaggcccaggccatggagctagaggctctggcacgggcggagaaggccggccgagctgaggctgagggcctgcgtgctgctttggctggggctgaggttgtccggaagaacttggaagaggggaggcagcgggagctggaagaggttcagaggctgcaccaagagcagctgtcctctttgacacaggctcacgaggaggctctttccagtttgaccagcaaggctgagggcttggagaagtctctgagtagtctggaaaccagaagagcaggggaagccaaggagctggccgaggctcagagggaggccgagctgcttcggaagcagctgagcaagacccaggaagacttggaggctcaggtgaccctggttgagaatctaagaaaatatgttggggaacaagtcccttctgaggtccacagccagacatgggaactggagcgacagaagcttctggacaccatgcagcacttgcaggaggaccgggacagcctgcatgccaccgcggagctgctgcaggtgcgggtgcagagcctcacacacatcctcgccctgcaggaggaggagctgaccaggaaggttcaaccttcagattccctggagcctgagtttaccaggaagtgccagtccctgctgaaccgctggcgggagaaggtgtttgccctcatggtgcagctaaaggcccaggag

SEQ ID NO: 120569 - DNA, 2958 bp, Homo sapiens
  Payload ID: 3627
  Gene Symbol: CCHCR1
  Gene Name: coiled-coil alpha-helical rod protein 1
  ENST ID: ENST00000419528
  CDS Start-End: 457-2805
gtgcccactatgtgttaggactcgagaaagaggaggcgggcagcaggcatggaagctaaggggatagtagagagaagctgagagaacagccgcaggaaagatttgaataagatgtcaggacgctggcttttctgcctggggatctaggcggcctggattcccaaggtcttggggagggtctagccctgcatgtggccacattcagctggggccaggccttgggccagcactttaacagggaaggacccaagagtcatggcctgctggtgtctggatgggcttccctcaggccttgctgagccatggagagaactctggagatggcgctcaagacccctgcactgtgtacctcctttctcacctctggccaggagcagcagggaccatagaaacttaaggaggagggggaacatagatggctgaagacagaatctagagccttcaaataatgtggagatgtttccaccttcaggttccactgggctgattcccccctcccactttcaagctcggcccctttcaactctgccaagaatggctcccacctggctctcagacattcccctggtccaacccccaggccatcaagatgtctcagagaggcggctagacacccagagacctcaagtgaccatgtgggaacgggatgtttccagtgacaggcaggagccagggcggagaggcaggtcctgggggctggaggggtcacaggccctgagccagcaggctgaggtgatcgttcggcagctgcaagagctgcggcggctggaggaggaggtccggctcctgcgggagacctcgctgcagcagaagatgaggctagaggcccaggccatggagctagaggctctggcacgggcggagaaggccggccgagctgaggctgagggcctgcgtgctgctttggctggggctgaggttgtccggaagaacttggaagaggggaggcagcgggagctggaagaggttcagaggctgcaccaagagcagctgtcctctttgacacaggctcacgaggaggctctttccagtttgaccagcaaggctgagggcttggagaagtctctgagtagtctggaaaccagaagagcaggggaagccaaggagctggccgaggctcagagggaggccgagctgcttcggaagcagctgagcaagacccaggaagacttggaggctcaggtgaccctggttgagaatctaagaaaatatgttggggaacaagtcccttctgaggtccacagccagacatgggaactggagcgacagaagcttctggacaccatgcagcacttgcaggaggaccgggacagcctgcatgccaccgcggagctgctgcaggtgcgggtgcagagcctcacacacatcctcgccctgcaggaggaggagctgaccaggaaggttcaaccttcagattccctggagcctgagtttaccaggaagtgccagtccctgctgaaccgctggcgggagaaggtgtttgccctcatggtgcagctaaaggcccaggagctggaacacagtgactctgttaagcagctgaagggacaggtggcctcactccaggaaaaagtgacatcccagagccaggagcaggccatcctgcagcgatccctgcaggacaaagccgcagaggtggaggtggagcgtatgggtgccaagggcctgcagttggagctgagccgtgctcaggaggccaggcgtcggtggcagcagcagacagcctcagccgaggagcagctgaggcttgtggtcaatgctgtcagcagctctcagatctggctcgagaccaccatggctaaggtggaaggggctgccgcccagcttcccagcctcaacaaccgactcagctatgctgtccgcaaggtccacaccattcggggcctgattgctcgaaagcttgcccttgctcagctgcgccaggagagctgtcccctaccaccaccggtcacagatgtgagccttgagttgcagcagctgcgggaagaacggaaccgcctggatgcagaactgcagctgagtgcccgcctcatccagcaggaggtgggccgggctcgggagcaaggggaggcagagcggcagcagctgagcaaggtggcccagcagctggagcaggagctgcagcagacccaggagtccctggctagcttggggctgcagctggaggtagcacgccagggccagcaggagagcacagaggaggctgccagtctgcggcaggagctgacccagcagcaggaactctacgggcaagccctgcaagaaaaggtggctgaagtggaaactcggctgcgggagcaactctcagacacagagaggaggctgaacgaggctcggagggagcatgccaaggccgtggtctccttgcgccagattcagcgcagagccgcccaggaaaaggagcggagccaggaactcaggcgtctgcaggaggaggcccggaaggaggaggggcagcgactggcccggcgcttgcaggagctagagagggataagaacctcatgctggccaccttgcagcaggaaggtctcctctcccgttacaagcagcagcgactgttgacagttcttccttccctactggataagaagaaatctgtggtgtccagccccaggcctccagagtgttcagcatctgcacctgtagcagcagcagtgcccaccagggagtccataaaagggtccctctctgtcctgctcgatgacctgcaggacctgagtgaagccatttccaaagaggaagctgtttgtcaaggagacaaccttgacagatgctccagctccaatccccagatgagcagctaagcagctgacagttggagggaaagccagcctgggggctgggaggatcctggagaagtgggtggggacagaccagcccttccccatcctggggttgccctgggggataccagctgagtctgaattctgctctaaataaagacgactacagaagga

SEQ ID NO: 120570 - DNA, 838 bp, Homo sapiens
  Payload ID: 3627
  Gene Symbol: CCHCR1
  Gene Name: coiled-coil alpha-helical rod protein 1
  ENST ID: ENST00000456712
  CDS Start-End: 189-838
tgcccactatgtgttaggactcgagaaagaggaggcgggcagcaggcatggaagctaaggggatagtagagagaagctgagagaacagccgcaggaaagatttgaataagatgtcaggacgctggcttttctgcctggggatctaggcggcctggattcccaaggtcttggggagggtctagccctgcatgtggccacattcagctggggccaggccttgggccagcactttaacagggaaggacccaagagtcatggcctgctggtgtctggatgggcttccctcaggccttgctgagccatggagagaactctggagatggcgctcaagacccctgcactgtgtacctcctttctcacctctggccaggagcagcagggaccatagaaacttaaggaggagggtagaggcactgcccagaatcctgaaagggaacatagatggctggagacagaatctagagccttcaaataatgtggagatgtttccaccttcaggttccactgggctgattcccccctcccactttcaagctcggcccctttcaactctgccaagaatggctcccacctggctctcagacattcccctggtccaacccccaggccatcaagatgtctcagagaggcggctagacacccagagacctcaagtgaccatgtgggaacgggatgtttccagtgacaggcaggagccagggcggagaggcaggtcctgggggctggaggggtcacaggccctgagccagcaggctgaggtgatcgttcggcagctgcaagagctgcggcggctggaggaggaggtccggctcctgcgggagacctcgctgcagcagaa

SEQ ID NO: 120571 - DNA, 2600 bp, Homo sapiens; identical to SEQ ID NO: 120551
  Payload ID: 3627
  Gene Symbol: CCHCR1
  Gene Name: coiled-coil alpha-helical rod protein 1
  Uniprot ID: Q8TD31
  ENST ID: ENST00000425620
  CDS Start-End: 99-2447

SEQ ID NO: 120572 - DNA, 470 bp, Homo sapiens
  Payload ID: 3627
  Gene Symbol: CCHCR1
  Gene Name: coiled-coil alpha-helical rod protein 1
  ENST ID: ENST00000438424
  CDS Start-End: 91-470
ggggtgtggccaaagcgcagtagggggctctcgcggttggggaacatagatggctgaagacagaatctagagccttcaaataatgtggagatgtttccaccttcaggtcagtgggaccagacaaggggagtggtggttgtctctgcctgggaaactgaccatctttgtttttgtaattcttcaggttccactgggctgattcccccctcccactttcaagctcggcccctttcaactctgccaagaatggctcccacctggctctcagacattcccctggtccaacccccaggccatcaagatgtctcagagaggcggctagacacccagagacctcaagtgaccatgtgggaacgggatgtttccagtgacaggcaggagccagggcggagaggcaggtcctgggggctggaggggtcacaggccctgagccagcaggctgaggtgatcgttcggcagctgcaagagct

SEQ ID NO: 120573 - DNA, 740 bp, Homo sapiens
  Payload ID: 3627
  Gene Symbol: CCHCR1
  Gene Name: coiled-coil alpha-helical rod protein 1
  ENST ID: ENST00000417501
  CDS Start-End: 227-740
gccaggtgaagggacagatgaagagatcagaacagccttagagctcacgggctaactgggccttgctgagccatggagagaactctggagatggcgctcaagacccctgcactgtgtacctcctttctcacctctggccaggagcagcagggaccatagaaacttaaggaggagggggaacatagatggctgaagacagaatctagagccttcaaataatgtggagatgtttccaccttcaggtcagtgggaccagacaaggggagtggtggttgtctctgcctgggaaactgaccatctttgtttttgtaattcttcaggttccactgggctgattcccccctcccactttcaagctcggcccctttcaactctgccaagaatggctcccacctggctctcagacattcccctggtccaacccccaggccatcaagatgtctcagagaggcggctagacacccagagacctcaagtgaccatgtgggaacgggatgtttccagtgacaggcaggagccagggcggagaggcaggtcctgggggctggaggggtcacaggccctgagccagcaggctgaggtgatcgttcggcagctgcaagagctgcggtggctggaggaggaggtctggctcctgcgggagacctcgctgcagcagaagatgaggctagaggcccaggccatggagctagaggctctggcacgggcggagaaggccggccgagctgaggctgagggcc

SEQ ID NO: 120574 - DNA, 1000 bp, Homo sapiens; identical to SEQ ID NO: 120568
  Payload ID: 3627
  Gene Symbol: CCHCR1
  Gene Name: coiled-coil alpha-helical rod protein 1
  ENST ID: ENST00000456365
  CDS Start-End: 53-1000

SEQ ID NO: 120575 - DNA, 838 bp, Homo sapiens
  Payload ID: 3627
  Gene Symbol: CCHCR1
  Gene Name: coiled-coil alpha-helical rod protein 1
  ENST ID: ENST00000451337
  CDS Start-End: 483-838
tgcccactatgtgttaggactcgagaaagaggaggcgggcagcaggcatggaagctaaggggatagtagagagaagctgagagaacagccgcaggaaagatttgaataagatgtcaggacgctggcttttctgcctggggatctaggcggcctggattcccaaggtcttggggagggtctagccctgcatgtggccacattcagctggggccaggccttgggccagcactttaacagggaaggacccaagagtcatggcctgctggtgtctggatgggcttccctcaggccttgctgagccatggagagaactctggagatggcgctcaagacccctgcactgtgtacctcctttctcacctctggccaggagcagcagggaccatagaaacttaaggaggagggtaaaggcactgcccagaatcctgaaagggaacatagatggctgaagacagaatctagagccttcaaataatgtggagatgtttccaccttcaggttccactgggctgattcccccctcccactttcaagctcggcccctttcaactctgccaagaatggctcccacctggctctcagacattcccctggtccaacccccaggccatcaagatgtctcagagaggcggctagacacccagagacctcaagtgaccatgtgggaacgggatgtttccagtgacaggcaggagccagggcggagaggcaggtcctgggggctggaggggtcacaggccctgagccagcaggctgaggtgatcgttcggcagctgcaagagctgcggtggctggaggaggaggtctggctcctgcgggagacctcgctgcagcagaa

SEQ ID NO: 120576 - DNA, 700 bp, Homo sapiens
  Payload ID: 3627
  Gene Symbol: CCHCR1
  Gene Name: coiled-coil alpha-helical rod protein 1
  ENST ID: ENST00000438812
  CDS Start-End: 136-700
agggggtacaggggccaggtgaagggacagatgaagagatcagaacagccttagagctcacgggctaactgggtgaagcctctggggaacatagatggctgaagacagaatctagagccttcaaataatgtggagatgtttccaccttcaggttccactgggctgattcccccctcccactttcaagctcggcccctttcaactctgccaagaatggctcccacctggctctcagacattcccctggtccaacccccaggccatcaagatgtctcagagaggcggctagacacccagagacctcaagtgaccatgtgggaacgggatgtttccagtgacaggcaggagccagggcggagaggcaggtcctgggggctggaggggtcacaggccctgagccagcaggctgaggtgatcgttcggcagctgcaagagctgcggtggctggaggaggaggtctggctcctgcgggagacctcgctgcagcagaagatgaggctagaggcccaggccatggagctagaggctctggcacgggcggagaaggccggccgagctgaggctgagggcctgcgtgctgctttggctggggctgaggttgtccggaagaacttggaagaggggaggcagcgggagctggaagaggttcagaggctgcaccaagagcagctgtcctctttgacacaggctcacgaggagg

SEQ ID NO: 120577 - DNA, 470 bp, Homo sapiens; identical to SEQ ID NO: 120563
  Payload ID: 3627
  Gene Symbol: CCHCR1
  Gene Name: coiled-coil alpha-helical rod protein 1
  ENST ID: ENST00000416552
  CDS Start-End: 91-470

SEQ ID NO: 120578 - DNA, 646 bp, Homo sapiens
  Payload ID: 3627
  Gene Symbol: CCHCR1
  Gene Name: coiled-coil alpha-helical rod protein 1
  ENST ID: ENST00000453360
  CDS Start-End: 189-646
agtagggggctctcgcggttggccttgctgagccatggagagaactctggagatggcgctcaagacccctgcactgtgtacctcctttctcacctctggccaggagcagcagggaccatagaaacttaaggaggagggggaacatagatggctgaagacagaatctagagccttcaaataatgtggagatgtttccaccttcaggttccactgggctgattcccccctcccactttcaagctcggcccctttcaactctgccaagaatggctcccacctggctctcagacattcccctggtccaacccccaggccatcaagatgtctcagagaggcggctagacacccagagacctcaagtgaccatgtgggaacgggatgtttccagtgacaggcaggagccagggcggagaggcaggtcctgggggctggaggggtcacaggccctgagccagcaggctgaggtgatcgttcggcagctgcaagagctgcggcggctggaggaggaggtccggctcctgcgggagacctcgctgcagcagaagatgaggctagaggcccaggccatggagctagaggctctggcacgggcggagaaggccggccgagctgaggctgagggcctgcgtgctgctttggctggggc

SEQ ID NO: 120579 - DNA, 838 bp, Homo sapiens; identical to SEQ ID NO: 120575
  Payload ID: 3627
  Gene Symbol: CCHCR1
  Gene Name: coiled-coil alpha-helical rod protein 1
  ENST ID: ENST00000444855
  CDS Start-End: 483-838

SEQ ID NO: 120580 - DNA, 676 bp, Homo sapiens
  Payload ID: 3627
  Gene Symbol: CCHCR1
  Gene Name: coiled-coil alpha-helical rod protein 1
  ENST ID: ENST00000455279
  CDS Start-End: 219-676
agcgaggcgtagggggtgtggccaaagcgcagtagggggctctcgcggttggccttgctgagccatggagagaactctggagatggcgctcaagacccctgcactgtgtacctcctttctcacctctggccaggagcagcagggaccatagaaacttaaggaggagggggaacatagatggctggagacagaatctagagccttcaaataatgtggagatgtttccaccttcaggttccactgggctgattcccccctcccactttcaagctcggcccctttcaactctgccaagaatggctcccacctggctctcagacattcccctggtccaacccccaggccatcaagatgtctcagagaggcggctagacacccagagacctcaagtgaccatgtgggaacgggatgtttccagtgacaggcaggagccagggcggagaggcaggtcctgggggctggaggggtcacaggccctgagccagcaggctgaggtgatcgttcggcagctgcaagagctgcggcggctggaggaggaggtccggctcctgcgggagacctcgctgcagcagaagatgaggctagaggcccaggccatggagctagaggctctggcacgggcggagaaggccggccgagctgaggctgagggcctgcgtgctgctttggctggggc

SEQ ID NO: 120581 - DNA, 2495 bp, Homo sapiens
  Payload ID: 3627
  Gene Symbol: CCHCR1
  Gene Name: coiled-coil alpha-helical rod protein 1
  ENST ID: ENST00000414614
  CDS Start-End: 153-2342
agtggccaaagcgcagtagggggctctcgcggttggggctttctctttggaaggtggcctgaaaattgaattggagtgtctttgtttctcctcttgtccaggggaacatagatggctgaagacagaatctagagccttcaaataatgtggagatgtttccaccttcaggttccactgggctgattcccccctcccactttcaagctcggcccctttcaactctgccaagaatggctcccacctggctctcagacattcccctggtccaacccccaggccatcaagatgtctcagagaggcggctagacacccagagacctcaagtgaccatgtgggaacgggatgtttccagtgacaggcaggagccagggcggagaggcaggtcctgggggctggaggggtcacaggccctgagccagcaggctgaggtgatcgttcggcagctgcaagagctgcggtggctggaggaggaggtctggctcctgcgggagacctcgctgcagcagaagatgaggctagaggcccaggccatggagctagaggctctggcacgggcggagaaggccggccgagctgaggctgagggcctgcgtgctgctttggctggggctgaggttgtccggaagaacttggaagaggggaggcagcgggagctggaagaggttcagaggctgcaccaagagcagctgtcctctttgacacaggctcacgaggaggctctttccagtttgaccagcaaggctgagggcttggagaagtctctgagtagtctggaaaccagaagagcaggggaagccaaggagctggccgaggctcagagggaggccgagctgcttcggaagcagctgagcaagacccaggaagacttggaggctcaggtgaccctggttgagaatctaagaaaatatgttggggaacaagtcccttctgaggtccacagccagacatgggaactggagcgacagaagcttctggaaaccatgcagcacttgcaggaggaccgggacagcctgcatgccaccgcggagctgctgcaggtgcgggtgcagagcctcacacacatcctcgccctgcaggaggaggagctgaccaggaaggttcaaccttcagattccctggagcctgagtttaccaggaagtgccagtccctgctgaaccgctggcgggagaaggtgtttgccctcatggtgcagctaaaggcccaggagctggaacacagtgactctgttaagcagctgaagggacaggtggcctcactccaggaaaaagtgacatcccagagccaggagcaggccatcctgcagcgatccctgcaggacaaagccgcagaggtggaggtggagcgtatgggtgccaagggcctgcagttggagctgagccgtgctcaggaggccaggcgttggtggcagcagcagacagcctcagccgaggagcagttgaggcttgtggtcaatgctgtcagcagctgtcccctaccaccaccggtcacagatgtgagccttgagttgcagcagctgcgggaagaacggaaccgcctggatgcagaactgcagctgagtgcccgcctcatccagcaggaggtgggccgggctcgggagcaaggggaggcagagcggcagcagctgagcaaggtggcccagcagctggagcaggagctgcagcagacccaggagtccctggctagcttggggctgcagctggaggtagcacgccagtgccagcaggagagcacagaggaggctgccagtctgcggcaggagctgacccagcagcaggaactctacgggcaagccctgcaagaaaaggtggctgaagtggaaactcggctgcgggagcaactctcagacacagagaggaggctgaacgaggctcggagggagcatgccaaggccgtggtctccttgcgccagattcagcgcagagccgcccaggaaaaggagcggagccaggaactcaggcgtctgcaggaggaggcccggaaggaggaggggcagcgactggcccggcgcttgcaggagctagagagggataagaacctcatgctggccaccttgcagcaggaaggtctcctctcccgttacaagcagcagcgactgttgacagttcttccttccctactggataagaagaaatctgtggtgtccagccccaggcctccagagtgttcagcatctgcacctgtagcagcagcagtgcccaccagggagtccataaaagggtccctctctgtcctgctcgatgacctgcaggacctgagtgaagccatttccaaagaggaagctgtttgtcaaggagacaaccttgacagatgctccagctgcaatccccagatgagcagctaagcagctgacagttggagggaaagccagcctgggggctgggaggatcctggagaagtgggtggggacagaccagcccttccccatcctggggttgccctgggggataccagctgagtctgaattctgctctaaataaagacgactacagaagga

SEQ ID NO: 120582 - DNA, 740 bp, Homo sapiens; identical to SEQ ID NO: 120573
  Payload ID: 3627
  Gene Symbol: CCHCR1
  Gene Name: coiled-coil alpha-helical rod protein 1
  ENST ID: ENST00000450631
  CDS Start-End: 227-740

SEQ ID NO: 120583 - DNA, 740 bp, Homo sapiens
  Payload ID: 3627
  Gene Symbol: CCHCR1
  Gene Name: coiled-coil alpha-helical rod protein 1
  ENST ID: ENST00000412577
  CDS Start-End: 227-740
gccaggtgaagggacagatgaagcgatcagaacagccttagagctcacgggctaactgggccttgctgagccatggagagaactctggagatggcgctcaagacccctgcactgtgtacctcctttctcacctctggccaggagcagcagggaccatagaaacttaaggaggagggggaacatagatggctggagacagaatctagagccttcaaataatgtggagatgtttccaccttcaggtcagtgggaccagacaaggggagtggtggttgtctctgcctgggaaactgaccatctttgtttttgtaattcttcaggttccactgggctgattcccccctcccactttcaagctcggcccctttcaactctgccaagaatggctcccacctggctctcagacattcccctggtccaacccccaggccatcaagatgtctcagagaggcggctagacacccagagacctcaagtgaccatgtgggaacgggatgtttccagtgacaggcaggagccagggcggagaggcaggtcctgggggctggaggggtcacaggccctgagccagcaggctgaggtgatcgttcggcagctgcaagagctgcggcggctggaggaggaggtccggctcctgcgggagacctcgctgcagcagaagatgaggctagaggcccaggccatggagctagaggctctggcacgggcggagaaggccggccgagctgaggctgagggcc

SEQ ID NO: 120584 - DNA, 646 bp, Homo sapiens
  Payload ID: 3627
  Gene Symbol: CCHCR1
  Gene Name: coiled-coil alpha-helical rod protein 1
  ENST ID: ENST00000425500
  CDS Start-End: 189-646
agtagggggctctcgcggttggccttgctgagccatggagagaactctggagatggcgctcaagacccctgcactgtgtacctcctttctcacctctggccaggagcagcagggaccatagaaacttaaggaggagggggaacatagatggctggagacagaatctagagccttcaaataatgtggagatgtttccaccttcaggttccactgggctgattcccccctcccactttcaagctcggcccctttcaactctgccaagaatggctcccacctggctctcagacattcccctggtccaacccccaggccatcaagatgtctcagagaggcggctagacacccagagacctcaagtgaccatgtgggaacgggatgtttccagtgacaggcaggagccagggcggagaggcaggtcctgggggctggaggggtcacaggccctgagccagcaggctgaggtgatcgttcggcagctgcaagagctgcggcggctggaggaggaggtccggctcctgcgggagacctcgctgcagcagaagatgaggctagaggcccaggccatggagctagaggctctggcacgggcggagaaggccggccgagctgaggctgagggcctgcgtgctgctttggctggggc

SEQ ID NO: 120585 - DNA, 2587 bp, Homo sapiens
  Payload ID: 3627
  Gene Symbol: CCHCR1
  Gene Name: coiled-coil alpha-helical rod protein 1
  Uniprot ID: Q8TD31
  ENST ID: ENST00000451521
  CDS Start-End: 8-2515
gccctgcatgtggccacattcagctggggccaggccttgggccagcactttaacagggaaggacccaagagtcatggcctgctggtgtctggatgggcttccctcaggccttgctgagccatggagagaactctggagatggcgctcaagacccctgcactgtgtacctcctttctcacctctggccaggagcagcagggaccatagaaacttaaggaggagggggaacatagatggctggagacagaatctagagccttcaaataatgtggagatgtttccaccttcaggccatcaagatgtctcagagaggcggctagacacccagagacctcaagtgaccatgtgggaacgggatgtttccagtgacaggcaggagccagggcggagaggcaggtcctgggggctggaggggtcacaggccctgagccagcaggctgaggtgatcgttcggcagctgcaagagctgcggcggctggaggaggaggtccggctcctgcgggagacctcgctgcagcagaagatgaggctagaggcccaggccatggagctagaggctctggcacgggcggagaaggccggccgagctgaggctgagggcctgcgtgctgctttggctggggctgaggttgtccggaagaacttggaagaggggagccagcgggagctggaagaggttcagaggctgcaccaagagcagctgtcctctttgacacaggctcacgaggaggctctttccagtttgaccagcaaggctgagggcttggagaagtctctgagtagtctggaaaccagaagagcaggggaagccaaggagctggccgaggctcagagggaggccgagctgcttcggaagcagctgagcaagacccaggaagacttggaggctcaggtgaccctggttgagaatctaagaaaatatgttggggaacaagtgccttctgaggtccacagccagacatgggaactggagcgacagaagcttctggaaaccatgcagcacttgcaggaggaccgggacagcctgcatgccaccgcggagctgctgcaggtgcgggtgcagagcctcacacacatcctcgccctgcaggaggaggagctgaccaggaaggttcaaccttcagattccctggagcctgagtttaccaggaagtgccagtccctgctgaaccgctggcgggagaaggtgtttgccctcatggtgcagctaaaggcccaggagctggaacacagtgactctgttaagcagctgaagggacaggtggcctcactccaggaaaaagtgacatcccagagccaggagcaggccatcctgcagcgatccctgcaggacaaagccgcagaggtggaggtggagcgtatgggtgccaagggcctgcagttggagctgagccgtgctcaggaggccaggcgtcggtggcagcagcagacagcctcagccgaggagcagctgaggcttgtggtcaatgctgtcagcagctctcagatctggctcgagaccaccatggctaaggtggaaggggctgccgcccagcttcccagcctcaacaaccgactcagctatgctgtccgcaaggtccacaccattcggggcctgattgctcgaaagcttgcccttgctcagctgcgccaggagagctgtcccctaccaccaccggtcacagacgtgagccttgagttgcagcagttgcgggaagaacggaaccgcctggatgcagaactgcagctgagtgcccgcctcatccagcaggaggtgggccgggctcgggagcaaggggaggcagagcggcagcagctgagcaaggtggcccagcagctggagcaggagctgcagcagacccaggagtccctggctagcttggggctgcagctggaggtagcacgccagggccagcaggagagcacagaggaggctgccagtctgcggcaggagctgacccagcagcaggaactctacgggcaagccctgcaagaaaaggtggctgaagtggaaactcggctgcgggagcaactctcagacacagagaggaggctgaacgaggctcggagggagcatgccaaggccgtggtctccttacgccagattcagcgcagagccgcccaggaaaaggagcggagccaggaactcaggcgtctgcaggaggaggcccggaaggaggaggggcagcgactggcccggcgcttgcaggagctagagagggataagaacctcatgctggccaccttgcagcaggaaggtctcctctcccgttacaagcagcagcgactgttgacagttcttccttccctactggataagaagaaatctgtggtgtccagccccaggcctccagagtgttcagcatctgcacctgtagcagcagcagtgcccaccagggagtccataaaagggtccctctctgtcctgctcgatgacctgcaggacctgagtgaagccatttccaaagaggaagctgtttgtcaaggagacaaccttgacagatgctccagctccaatccccagatgagcagctaagcagctgacagttggagggaaagccagcctgggggctgggaggatcctggagaagtgggtggggacagacca

SEQ ID NO: 120586 - DNA, 700 bp, Homo sapiens; identical to SEQ ID NO: 120576
  Payload ID: 3627
  Gene Symbol: CCHCR1
  Gene Name: coiled-coil alpha-helical rod protein 1
  ENST ID: ENST00000454570
  CDS Start-End: 136-700

SEQ ID NO: 120587 - DNA, 838 bp, Homo sapiens; identical to SEQ ID NO: 120570
  Payload ID: 3627
  Gene Symbol: CCHCR1
  Gene Name: coiled-coil alpha-helical rod protein 1
  ENST ID: ENST00000426967
  CDS Start-End: 189-838

SEQ ID NO: 120588 - DNA, 922 bp, Homo sapiens; identical to SEQ ID NO: 120566
  Payload ID: 3627
  Gene Symbol: CCHCR1
  Gene Name: coiled-coil alpha-helical rod protein 1
  ENST ID: ENST00000419592
  CDS Start-End: 1-769

SEQ ID NO: 120589 - DNA, 2600 bp, Homo sapiens
  Payload ID: 3627
  Gene Symbol: CCHCR1
  Gene Name: coiled-coil alpha-helical rod protein 1
  ENST ID: ENST00000416392
  CDS Start-End: 99-2447
aggcgtagggggtgtggccaaagcgcagtagggggctctcgcggttggggaacatagatggctgaagacagaatctagagccttcaaataatgtggagatgtttccaccttcaggttccactgggctgattcccccctcccactttcaagctcggcccctttcaactctgccaagaatggctcccacctggctctcagacattcccctggtccaacccccaggccatcaagatgtctcagagaggcggctagacacccagagacctcaagtgaccatgtgggaacgggatgtttccagtgacaggcaggagccagggcggagaggcaggtcctgggggctggaggggtcacaggccctgagccagcaggctgaggtgatcgttcggcagctgcaagagctgcggcggctggaggaggaggtccggctcctgcgggagacctcgctgcagcagaagatgaggctagaggcccaggccatggagctagaggctctggcacgggcggagaaggccggccgagctgaggctgagggcctgcgtgctgctttggctggggctgaggttgtccggaagaacttggaagaggggaggcagcgggagctggaagaggttcagaggctgcaccaagagcagctgtcctctttgacacaggctcacgaggaggctctttccagtttgaccagcaaggctgagggcttggagaagtctctgagtagtctggaaaccagaagagcaggggaagccaaggagctggccgaggctcagagggaggccgagctgcttcggaagcagctgagcaagacccaggaagacttggaggctcaggtgaccctggttgagaatctaagaaaatatgttggggaacaagtcccttctgaggtccacagccagacatgggaactggagcgacagaagcttctggacaccatgcagcacttgcaggaggaccgggacagcctgcatgccaccgcggagctgctgcaggtgcgggtgcagagcctcacacacatcctcgccctgcaggaggaggagctgaccaggaaggttcaaccttcagattccctggagcctgagtttaccaggaagtgccagtccctgctgaaccgctggcgggagaaggtgtttgccctcatggtgcagctaaaggcccaggagctggaacacagtgactctgttaagcagctgaagggacaggtggcctcactccaggaaaaagtgacatcccagagccaggagcaggccatcctgcagcgatccctgcaggacaaagccgcagaggtggaggtggagcgtatgggtgccaagggcctgcagttggagctgagccgtgctcaggaggccaggcgtcggtggcagcagcagacagcctcagccgaggagcagctgaggcttgtggtcaatgctgtcagcagctctcagatctggctcgagaccaccatggctaaggtggaaggggctgccgcccagcttcccagcctcaacaaccgactcagctatgctgtccgcaaggtccacaccattcggggcctgattgctcgaaagcttgcccttgctcagctgcgccaggagagctgtcccctaccaccaccggtcacagatgtgagccttgagttgcagcagctgcgggaagaacggaaccgcctggatgcagaactgcagctgagtgcccgcctcatccagcaggaggtgggccgggctcgggagcaaggggaggcagagcggcagcagctgagcaaggtggcccagcagctggagcaggagctgcagcagacccaggagtccctggctagcttggggctgcagctggaggtagcacgccagggccagcaggagagcacagaggaggctgccagtctgcggcaggagctgacccagcagcaggaactctacgggcaagccctgcaagaaaaggtggctgaagtggaaactcggctgcgggagcaactctcagacacagagaggaggctgaacgaggctcggagggagcatgccaaggccgtggtctccttgcgccagattcagcgcagagccgcccaggaaaaggagcggagccaggaactcaggcgtctgcaggaggaggcccggaaggaggaggggcagcgactggcccggcgcttgcaggagctagagagggataagaacctcatgctggccaccttgcagcaggaaggtctcctctcccgttacaagcagcagcgactgttgacagttcttccttccctactggataagaagaaatctgtggtgtccagccccaggcctccagagtgttcagcatctgcacctgtagcagcagcagtgcccaccagggagtccataaaagggtccctctctgtcctgctcgatgacctgcaggacctgagtgaagccatttccaaagaggaagctgtttgtcaaggagacaaccttgacagatgctccagctccaatccccagatgagcagctaagcagctgacagttggagggaaagccagcctgggggctgggaggatcctggagaagtgggtggggacagaccagcccttccccatcctggggttgccctgggggataccagctgagtctgaattctgctctaaataaagacgactacagaagga

SEQ ID NO: 120590 - DNA, 700 bp, Homo sapiens
  Payload ID: 3627
  Gene Symbol: CCHCR1
  Gene Name: coiled-coil alpha-helical rod protein 1
  ENST ID: ENST00000438739
  CDS Start-End: 136-700
agggggtacaggggccaggtgaagggacagatgaagagatcagaacagccttagagctcacgggctaactgggtgaagcctcgggggaacatagatggctgaagacagaatctagagccttcaaataatgtggagatgtttccaccttcaggttccactgggctgattcccccctcccactttcaagctcggcccctttcaactctgccaagaatggctcccacctggctctcagacattcccctggtccaacccccaggccatcaagatgtctcagagaggcggctagacacccagagacctcaagtgaccatgtgggaacgggatgtttccagtgacaggcaggagccagggcggagaggcaggtcctgggggctggaggggtcacaggccctgagccagcaggctgaggtgatcgttcggcagctgcaagagctgcggcggctggaggaggaggtccggctcctgcgggagacctcgctgcagcagaagatgaggctagaggcccaggccatggagctagaggctctggcacgggcggagaaggccggccgagctgaggctgagggcctgcgtgctgctttggctggggctgaggttgtccggaagaacttggaagaggggaggcagcgggagctggaagaggttcagaggctgcaccaagagcagctgtcctctttgacacaggctcacgaggagg

SEQ ID NO: 120591 - DNA, 1000 bp, Homo sapiens
  Payload ID: 3627
  Gene Symbol: CCHCR1
  Gene Name: coiled-coil alpha-helical rod protein 1
  ENST ID: ENST00000429943
  CDS Start-End: 53-1000
ggggaacatagatggctggagacagaatctagagccttcaaataatgtggagatgtttccaccttcaggccatcaagatgtctcagagaggcggctagacacccagagacctcaagtgaccatgtgggaacgggatgtttccagtgacaggcaggagccagggcggagaggcaggtcctgggggctggaggggtcacaggccctgagccagcaggctgaggtgatcgttcggcagctgcaagagctgcggcggctggaggaggaggtccggctcctgcgggagacctcgctgcagcagaagatgaggctagaggcccaggccatggagctagaggctctggcacgggcggagaaggccggccgagctgaggctgagggcctgcgtgctgctttggctggggctgaggttgtccggaagaatttggaagaggggagccagcgggagctggaagaggttcagaggctgcaccaagagcagctgtcctctttgacacaggctcacgaggaggctctttccagtttgaccagcaaggctgagggcttggagaagtctctgagtagtctggaaaccagaagagcaggggaagccaaggagctggccgaggctcagagggaggccgagctgcttcggaagcagctgagcaagacccaggaagacttggaggctcaggtgaccctggttgagaatctaagaaaatatgttggggaacaagtcccttctgaggtccacagccagacatgggaactggagcgacagaagcttctggaaaccatgcagcacttgcaggaggaccgggacagcctgcatgccaccgcggagctgctgcaggtgcgggtgcagagcctcacacacatcctcgccctgcaggaggaggagctgaccaggaaggttcaaccttcagattccctggagcctgagtttaccaggaagtgccagtccctgctgaaccgctggcgggagaaggtgtttgccctcatggtgcagctaaaggcccaggag

SEQ ID NO: 120592 - DNA, 2495 bp, Homo sapiens
  Payload ID: 3627
  Gene Symbol: CCHCR1
  Gene Name: coiled-coil alpha-helical rod protein 1
  ENST ID: ENST00000452333
  CDS Start-End: 153-2342
tgtggccaaagcgcagtagggggctctcgcggttggggctttctctttggaaggtggcctgaaaattgaattggagtgtctttgtttctcctcttgtccaggggaacatagatggctgaagacagaatctagagccttcaaataatgtggagatgtttccaccttcaggttccactgggctgattcccccctcccactttcaagctcggcccctttcaactctgccaagaatggctcccacctggctctcagacattcccctggtccaacccccaggccatcaagatgtctcagagaggcggctagacacccagagacctcaagtgaccatgtgggaacgggatgtttccagtgacaggcaggagccagggcggagaggcaggtcctgggggctggaggggtcacaggccctgagccagcaggctgaggtgatcgttcggcagctgcaagagctgcggcggctggaggaggaggtccggctcctgcgggagacctcgctgcagcagaagatgaggctagaggcccaggccatggagctagaggctctggcacgggcggagaaggccggccgagctgaggctgagggcctgcgtgctgctttggctggggctgaggttgtccggaagaacttggaagaggggaggcagcgggagctggaagaggttcagaggctgcaccaagagcagctgtcctctttgacacaggctcacgaggaggctctttccagtttgaccagcaaggctgagggcttggagaagtctctgagtagtctggaaaccagaagagcaggggaagccaaggagctggccgaggctcagagggaggccgagctgcttcggaagcagctgagcaagacccaggaagacttggaggctcaggtgaccctggttgagaatctaagaaaatatgttggggaacaagtcccttctgaggtccacagccagacatgggaactggagcgacagaagcttctggacaccatgcagcacttgcaggaggaccgggacagcctgcatgccaccgcggagctgctgcaggtgcgggtgcagagcctcacacacatcctcgccctgcaggaggaggagctgaccaggaaggttcaaccttcagattccctggagcctgagtttaccaggaagtgccagtccctgctgaaccgctggcgggagaaggtgtttgccctcatggtgcagctaaaggcccaggagctggaacacagtgactctgttaagcagctgaagggacaggtggcctcactccaggaaaaagtgacatcccagagccaggagcaggccatcctgcagcgatccctgcaggacaaagccgcagaggtggaggtggagcgtatgggtgccaagggcctgcagttggagctgagccgtgctcaggaggccaggcgtcggtggcagcagcagacagcctcagccgaggagcagctgaggcttgtggtcaatgctgtcagcagctgtcccctaccaccaccggtcacagatgtgagccttgagttgcagcagctgcgggaagaacggaaccgcctggatgcagaactgcagctgagtgcccgcctcatccagcaggaggtgggccgggctcgggagcaaggggaggcagagcggcagcagctgagcaaggtggcccagcagctggagcaggagctgcagcagacccaggagtccctggctagcttggggctgcagctggaggtagcacgccagggccagcaggagagcacagaggaggctgccagtctgcggcaggagctgacccagcagcaggaactctacgggcaagccctgcaagaaaaggtggctgaagtggaaactcggctgcgggagcaactctcagacacagagaggaggctgaacgaggctcggagggagcatgccaaggccgtggtctccttgcgccagattcagcgcagagccgcccaggaaaaggagcggagccaggaactcaggcgtctgcaggaggaggcccggaaggaggaggggcagcgactggcccggcgcttgcaggagctagagagggataagaacctcatgctggccaccttgcagcaggaaggtctcctctcccgttacaagcagcagcgactgttgacagttcttccttccctactggataagaagaaatctgtggtgtccagccccaggcctccagagtgttcagcatctgcacctgtagcagcagcagtgcccaccagggagtccataaaagggtccctctctgtcctgctcgatgacctgcaggacctgagtgaagccatttccaaagaggaagctgtttgtcaaggagacaaccttgacagatgctccagctccaatccccagatgagcagctaagcagctgacagttggagggaaagccagcctgggggctgggaggatcctggagaagtgggtggggacagaccagcccttccccatcctggggttgccctgggggataccagctgagtctgaattctgctctaaataaagacgactacagaagga

SEQ ID NO: 120593 - DNA, 838 bp, Homo sapiens; identical to SEQ ID NO: 120559
  Payload ID: 3627
  Gene Symbol: CCHCR1
  Gene Name: coiled-coil alpha-helical rod protein 1
  ENST ID: ENST00000427654
  CDS Start-End: 483-838

SEQ ID NO: 120594 - DNA, 2958 bp, Homo sapiens; identical to SEQ ID NO: 120569
  Payload ID: 3627
  Gene Symbol: CCHCR1
  Gene Name: coiled-coil alpha-helical rod protein 1
  ENST ID: ENST00000447252
  CDS Start-End: 457-2805

SEQ ID NO: 120595 - DNA, 2958 bp, Homo sapiens; identical to SEQ ID NO: 120556
  Payload ID: 3627
  Gene Symbol: CCHCR1
  Gene Name: coiled-coil alpha-helical rod protein 1
  Uniprot ID: Q8TD31
  ENST ID: ENST00000416163
  CDS Start-End: 457-2805

SEQ ID NO: 120596 - DNA, 740 bp, Homo sapiens; identical to SEQ ID NO: 120561
  Payload ID: 3627
  Gene Symbol: CCHCR1
  Gene Name: coiled-coil alpha-helical rod protein 1
  ENST ID: ENST00000423825
  CDS Start-End: 227-740

SEQ ID NO: 120597 - DNA, 1000 bp, Homo sapiens
  Payload ID: 3627
  Gene Symbol: CCHCR1
  Gene Name: coiled-coil alpha-helical rod protein 1
  ENST ID: ENST00000449364
  CDS Start-End: 53-1000
ggggaacatagatggctgaagacagaatctagagccttcaaataatgtggagatgtttccaccttcaggccatcaagatgtctcagagaggcggctagacacccagagacctcaagtgaccatgtgggaacgggatgtttccagtgacaggcaggagccagggcggagaggcaggtcctgggggctggaggggtcacaggccctgagccagcaggctgaggtgatcgttcggcagctgcaagagctgcggtggctggaggaggaggtctggctcctgcgggagacctcgctgcagcagaagatgaggctagaggcccaggccatggagctagaggctctggcacgggcggagaaggccggccgagctgaggctgagggcctgcgtgctgctttggctggggctgaggttgtccggaagaacttggaagaggggaggcagcgggagctggaagaggttcagaggctgcaccaagagcagctgtcctctttgacacaggctcacgaggaggctctttccagtttgaccagcaaggctgagggcttggagaagtctctgagtagtctggaaaccagaagagcaggggaagccaaggagctggccgaggctcagagggaggccgagctgcttcggaagcagctgagcaagacccaggaagacttggaggctcaggtgaccctggttgagaatctaagaaaatatgttggggaacaagtcccttctgaggtccacagccagacatgggaactggagcgacagaagcttctggaaaccatgcagcacttgcaggaggaccgggacagcctgcatgccaccgcggagctgctgcaggtgcgggtgcagagcctcacacacatcctcgccctgcaggaggaggagctgaccaggaaggttcaaccttcagattccctggagcctgagtttaccaggaagtgccagtccctgctgaaccgctggcgggagaaggtgtttgccctcatggtgcagctaaaggcccaggag

SEQ ID NO: 120598 - DNA, 646 bp, Homo sapiens
  Payload ID: 3627
  Gene Symbol: CCHCR1
  Gene Name: coiled-coil alpha-helical rod protein 1
  ENST ID: ENST00000455669
  CDS Start-End: 189-646
agtagggggctctcgcggttggccttgctgagccatggagagaactctggagatggcgctcaagacccctgcactgtgtacctcctttctcacctctggccaggagcagcagggaccatagaaacttaaggaggagggggaacatagatggctgaagacagaatctagagccttcaaataatgtggagatgtttccaccttcaggttccactgggctgattcccccctcccactttcaagctcggcccctttcaactctgccaagaatggctcccacctggctctcagacattcccctggtccaacccccaggccatcaagatgtctcagagaggcggctagacacccagagacctcaagtgaccatgtgggaacgggatgtttccagtgacaggcaggagccagggcggagaggcaggtcctgggggctggaggggtcacaggccctgagccagcaggctgaggtgatcgttcggcagctgcaagagctgcggtggctggaggaggaggtctggctcctgcgggagacctcgctgcagcagaagatgaggctagaggcccaggccatggagctagaggctctggcacgggcggagaaggccggccgagctgaggctgagggcctgcgtgctgctttggctggggc

SEQ ID NO: 120599 - DNA, 1000 bp, Homo sapiens; identical to SEQ ID NO: 120597
  Payload ID: 3627
  Gene Symbol: CCHCR1
  Gene Name: coiled-coil alpha-helical rod protein 1
  ENST ID: ENST00000444737
  CDS Start-End: 53-1000

SEQ ID NO: 120600 - DNA, 470 bp, Homo sapiens; identical to SEQ ID NO: 120562
  Payload ID: 3627
  Gene Symbol: CCHCR1
  Gene Name: coiled-coil alpha-helical rod protein 1
  ENST ID: ENST00000437027
  CDS Start-End: 91-470

SEQ ID NO: 120601 - DNA, 646 bp, Homo sapiens; identical to SEQ ID NO: 120578
  Payload ID: 3627
  Gene Symbol: CCHCR1
  Gene Name: coiled-coil alpha-helical rod protein 1
  ENST ID: ENST00000425351
  CDS Start-End: 189-646

SEQ ID NO: 120602 - DNA, 470 bp, Homo sapiens; identical to SEQ ID NO: 120572
  Payload ID: 3627
  Gene Symbol: CCHCR1
  Gene Name: coiled-coil alpha-helical rod protein 1
  ENST ID: ENST00000416850
  CDS Start-End: 91-470

SEQ ID NO: 120603 - DNA, 646 bp, Homo sapiens; identical to SEQ ID NO: 120598
  Payload ID: 3627
  Gene Symbol: CCHCR1
  Gene Name: coiled-coil alpha-helical rod protein 1
  ENST ID: ENST00000437918
  CDS Start-End: 189-646

SEQ ID NO: 120604 - DNA, 700 bp, Homo sapiens; identical to SEQ ID NO: 120590
  Payload ID: 3627
  Gene Symbol: CCHCR1
  Gene Name: coiled-coil alpha-helical rod protein 1
  ENST ID: ENST00000447874
  CDS Start-End: 136-700

SEQ ID NO: 120605 - DNA, 664 bp, Homo sapiens
  Payload ID: 3627
  Gene Symbol: CCHCR1
  Gene Name: coiled-coil alpha-helical rod protein 1
  ENST ID: ENST00000448141
  CDS Start-End: 91-664
gtagggggtgtggccaaagcgcagtagggggctctcgcggggaacatagatggctggagacagaatctagagccttcaaataatgtggagatgtttccaccttcaggccatcaagatgtctcagagaggcggctagacacccagagacctcaagtgaccatgtgggaacgggatgtttccagtgacaggcaggagccagggcggagaggcaggtcctgggggctggaggggtcacaggccctgagccagcaggctgaggtgatcgttcggcagctgcaagagctgcggcggctggaggaggaggtccggctcctgcgggagacctcgctgcagcagaagatgaggctagaggcccaggccatggagctagaggctctggcacgggcggagaaggccggccgagctgaggctgagggcctgcgtgctgctttggctggggctgaggttgtccggaagaacttggaagaggggagccagcgggagctggaagaggttcagaggctgcaccaagagcagctgtcctctttgacacaggctcacgaggaggctctttccagtttgaccagcaaggctgagggcttggagaagtctctgagtagtctggaaaccagaagagcaggggaagccaaggagctggccgaggctcagagggaggccgagctgc

SEQ ID NO: 120606 - DNA, 2600 bp, Homo sapiens; identical to SEQ ID NO: 120589
  Payload ID: 3627
  Gene Symbol: CCHCR1
  Gene Name: coiled-coil alpha-helical rod protein 1
  ENST ID: ENST00000433804
  CDS Start-End: 99-2447

SEQ ID NO: 120607 - DNA, 922 bp, Homo sapiens
  Payload ID: 3627
  Gene Symbol: CCHCR1
  Gene Name: coiled-coil alpha-helical rod protein 1
  ENST ID: ENST00000417776
  CDS Start-End: 1-769
ccgcctggatgcagaactgcagctgagtgcccgcctcatccagcaggaggtgggccgggctcgggagcaaggggaggcagagcggcagcagctgagcaaggtggcccagcagctggagcaggagctgcagcagacccaggagtccctggctagcttggggctgcagctggaggtagcacgccagggccagcaggagagcacagaggaggctgccagtctgcggcaggagctgacccagcagcaggaactctacgggcaagccctgcaagaaaaggtggctgaagtggaaactcggctgcgggagcaactctcagacacagagaggaggctgaacgaggctcggagggagcatgccaaggccgtggtctccttgcgccagattcagcgcagagccgcccaggaaaaggagcggagccaggaactcaggcgtctgcaggaggaggcccggaaggaggaggggcagcgactggcccggcgcttgcaggagctagagagggataagaacctcatgctgcagcgactgttgacagttcttccttccctactggataagaagaaatctgtggtgtccagccccaggcctccagagtgttcagcttctgcacctgtagcagcagcagtgcccaccagggagtccataaaagggtccctctctgtcctgctcgatgacctgcaggacctgagtgaagccatttccaaagaggaagctgtttgtcaaggagacaaccttgacagatgctccagctccaatccccagatgagcagctaagcagctgacagttggagggaaagccagcctgggggctgggaggatcctggagaagtgggtggggacagaccagcccttccccatcctggggttgccctgggggataccagctgagtctgaattctgctctaaataaagacgactacagaagga

SEQ ID NO: 120608 - DNA, 2495 bp, Homo sapiens; identical to SEQ ID NO: 120592
  Payload ID: 3627
  Gene Symbol: CCHCR1
  Gene Name: coiled-coil alpha-helical rod protein 1
  ENST ID: ENST00000428677
  CDS Start-End: 153-2342

SEQ ID NO: 120609 - DNA, 589 bp, Homo sapiens
  Payload ID: 3627
  Gene Symbol: CCHCR1
  Gene Name: coiled-coil alpha-helical rod protein 1
  ENST ID: ENST00000507829
  CDS Start-End: 243-589
gaggcgtagggggtgtggccaaagcgcagtagggggctctcgcggttggccttgctgagccatggagagaactctggagatggcgctcaagacccctgcactgtgtacctcctttctcacctctggccaggagcagcagggaccatagaaacttaaggaggagggtagaggcactgcccagaatcctgaaagggaacatagatggctggagacagaatctagagccttcaaataatgtggagatgtttccaccttcaggttccactgggctgattcccccctcccactttcaagctcggcccctttcaactctgccaagaatggctcccacctggctctcagacattcccctggtccaacccccaggccatcaagatgtctcagagaggcggctagacacccagagacctcaagtgaccatgtgggaacgggatgtttccagtgacaggcaggagccagggcggagaggcaggtcctgggggctggaggggtcacaggccctgagccagcaggctgaggtgatcgttcggcagctgcaagagctgcggcggctggaggaggaggtccggctcctgcgggagacctcgct

SEQ ID NO: 120610 - DNA, 588 bp, Homo sapiens
  Payload ID: 3627
  Gene Symbol: CCHCR1
  Gene Name: coiled-coil alpha-helical rod protein 1
  ENST ID: ENST00000507751
  CDS Start-End: 115-588
aggggccaggtgaagggacagatgaagagatcagaacagccttagagctcacgggctaactgggggaacatagatggctggagacagaatctagagccttcaaataatgtggagatgtttccaccttcaggttccactgggctgattcccccctcccactttcaagctcggcccctttcaactctgccaagaatggctcccacctggctctcagacattcccctggtccaacccccaggccatcaagatgtctcagagaggcggctagacacccagagacctcaagtgaccatgtgggaacgggatgtttccagtgacaggcaggagccagggcggagaggcaggtcctgggggctggaggggtcacaggccctgagccagcaggctgaggtgatcgttcggcagctgcaagagctgcggcggctggaggaggaggtccggctcctgcgggagacctcgctgcagcagaagatgaggctagaggcccaggccatggagctagaggctctggcacgggcggagaaggccggccgagctgaggctgagggcctgcgtgctgctttggctggggctgaggttgtccggaag

SEQ ID NO: 120611 - DNA, 567 bp, Homo sapiens
  Payload ID: 3627
  Gene Symbol: CCHCR1
  Gene Name: coiled-coil alpha-helical rod protein 1
  ENST ID: ENST00000508683
  CDS Start-End: 89-567
ggtgtggccaaagcgcagtagggggctctcgcggttggggaacatagatggctggagacagaatctagagccttcaaataatgtggagatgtttccaccttcaggccatcaagatgtctcagagaggcggctagacacccagagacctcaagtgaccatgtgggaacgggatgtttccagtgacaggcaggagccagggcggagaggcaggtcctgggggctggaggggtcacaggccctgagccagcaggctgaggtgatcgttcggcagctgcaagagctgcggcggctggaggaggaggtccggctcctgcgggagacctcgctgcagcagaagatgaggctagaggcccaggccatggagctagaggctctggcacgggcggagaaggccggccgagctgaggctgagggcctgcgtgctgctttggctggggctgaggttgtccggaagaacttggaagaggggagccagcgggagctggaagaggttcagaggctgcaccaagagcagctgtcctctttgacacaggctcacgaggaggctctttccagtttgaccagcaa

SEQ ID NO: 120612 - DNA, 582 bp, Homo sapiens
  Payload ID: 3627
  Gene Symbol: CCHCR1
  Gene Name: coiled-coil alpha-helical rod protein 1
  ENST ID: ENST00000507459
  CDS Start-End: 76-318
aaagcgcagtagggggctctcgcggggaacatagatggctggagacagaatctagagccttcaaataatgtggagatgtttccaccttcaggttccactgggctgattcccccctcccactttcaagctcggcccctttcaactctgccaagaatggctcccacctggctctcagacattcccctggtccaacccccaggccatcaagatgtctcagagaggcggctagacacccagagacctcaagtgaccatgtgggaacgggatgtttccagtgacaggcaggagccagggcggagaggcagctgtcctctttgacacaggctcacgaggaggctctttccagtttgaccagcaaggctgagggcttggagaagtctctgagtagtctggaaaccagaagagcaggggaagccaaggagctggccgaggctcagagggaggccgagctgcttcggaagcagctgagcaagacccaggaagacttggaggctcaggtgaccctggttgagaatctaagaaaatatgttggggaacaagtgccttctgaggtccacagccagacatgggaactggagcgac

SEQ ID NO: 120613 - DNA, 580 bp, Homo sapiens
  Payload ID: 3627
  Gene Symbol: CCHCR1
  Gene Name: coiled-coil alpha-helical rod protein 1
  ENST ID: ENST00000503420
  CDS Start-End: 202-580
gacgttcgggaagagtcggttgggggcgggaaggggctgagcgggggtcctgggagggttcaaggggtccaaaggggaagggggtacaggggccaggtgaagggacagatgaagagatcagaacagccttagagctcacgggctaactgggggaacatagatggctggagacagaatctagagccttcaaataatgtggagatgtttccaccttcaggccatcaagatgtctcagagaggcggctagacacccagagacctcaagtgaccatgtgggaacgggatgtttccagtgacaggcaggagccagggcggagaggcaggtcctgggggctggaggggtcacaggccctgagccagcaggctgaggtgatcgttcggcagctgcaagagctgcggcggctggaggaggaggtccggctcctgcgggagacctcgctgcagcagaagatgaggctagaggcccaggccatggagctagaggctctggcacgggcggagaaggccggccgagctgaggctgagggcctgcgtgctgctttggctggggctgaggttgtccggaagaacttggaagagg

SEQ ID NO: 120614 - DNA, 715 bp, Homo sapiens
  Payload ID: 3627
  Gene Symbol: CCHCR1
  Gene Name: coiled-coil alpha-helical rod protein 1
  ENST ID: ENST00000488920
  CDS Start-End: 173-415
ggactcgagaaagaggaggcgggcagcaggcatggaagctaaggggatagtagagagaagctgagagaacagccgcaggaaagatttgaataagatgtcaggacgctggcttttctgcctggggatctaggcggcctggattcccaaggtcttggggagggtctagccctgcatgtggccacattcagctggggccaggccttgggccagcactttaacagggaaggacccaagagtcatggcctgctggtgtctggatgggcttccctcaggccttgctgagccatggagagaactctggagatggcgctcaagacccctgcactgtgtacctcctttctcacctctggccaggagcagcagggaccatagaaacttaaggaggagggggctttctctttggaaggtggcctgaaaattgaattggagtgtctttgtttctcctcttgtccaggggaacatagatggctggagacagaatctagagccttcaaataatgtggagatgtttccaccttcaggttccactgggctgattcccccctcccactttcaagctcggcccctttcaactctgccaagaatggctcccacctggctctcagacattcccctggtccaacccccaggccatcaagatgtctcagagaggcggctagacacccagagacctcaagtgaccatgtgggaacgggatgtttccagtgacaggcag

SEQ ID NO: 120615 - DNA, 589 bp, Homo sapiens
  Payload ID: 3627
  Gene Symbol: CCHCR1
  Gene Name: coiled-coil alpha-helical rod protein 1
  ENST ID: ENST00000508852
  CDS Start-End: 80-322
aaagcgcagtagggggctctcgcggttggggaacatagatggctggagacagaatctagagccttcaaataatgtggagatgtttccaccttcaggttccactgggctgattcccccctcccactttcaagctcggcccctttcaactctgccaagaatggctcccacctggctctcagacattcccctggtccaacccccaggccatcaagatgtctcagagaggcggctagacacccagagacctcaagtgaccatgtgggaacgggatgtttccagtgacaggcaggagccagggcggagaggcagctgtcctctttgacacaggctcacgaggaggctctttccagtttgaccagcaaggctgagggcttggagaagtctctgagtagtctggaaaccagaagagcaggggaagccaaggagctggccgaggctcagagggaggccgagctgcttcggaagcagctgagcaagacccaggaagacttggaggctcaggtgaccctggttgagaatctaagaaaatatgttggggaacaagtgccttctgaggtccacagccagacatgggaactggagcgacaga

SEQ ID NO: 120616 - DNA, 479 bp, Homo sapiens
  Payload ID: 3627
  Gene Symbol: CCHCR1
  Gene Name: coiled-coil alpha-helical rod protein 1
  ENST ID: ENST00000507892
  CDS Start-End: 357-479
gacgttcgggaagagtcggttgggggcgggaaggggctgagcgggggtcctgggagggttcaaggggtccaaaggggaagggggtacaggggccaggtgaagggacagatgaagagatcagaacagccttagagctcacgggctaactgggtgaagcctcgggccttgctgagccatggagagaactctggagatggcgctcaagacccctgcactgtgtacctcctttctcacctctggccaggagcagcagggaccatagaaacttaaggaggagggtagaggcactgcccagaatcctgaaagggaacatagatggctggagacagaatctagagccttcaaataatgtggagatgtttccaccttcaggttccactgggctgattcccccctcccactttcaagctcggcccctttcaactctgccaagaatggctcccacctggctctcagacattcccctggtccaaccccca

SEQ ID NO: 120617 - DNA, 544 bp, Homo sapiens
  Payload ID: 3627
  Gene Symbol: CCHCR1
  Gene Name: coiled-coil alpha-helical rod protein 1
  ENST ID: ENST00000507226
  CDS Start-End: 257-544
gcagtagggggctctcgcggttggccttgctgagccatggagagaactctggagatggcgctcaagacccctgcactgtgtacctcctttctcacctctggccaggagcagcagggaccatagaaacttaaggaggagggggctttctctttggaaggtggcctgaaaattgaattggagtgtctttgtttctcctcttgtccaggggaacatagatggctggagacagaatctagagccttcaaataatgtggagatgtttccaccttcaggttccactgggctgattcccccctcccactttcaagctcggcccctttcaactctgccaagaatggctcccacctggctctcagacattcccctggtccaacccccaggccatcaagatgtctcagagaggcggctagacacccagagacctcaagtgaccatgtgggaacgggatgtttccagtgacaggcaggagccagggcggagaggcaggtcctgggggctggaggggtcacaggccctgagccagcaggctgaggtgatcgttcgg

SEQ ID NO: 120618 - DNA, 662 bp, Homo sapiens
  Payload ID: 3627
  Gene Symbol: CCHCR1
  Gene Name: coiled-coil alpha-helical rod protein 1
  ENST ID: ENST00000502557
  CDS Start-End: 307-662
gggggcgggaaggggctgagcgggggtcctgggagggttcaaggggtccaaaggggaagggggtacaggggccaggtgaagggacagatgaagagatcagaacagccttagagctcacgggctaactgggtgaagcctcgggtatctaggggagcagtggtgggagagtagagccggctagcgtacagggggcgagggcaggctattgagagatgggggtgagggtcaggaccagaataattccttcagaaaaaggggaacatagatggctggagacagaatctagagccttcaaataatgtggagatgtttccaccttcaggttccactgggctgattcccccctcccactttcaagctcggcccctttcaactctgccaagaatggctcccacctggctctcagacattcccctggtccaacccccaggccatcaagatgtctcagagaggcggctagacacccagagacctcaagtgaccatgtgggaacgggatgtttccagtgacaggcaggagccagggcggagaggcaggtcctgggggctggaggggtcacaggccctgagccagcaggctgaggtgatcgttcggcagctgcaagagctgcggcggctggaggaggaggtccggctcctgcgggagacctcgctgcagcagaa

SEQ ID NO: 120619 - DNA, 861 bp, Homo sapiens
  Payload ID: 3627
  Gene Symbol: CCHCR1
  Gene Name: coiled-coil alpha-helical rod protein 1
  ENST ID: ENST00000506831
  CDS Start-End: 754-861
aagtgcccactatgtgttaggactcgagaaagaggaggcgggcagcaggcatggaagctaaggggatagtagagagaagctgagagaacagccgcaggaaagatttgaataagatgtcaggacgctggcttttctgcctggggatctaggcggcctggattcccaaggtcttggggagggtctagccctgcatgtggccacattcagctggggccaggccttgggccagcactttaacagggaaggacccaagagtcatggcctgctggtgtctggatgggcttccctcaggccttgctgagccatggagagaactctggagatggcgctcaagacccctgcactgtgtacctcctttctcacctctggccaggagcagcagggaccatagaaacttaaggaggagggtagaggcactgcccagaatcctgaaagtatgagtaaagcctcagagcccctctcagtctgtctctttcagtaaattctctccacttgatagttgcttgggttccatgaggaaccaggttgagacaagcaagtgaatttggggtatctcctactttggggaagtaggaaaagagctaagcatcgggtggacctggctataattcaaggattatgactttgttattgtaggggctttctctttggaaggtggcctgaaaattgaattggagtgtctttgtttctcctcttgtccaggggaacatagatggctggagacagaatctagagccttcaaataatgtggagatgtttccaccttcaggttccactgggctgattcccccctcccactttcaagctcggcccctttcaactctgccaagaatggctcccacctggctctcagacattccc

SEQ ID NO: 120620 - DNA, 560 bp, Homo sapiens
  Payload ID: 3627
  Gene Symbol: CCHCR1
  Gene Name: coiled-coil alpha-helical rod protein 1
  ENST ID: ENST00000503934
  CDS Start-End: 142-560
aaagcgcagtagggggctctcgcggggctttctctttggaaggtggcctgaaaattgaattggagtgtctttgtttctcctcttgtccaggggaacatagatggctggagacagaatctagagccttcaaataatgtggagatgtttccaccttcaggttccactgggctgattcccccctcccactttcaagctcggcccctttcaactctgccaagaatggctcccacctggctctcagacattcccctggtccaacccccaggccatcaagatgtctcagagaggcggctagacacccagagacctcaagtgaccatgtgggaacgggatgtttccagtgacaggcaggagccagggcggagaggcaggtcctgggggctggaggggtcacaggccctgagccagcaggctgaggtgatcgttcggcagctgcaagagctgcggcggctggaggaggaggtccggctcctgcgggagacctcgctgcagcagaagatgaggctagaggcccaggccatggagctagaggctctggcacgggcggagaaggccggccg

SEQ ID NO: 120621 - DNA, 511 bp, Homo sapiens
  Payload ID: 3627
  Gene Symbol: CCHCR1
  Gene Name: coiled-coil alpha-helical rod protein 1
  ENST ID: ENST00000513222
  CDS Start-End: 91-511
aaagcgcagtagggggctctcgcggttggttccactgggctgattcccccctcccactttcaagctcggcccctttcaactctgccaagaatggctcccacctggctctcagacattcccctggtccaacccccaggccatcaagatgtctcagagaggcggctagacacccagagacctcaagtgaccatgtgggaacgggatgtttccagtgacaggcaggagccagggcggagaggcaggtcctgggggctggaggggtcacaggccctgagccagcaggctgaggtgatcgttcggcagctgcaagagctgcggcggctggaggaggaggtccggctcctgcgggagacctcgctgcagcagaagatgaggctagaggcccaggccatggagctagaggctctggcacgggcggagaaggccggccgagctgaggctgagggcctgcgtgctgctttggctggggctgaggttgtccggaagaacttggaagaggggagccagcggg

SEQ ID NO: 120622 - DNA, 565 bp, Homo sapiens
  Payload ID: 3627
  Gene Symbol: CCHCR1
  Gene Name: coiled-coil alpha-helical rod protein 1
  ENST ID: ENST00000512418
  CDS Start-End: 80-214
aaagcgcagtagggggctctcgcggttggggaacatagatggctggagacagaatctagagccttcaaataatgtggagatgtttccaccttcaggccatcaagatgtctcagagaggcggctagacacccagagacctcaagtgaccatgtgggaacgggatgtttccagtgacaggcaggagccagggcggagaggcagctgtcctctttgacacaggctcacgaggaggctctttccagtttgaccagcaaggctgagggcttggagaagtctctgagtagtctggaaaccagaagagcaggggaagccaaggagctggccgaggctcagagggaggccgagctgcttcggaagcagctgagcaagacccaggaagacttggaggctcaggtgaccctggttgagaatctaagaaaatatgttggggaacaagtgccttctgaggtccacagccagacatgggaactggagcgacagaagcttctggaaaccatgcagcacttgcaggaggaccgggacagcctgcatgccaccgcggagctgctgcaggtgcgggtgcaga

SEQ ID NO: 120623 - DNA, 2954 bp, Homo sapiens
  Payload ID: 3627
  Gene Symbol: CCHCR1
  Gene Name: coiled-coil alpha-helical rod protein 1
  ENST ID: ENST00000610825
  CDS Start-End: 190-2802
gtgcccactatgtgttaggactcgagaaagaggaggcgggcagcaggcatggaagctaaggggatagtagagagaagctgagagaacagccgcaggaaagatttgaataagatgtcaggacgctggcttttctgcctggggatctaggcggcctggattcccaaggtcttggggagggtctagccctgcatgtggccacattcagctggggccaggccttgggccagcactttaacagggaaggacccaagagtcatggcctgctggtgtctggatgggcttccctcaggccttgctgagccatggagagaactctggagatggcgctcaagacccctgcactgtgtacctcctttctcacctctggccaggagcagcagggaccatagaaacttaaggaggagggggaacatagatggcagacagaatctagagccttcaaataatgtggagatgtttccaccttcaggttccactgggctgattcccccctcccactttcaagctcggcccctttcaactctgccaagaatggctcccacctggctctcagacattcccctggtccaacccccaggccatcaagatgtctcagagaggcggctagacacccagagacctcaagtgaccatgtgggaacgggatgtttccagtgacaggcaggagccagggcggagaggcaggtcctgggggctggaggggtcacaggccctgagccagcaggctgaggtgatcgttcggcagctgcaagagctgcggtggctggaggaggaggtctggctcctgcgggagacctcgctgcagcagaagatgaggctagaggcccaggccatggagctagaggctctggcacgggcggagaaggccggccgagctgaggctgagggcctgcgtgctgctttggctggggctgaggttgtccggaagaacttggaagaggggaggcagcgggagctggaagaggttcagaggctgcaccaagagcagctgtcctctttgacacaggctcacgaggaggctctttccagtttgaccagcaaggctgagggcttggagaagtctctgagtagtctggaaaccagaagagcaggggaagccaaggagctggccgaggctcagagggaggccgagctgcttcggaagcagctgagcaagacccaggaagacttggaggctcaggtgaccctggttgagaatctaagaaaatatgttggggaacaagtcccttctgaggtccacagccagacatgggaactggagcgacagaagcttctggaaaccatgcagcacttgcaggaggaccgggacagcctgcatgccaccgcggagctgctgcaggtgcgggtgcagagcctcacacacatcctcgccctgcaggaggaggagctgaccaggaaggttcaaccttcagattccctggagcctgagtttaccaggaagtgccagtccctgctgaaccgctggcgggagaaggtgtttgccctcatggtgcagctaaaggcccaggagctggaacacagtgactctgttaagcagctgaagggacaggtggcctcactccaggaaaaagtgacatcccagagccaggagcaggccatcctgcagcgatccctgcaggacaaagccgcagaggtggaggtggagcgtatgggtgccaagggcctgcagttggagctgagccgtgctcaggaggccaggcgttggtggcagcagcagacagcctcagccgaggagcagttgaggcttgtggtcaatgctgtcagcagctctcagatctggctcgagaccaccatggctaaggtggaaggggctgccgcccagcttcccagcctcaacaaccgactcagctatgctgtccgcaaggtccacaccattcggggcctgattgctcgaaagcttgcccttgctcagctgcgccaggagagctgtcccctaccaccaccggtcacagatgtgagccttgagttgcagcagctgcgggaagaacggaaccgcctggatgcagaactgcagctgagtgcccgcctcatccagcaggaggtgggccgggctcgggagcaaggggaggcagagcggcagcagctgagcaaggtggcccagcagctggagcaggagctgcagcagacccaggagtccctggctagcttggggctgcagctggaggtagcacgccagtgccagcaggagagcacagaggaggctgccagtctgcggcaggagctgacccagcagcaggaactctacgggcaagccctgcaagaaaaggtggctgaagtggaaactcggctgcgggagcaactctcagacacagagaggaggctgaacgaggctcggagggagcatgccaaggccgtggtctccttgcgccagattcagcgcagagccgcccaggaaaaggagcggagccaggaactcaggcgtctgcaggaggaggcccggaaggaggaggggcagcgactggcccggcgcttgcaggagctagagagggataagaacctcatgctggccaccttgcagcaggaaggtctcctctcccgttacaagcagcagcgactgttgacagttcttccttccctactggataagaagaaatctgtggtgtccagccccaggcctccagagtgttcagcatctgcacctgtagcagcagcagtgcccaccagggagtccataaaagggtccctctctgtcctgctcgatgacctgcaggacctgagtgaagccatttccaaagaggaagctgtttgtcaaggagacaaccttgacagatgctccagctgcaatccccagatgagcagctaagcagctgacagttggagggaaagccagcctgggggctgggaggatcctggagaagtgggtggggacagaccagcccttccccatcctggggttgccctgggggataccagctgagtctgaattctgctctaaataaagacgactacagaagg

SEQ ID NO: 120624 - DNA, 2954 bp, Homo sapiens
  Payload ID: 3627
  Gene Symbol: CCHCR1
  Gene Name: coiled-coil alpha-helical rod protein 1
  ENST ID: ENST00000611796
  CDS Start-End: 190-2802
gtgcccactatgtgttaggactcgagaaagaggaggcgggcagcaggcatggaagctaaggggatagtagagagaagctgagagaacagccgcaggaaagatttgaataagatgtcaggacgctggcttttctgcctggggatctaggcggcctggattcccaaggtcttggggagggtctagccctgcatgtggccacattcagctggggccaggccttgggccagcactttaacagggaaggacccaagagtcatggcctgctggtgtctggatgggcttccctcaggccttgctgagccatggagagaactctggagatggcgctcaagacccctgcactgtgtacctcctttctcacctctggccaggagcagcagggaccatagaaacttaaggaggagggggaacatagatggcagacagaatctagagccttcaaataatgtggagatgtttccaccttcaggttccactgggctgattcccccctcccactttcaagctcggcccctttcaactctgccaagaatggctcccacctggctctcagacattcccctggtccaacccccaggccatcaagatgtctcagagaggcggctagacacccagagacctcaagtgaccatgtgggaacgggatgtttccagtgacaggcaggagccagggcggagaggcaggtcctgggggctggaggggtcacaggccctgagccagcaggctgaggtgatcgttcggcagctgcaagagctgcggcggctggaggaggaggtccggctcctgcgggagacctcgctgcagcagaagatgaggctagaggcccaggccatggagctagaggctctggcacgggcggagaaggccggccgagctgaggctgagggcctgcgtgctgctttggctggggctgaggttgtccggaagaacttggaagaggggaggcagcgggagctggaagaggttcagaggctgcaccaagagcagctgtcctctttgacacaggctcacgaggaggctctttccagtttgaccagcaaggctgagggcttggagaagtctctgagtagtctggaaaccagaagagcaggggaagccaaggagctggccgaggctcagagggaggccgagctgcttcggaagcagctgagcaagacccaggaagacttggaggctcaggtgaccctggttgagaatctaagaaaatatgttggggaacaagtcccttctgaggtccacagccagacatgggaactggagcgacagaagcttctggacaccatgcagcacttgcaggaggaccgggacagcctgcatgccaccgcggagctgctgcaggtgcgggtgcagagcctcacacacatcctcgccctgcaggaggaggagctgaccaggaaggttcaaccttcagattccctggagcctgagtttaccaggaagtgccagtccctgctgaaccgctggcgggagaaggtgtttgccctcatggtgcagctaaaggcccaggagctggaacacagtgactctgttaagcagctgaagggacaggtggcctcactccaggaaaaagtgacatcccagagccaggagcaggccatcctgcagcgatccctgcaggacaaagccgcagaggtggaggtggagcgtatgggtgccaagggcctgcagttggagctgagccgtgctcaggaggccaggcgtcggtggcagcagcagacagcctcagccgaggagcagctgaggcttgtggtcaatgctgtcagcagctctcagatctggctcgagaccaccatggctaaggtggaaggggctgccgcccagcttcccagcctcaacaaccgactcagctatgctgtccgcaaggtccacaccattcggggcctgattgctcgaaagcttgcccttgctcagctgcgccaggagagctgtcccctaccaccaccggtcacagatgtgagccttgagttgcagcagctgcgggaagaacggaaccgcctggatgcagaactgcagctgagtgcccgcctcatccagcaggaggtgggccgggctcgggagcaaggggaggcagagcggcagcagctgagcaaggtggcccagcagctggagcaggagctgcagcagacccaggagtccctggctagcttggggctgcagctggaggtagcacgccagggccagcaggagagcacagaggaggctgccagtctgcggcaggagctgacccagcagcaggaactctacgggcaagccctgcaagaaaaggtggctgaagtggaaactcggctgcgggagcaactctcagacacagagaggaggctgaacgaggctcggagggagcatgccaaggccgtggtctccttgcgccagattcagcgcagagccgcccaggaaaaggagcggagccaggaactcaggcgtctgcaggaggaggcccggaaggaggaggggcagcgactggcccggcgcttgcaggagctagagagggataagaacctcatgctggccaccttgcagcaggaaggtctcctctcccgttacaagcagcagcgactgttgacagttcttccttccctactggataagaagaaatctgtggtgtccagccccaggcctccagagtgttcagcatctgcacctgtagcagcagcagtgcccaccagggagtccataaaagggtccctctctgtcctgctcgatgacctgcaggacctgagtgaagccatttccaaagaggaagctgtttgtcaaggagacaaccttgacagatgctccagctccaatccccagatgagcagctaagcagctgacagttggagggaaagccagcctgggggctgggaggatcctggagaagtgggtggggacagaccagcccttccccatcctggggttgccctgggggataccagctgagtctgaattctgctctaaataaagacgactacagaagg

SEQ ID NO: 120625 - DNA, 2954 bp, Homo sapiens; identical to SEQ ID NO: 120624
  Payload ID: 3627
  Gene Symbol: CCHCR1
  Gene Name: coiled-coil alpha-helical rod protein 1
  ENST ID: ENST00000622518
  CDS Start-End: 190-2802

SEQ ID NO: 120626 - DNA, 2954 bp, Homo sapiens; identical to SEQ ID NO: 120623
  Payload ID: 3627
  Gene Symbol: CCHCR1
  Gene Name: coiled-coil alpha-helical rod protein 1
  ENST ID: ENST00000613123
  CDS Start-End: 190-2802

SEQ ID NO: 120627 - DNA, 3581 bp, Homo sapiens
  Payload ID: 3628
  Gene Symbol: CC2D1A
  Gene Name: coiled-coil and C2 domain containing 1A
  Uniprot ID: Q6P1N0
  ENST ID: ENST00000318003
  CDS Start-End: 242-3097
gtagtttcggctcggcagacccggcgagcccagtggccgcgctccggtgcggcggcgcccgaggcccgaggcggaagtgggacggccaagcagggaagcgagggctcgggatcgacggccgcggggcgccgacgaggagtgcaggactcaggaagggcgagtgcgcggcgacagagcccggggaaggaggcagggcaaggccgggcttgggggcaggtggtccgggcatccagccttgaagatgcacaagaggaaaggacccccgggacccccgggcagaggcgccgcggccgcccgccagctgggcctgctggttgacctctccccagatggcctgatgatccctgaggacggggctaacgatgaagaactggaggctgagttcttggctttggtcgggggccagcccccagccctggagaagctcaaaggcaaaggtcccttgccgatggaggccattgagaagatggccagcctgtgcatgagagacccggatgaggatgaggaggaggggacggatgaggacgacttggaggctgatgatgacctgctggcggagctaaatgaggtccttggagaggagcagaaggcttcagagaccccacctcctgtggcccagccgaagcctgaggcccctcatccggggctggagaccaccttgcaggagaggctggcgctctatcagacagcaattgaaagcgccagacaagctggagacagcgccaagatgcggcgctacgatcgggggcttaaaacactggaaaacctgctcgcctccatccgtaagggcaatgccattgacgaagcggacatcccgccgccagtggccataggaaaaggcccggcgtccacgcctacctacagccctgcacccacccagccggcccctagaatcgcgtcagccccagagcccagggtcaccctggagggaccttctgccaccgccccagcctcatctccaggcttggctaagccccagatgcccccaggtccctgcagccctggccctctggcccagttgcagagccgccagcgcgactacaagctggctgccctccacgccaagcagcagggagataccactgctgccgctagacacttccgcgtggctaagagctttgatgctgtcttggaggccctgagccggggtgagcccgtggacctctcctgcctgccccctccacccgaccagctgcccccagacccaccgtcaccaccgtcgcagcctccgacccccgctacggcgccctccacaacagaggtgcccccacccccgaggaccctgctggaggcgctggagcagcggatggagcggtaccaggtggccgcagcccaggccaagagcaagggggaccagcggaaagctcgaatgcacgagcgcatcgtcaagcaataccaagatgccatccgagcccacaaggctggccgagccgtggatgtcgctgaattgcccgtgcccccaggcttccccccaatccagggcctggaggccaccaagcccacccagcagagtctggtgggtgtcctggagactgccatgaagctggccaaccaggatgaaggcccagaggatgaagaggatgaggtgcctaagaagcagaacagccctgtggcccccacagcccagcccaaagccccaccctcaagaactccccagtcgggatcagccccaacagccaaagcgccccccaaagccacatccaccagagcccagcagcagctggccttcctagagggccgcaagaagcagctcctgcaggccgcactgcgagccaagcagaaaaacgacgtggagggtgccaagatgcacctgcgccaagccaagggactggagcctatgctggaggcctcgcgcaatgggctgcctgtggacatcaccaaggtgccgcctgcccctgtcaacaaggacgactttgccctggtccagcggcctggcccgggtctgtctcaggaggccgcccggcgctatggtgaactcaccaagctcatacggcagcagcacgagatgtgcctgaaccactcaaaccaattcacccagctgggcaacatcactgaaaccaccaagtttgaaaagttggcggaggactgtaagcggagcatggacattctgaagcaagccttcgtccggggtctccccacgcccaccgcccgctttgagcaaaggaccttcagcgtcatcaagatcttccctgacctcagcagcaacgacatgctcctcttcatcgtgaagggcatcaacttgcccacacccccaggactgtcccctggcgatctggatgtctttgttcggtttgacttcccctatcccaacgtggaagaagctcagaaagacaagaccagtgtgatcaagaacacagactcccctgagttcaaggagcagttcaaactctgcatcaaccgcagccaccgtggcttccgaagggccatccagaccaagggcatcaagttcgaagtggttcacaagggggggctgttcaagactgaccgggtgctggggacagcccagctgaagctggatgcactggagatagcatgtgaggtccgggagatccttgaggtcctggatggtcgccggcccacaggggggcgactggaggtaatggtccggattcgggagccactgacagcccagcagttggagacgacgacagagaggtggctggtcattgaccctgtgccggcagctgtgcccacacaggttgctgggcccaaagggaaggcccctcctgtgcctgcccctgcaagggagtcagggaacagatcagcccggcccctgcatagcctcagtgtgctggcgtttgaccaagagcgtctggagcggaagatcctggccctcaggcaggcgcggcggccggtgcccccagaagtggcccagcagtaccaggacatcatgcaacgcagccagtggcagagggcacagctggagcaggggggtgtgggcatccgacgggaatacgcagcccagctggagcggcagctgcagttctacacggaggctgcccggcgcctgggcaacgatggcagcagggatgctgcaaaggaggcgctctataggcggaatctggtagagagtgagctgcagcggctccgcaggtgaggagcccatggggcgggcagcccccagaaagcgggcagcaggccccgataccgggaagagccgacacagccacgaaccagacaagcagacaatcagcggacaatcggttctggactcacccctcatccgggcccccagccccgccagagcctccgtggctgcgggtgttgggaaccatgcctgccagccagtatgtgcccctcacccaggcctggctgggccctggagagtcctgtttgcacagcccaggggtgtccggcctctggcccgccccggagcagggagggtggctggggccaagccccgagggcccctgcaagcactttacttcctgttcctccccagccttaaccccaaagccctcctgcaccccaaagaagccactgaggctggccgagccacactgtctccccaggggcgtcgacctggcccagctgggtccccagggccagcacatggaataaaatagccagggccacactca

SEQ ID NO: 120628 - DNA, 2743 bp, Homo sapiens
  Payload ID: 3628
  Gene Symbol: CC2D1A
  Gene Name: coiled-coil and C2 domain containing 1A
  ENST ID: ENST00000586955
  CDS Start-End: 1-1136
gacaagctggagacagcgccaagatgcggcgctacgatcgggggcttaaaacactggaaaacctgctcgcctccatccgtaagggcaatgccattgacgaagcggacatcccgccgccagtggccataggaaaaggcccggcgtccacgcctacctacagccctgcacccacccagccggcccctagaatcgcgtcagccccagagcccagggtcaccctggagggaccttctgccaccgccccagcctcatctccaggcttggctaagccccagatgcccccaggtccctgcagccctggccctctggcccagttgcagagccgccagcgcgactacaagctggctgccctccacgccaagcagcagggagataccactgctgccgctagacacttccgcgtggctaagagctttgatgctgtcttggaggccctgagccggggtgagcccgtggacctctcctgcctgccccctccacccgaccagctgcccccagacccaccgtcaccaccgtcgcagcctccgacccccgctacggcgccctccacaacagaggtgcccccacccccgaggaccctgctggaggcgctggagcagcggatggagcggtaccaggtggccgcagcccaggccaagagcaagggggaccagcggaaagctcgaatgcacgagcgcatcgtcaagcaataccaagatgccatccgagcccacaaggctggccgagccgtggatgtcgctgaattgcccgtgcccccagcagaacagccctgtggcccccacagcccagcccaaagccccaccctcaagaactccccagtcgggatcagccccaacagccaaagcgccccccaaagccacatccaccagagcccagcagcagctggccttcctagagggccgcaagaagcagctcctgcaggccgcactgcgagccaagcagaaaaacgacgtggagggtgccaagatgcacctgcgccaagccaagggactggagcctatgctggaggcctcgcgcaatgggctgcctgtggacatcaccaaggtgccgcctgcccctgtcaacaaggacgactttgccctggtccagcggcctggcccgggtctgtctcaggaggccgcccggcgctatggtgaactcaccaagctcatacggcagcagcacgagatgtgcctgaaccactcaaaccaattcacccagctgggcaacatcactgaaaccaccaagtttgaaaagttggcggaggactgtaagcggagcatggacattctgaagcaagccttcgtccggggtctccccacgcccaccgcccgctttgagcaaaggaccttcagcgtcatcaagatcttccctgacctcagcagcaacgacatgctcctcttcatcgtgaagggcatcaacttgcccacacccccaggactgtcccctggcgatctggatgtctttgttcggtttgacttcccctatcccaacgtggaagaagctcagaaagacaagaccagtgtgatcaagaacacagactcccctgagttcaaggagcagttcaaactctgcatcaaccgcagccaccgtggcttccgaagggccatccagaccaagggcatcaagttcgaagtggttcacaagggggggctgttcaagactgaccgggtgctggggacagcccagctgaagctggatgcactggagatagcatgtgaggtccgggagatccttgaggtcctggatggtcgccggcccacaggggggcgactggaggtaatggtccggattcgggagccactgacagcccagcagttggagacgacgacagagaggtggctggtcattgaccctgtgccggcagctgtgcccacacaggttgctgggcccaaagggaaggcccctcctgtgcctgcccctgcaagggagtcagggaacagatcagcccggcccctgcatagcctcagtgtgctggcgtttgaccaagagcgtctggagcggaagatcctggccctcaggcaggcgcggcggccggtgcccccagaagtggcccagcagtaccaggacatcatgcaacgcagccagtggcagagggcacagctggagcaggggggtgtgggcatccgacgggaatacgcagcccagctggagcggcagctgcagttctacacggaggctgcccggcgcctgggcaacgatggcagcagggatgctgcaaaggaggcgctctataggcggaatctggtagagagtgagctgcagcggctccgcaggtgaggagcccatggggcgggcagcccccagaaagcgggcagcaggccccgataccgggaagagccgacacagccacgaaccagacaagcagacaatcagcggacaatcggttctggactcacccctcatccgggcccccagccccgccagagcctccgtggctgcgggtgttgggaaccatgcctgccagccagtatgtgcccctcacccaggcctggctgggccctggagagtcctgtttgcacagcccaggggtgtccggcctctggcccgccccggagcagggagggtggctggggccaagccccgagggcccctgcaagcactttacttcctgttcctccccagccttaaccccaaagccctcctgcaccccaaagaagccactgaggctggccgagccacactgtctccccaggggcgtcgacctggcccagctgggtccccagggccagcacatggaataaaatagccagggccacactca

SEQ ID NO: 120629 - DNA, 1667 bp, Homo sapiens
  Payload ID: 3628
  Gene Symbol: CC2D1A
  Gene Name: coiled-coil and C2 domain containing 1A
  ENST ID: ENST00000587508
  CDS Start-End: 1-1217
cccaggtgccgcctgcccctgtcaacaaggacgactttgccctggtccagcggcctggcccgggtctgtctcaggaggccgcccggcgctatggtgaactcaccaagctcatacggcagcagcacgagatgtgcctgaaccactcaaaccaattcacccagctgggcaacatcactgaaaccaccaagtttgaaaagttggcggaggactgtaagcggagcatggacattctgaagcaagccttcgtccggggtctccccacgcccaccgcccgctttgagcaaaggaccttcagcgtcatcaagatcttccctgacctcagcagcaacgacatgctcctcttcatcgtgaagggcatcaacttgcccacacccccaggactgtcccctggcgatctggatgtctttgttcggtttgacttcccctatcccaacgtggaagaagctcagaaagacaagaccagtgtgatcaagaacacagactcccctgagttcaaggagcagttcaaactctgcatcaaccgcagccaccgtggcttccgaagggccatccagaccaagggcatcaagttcgaagtggttcacaagggggggctgttcaagactgaccgggtgctggggacagcccagctgaagctggatgcactggagatagcatgtgaggtccgggagatccttgaggtcctggatggtcgccggcccacaggggggcgactggaggtaatggtccggattcgggagccactgacagcccagcagttggagacgacgacagagaggtggctggtcattgaccctgtgccggcagctgtgcccacagttgctgggcccaaagggaaggcccctcctgtgcctgcccctgcaagggagtcagggaacagatcagcccggcccctgcatagcctcagtgtgctggcgtttgaccaagagcgtctggagcggaagatcctggccctcaggcaggcgcggcggccggtgcccccagaagtggcccagcagtaccaggacatcatgcaacgcagccagtggcagagggcacagctggagcaggggggtgtgggcatccgacgggaatacgcagcccagctggagcggcagctgcagttctacacggaggctgcccggcgcctgggcaacgatggcagcagggatgctgcaaaggaggcgctctataggcggaatctggtagagagtgagctgcagcggctccgcaggtgaggagcccatggggcgggcagcccccagaaagcgggcagcaggccccgataccgggaagagccgacacagccacgaaccagacaagcagacaatcagcggacaatcggttctggactcacccctcatccgggcccccagccccgccagagcctccgtggctgcgggtgttgggaaccatgcctgccagccagtatgtgcccctcacccaggcctggctgggccctggagagtcctgtttgcacagcccaggggtgtccggcctctggcccgccccggagcagggagggtggctggggccaagccccgagggcccctgcaagcactttacttcctgttcctccccagccttaaccccaaagccctcctgcaccccaaagaagccactgaggctggccgagccacactgtctccccaggggcgtcgacctggcccagctgggtccccagggcc

SEQ ID NO: 120630 - DNA, 3117 bp, Homo sapiens
  Payload ID: 3628
  Gene Symbol: CC2D1A
  Gene Name: coiled-coil and C2 domain containing 1A
  Uniprot ID: Q6P1N0
  ENST ID: ENST00000589606
  CDS Start-End: 1-2853
atgcacaagaggaaaggacccccgggacccccgggcagaggcgccgcggccgcccgccagctgggcctgctggttgacctctccccagatggcctgatgatccctgaggacggggctaacgatgaagaactggaggctgagttcttggctttggtcgggggccagcccccagccctggagaagctcaaaggcaaaggtcccttgccgatggaggccattgagaagatggccagcctgtgcatgagagacccggatgaggatgaggaggaggggacggatgaggacgacttggaggctgatgatgacctgctggcggagctaaatgaggtccttggagaggagcagaaggcttcagagaccccacctcctgtggcccagccgaagcctgaggcccctcatccggggctggagaccaccttgcaggagaggctggcgctctatcagacagcaattgaaagcgccagacaagctggagacagcgccaagatgcggcgctacgatcgggggcttaaaacactggaaaacctgctcgcctccatccgtaagggcaatgccattgacgaagcggacatcccgccgccagtggccataggaaaaggcccggcgtccacgcctacctacagccctgcacccacccagccggcccctagaatcgcgtcagccccagagcccagggtcaccctggagggaccttctgccaccgccccagcctcatctccaggcttggctaagccccagatgcccccaggtccctgcagccctggccctctggcccagttgcagagccgccagcgcgactacaagctggctgccctccacgccaagcagcagggagataccactgctgccgctagacacttccgcgtggctaagagctttgatgctgtcttggaggccctgagccggggtgagcccgtggacctctcctgcctgccccctccacccgaccagctgcccccagacccaccgtcaccaccgtcgcagcctccgacccccgctacggcgccctccacaacagaggtgcccccacccccgaggaccctgctggaggcgctggagcagcggatggagcggtaccaggtggccgcagcccaggccaagagcaagggggaccagcggaaagctcgaatgcacgagcgcatcgtcaagcaataccaagatgccatccgagcccacaaggctggccgagccgtggatgtcgctgaattgcccgtgcccccaggcttccccccaatccagggcctggaggccaccaagcccacccagcagagtctggtgggtgtcctggagactgccatgaagctggccaaccaggatgaaggcccagaggatgaagaggatgaggtgcctaagaagcagaacagccctgtggcccccacagcccagcccaaagccccaccctcaagaactccccagtcgggatcagccccaacagccaaagcgccccccaaagccacatccaccagagcccagcagcagctggccttcctagagggccgcaagaagcagctcctgcaggccgcactgcgagccaagcagaaaaacgacgtggagggtgccaagatgcacctgcgccaagccaagggactggagcctatgctggaggcctcgcgcaatgggctgcctgtggacatcaccaaggtgccgcctgcccctgtcaacaaggacgactttgccctggtccagcggcctggcccgggtctgtctcaggaggccgcccggcgctatggtgaactcaccaagctcatacggcagcagcacgagatgtgcctgaaccactcaaaccaattcacccagctgggcaacatcactgaaaccaccaagtttgaaaagttggcggaggactgtaagcggagcatggacattctgaagcaagccttcgtccggggtctccccacgcccaccgcccgctttgagcaaaggaccttcagcgtcatcaagatcttccctgacctcagcagcaacgacatgctcctcttcatcgtgaagggcatcaacttgcccacacccccaggactgtcccctggcgatctggatgtctttgttcggtttgacttcccctatcccaacgtggaagaagctcagaaagacaagaccagtgtgatcaagaacacagactcccctgagttcaaggagcagttcaaactctgcatcaaccgcagccaccgtggcttccgaagggccatccagaccaagggcatcaagttcgaagtggttcacaagggggggctgttcaagactgaccgggtgctggggacagcccagctgaagctggatgcactggagatagcatgtgaggtccgggagatccttgaggtcctggatggtcgccggcccacaggggggcgactggaggtaatggtccggattcgggagccactgacagcccagcagttggagacgacgacagagaggtggctggtcattgaccctgtgccggcagctgtgcccacagttgctgggcccaaagggaaggcccctcctgtgcctgcccctgcaagggagtcagggaacagatcagcccggcccctgcatagcctcagtgtgctggcgtttgaccaagagcgtctggagcggaagatcctggccctcaggcaggcgcggcggccggtgcccccagaagtggcccagcagtaccaggacatcatgcaacgcagccagtggcagagggcacagctggagcaggggggtgtgggcatccgacgggaatacgcagcccagctggagcggcagctgcagttctacacggaggctgcccggcgcctgggcaacgatggcagcagggatgctgcaaaggaggcgctctataggcggaatctggtagagagtgagctgcagcggctccgcaggtgaggagcccatggggcgggcagcccccagaaagcgggcagcaggccccgataccgggaagagccgacacagccacgaaccagacaagcagacaatcagcggacaatcggttctggactcacccctcatccgggcccccagccccgccagagcctccgtggctgcgggtgttgggaaccatgcctgccagccagtatgtgcccctcacccaggcctggctgggccctggagagtcctgtttgcacagcccaggggtgtccggcctct

SEQ ID NO: 120631 - DNA, 3377 bp, Homo sapiens
  Payload ID: 3629
  Gene Symbol: CC2D1B
  Gene Name: coiled-coil and C2 domain containing 1B
  Uniprot ID: Q5T0F9
  ENST ID: ENST00000284376
  CDS Start-End: 126-2684
cacctcccctgctggcgcttcctgtcgctaccgctgcggcccagggcccgcgggagcccagggcggtgccgggtgagacaaggccggggtttggctcggattcaccgcgaggtatctaggctgccatgatgccagggccaagacctcggaagggccctcaggccagaggccaaggggtggccgctgccaagcagatggggctctttatggagtttggccctgaggacatgctgctgggcatggatgaggctgaagatgatgaggacctggaggctgagctgctggctctcacaggggaagcacaaaccacaggcaagaagccagcacccaaggggcaggcccccctgcccatggcccacatcgagaagttggcggcagactgtatgcgggatgtggaggaggaggaggaggaggaagggctggaggaagatgcagagctgctgacggagctgcaggaggtcttaggtgtggacgaggagactgagcccctggatggtgatgaggtagctgacccaggcggctctgaggaggagaacggcctagaagacactgaacctccagtgcagacagccgtcctgacagcttcagccccagcagctcaggccggagcatctcaggggctacacgctttgctggaggaacggattcacaactaccgagaggctgcggccagtgccaaggaggcaggcgaagcagccaaagccaggcgctgcgagcgcggcctgaagaccttggagtcgcagctagcctctgtgaggagaggcagaaagatcaatgaggatgagatcccacctccagtggccttaggaaagcggcccctggccccccaggaaccagccaacaggagccctgagacagaccctccagctccccctgccttggagtcagacaacccctcccaacctgagaccagcctccctggcatttctgcccagcccgtttcagacttagacccagacccgcgggccctgctgtcatcccgacagagagagtacaaagtggctgccctcagtgccaagcgggctggagagctagaccgtgcccgagagctcatgaggattgggaagagattcggtgctgtcctggaggccctggagaaggggcagcccgtggatctgagtgccatgcccccggcacctgaggatctgaagccccagcaggcttctcaggctcccacagcaccctcagtcattcccccagccgtggagcgagtgcagccagtgatggcccctgacgtcccagcaaccccagtggcccctacagagtcacagacagtgctggatgccctgcagcagaggctgaacaagtaccgcgaggcgggcatccaggcccggagtggtggggacgagcgcaaggctcggatgcatgagcgcattgccaagcaatatcaagatgctattcgagcacaccgagcaggacggaaagtcaactttgctgaattgcctgttcctccaggatttccccccatccctggcctggagtccactatgggtgttgaggaggacgcagtggcagcgacattggcagctgcagagaaactggcctctgcagaggattcagccccggctgataaagacgaggacgagggtgagcccccagcacaggccccagtggccaagaaacctgcacggcccacagtcccttcatcccagcgcctgcctgagcccagggcctcaagttctaaggagtcaccgagtccatctgtgcgggagcagctggcactgctggaggcacggaaactgcagtatcagcgggcagccctgcaggccaagcgcagccaggacctggagcaggccaaagcctatctgcgggtagccaaatggcttgaggctcagatcatccaggcccgatctggcagacctgttgatctgtccaaggtgccttcgcccttgacggatgaggagggtgacttcatcctcatccaccatgaggacctgcgactctcccagaaggcggaggaggtgtatgcccagctgcaaaaaatgcttctggagcaacaagagaagtgcctgctgttctccaagcagttcatgcaccagggcaacgtggctgagaccacccgatttgagaagcttgctcaggaccgcaagaaacagctggagatcctgcagctggcccaggctcagggcctcgaccctcccacccaccactttgagttgaagacattccagactgtgaggatcttctcagaactcaacagcacagaaatgcatctgatcattgtccggggaatgaacctcccagcccctccaggggtgactcccgatgacctggatgcttttgtgcggtttgagtttcactaccctaactcggaccaggctcaaaaaagcaaaacagctgtggtgaagaacacaaactctccagaatttgatcaactcttcaaactaaacatcaaccgaaaccaccggggcttcaagagggtgatccagagcaaaggcatcaagtttgagatcttccacaaagggtccttcttcagaagcgacaagctggttggcacagcacacctgaaactggagcggctggagaatgagtgtgagatcagagaaattgtggaggtcctggatggaaggaagcccaccggggggaagctggaggtgaaggtgaggctgcgggagcctctgagtggccaggatgtgcagatggtcactgagaactggctggttctggagcccaggggcttgtgagccgatggccagcaccaggagaggagtcaggccgcgactgtgcaggagatgactttcccagctttgctggcttcagaagcctttgtacataagagatgctgctacccaagcaccaaagacctgttaagcatgtgcactactgaccacgactctggtctttcctgttgttggcccctctggggctctacagaaacaggctgggttccaggagcccatctccccgctgtctccccctgccccgagtctggaagagggcaaggacacttccattcctctgtaccatggagtcctgcagccccttaacccctgcgtggcaactgtgtacagcttacccctgcctccagttgcaccacttctagatgtgcctttaaaagatctaactatgggatgggagaacttgagggtgatcgggaacctcccctgctgagggtggtgtcagggttccgtgactccagtgggccagtggtagcctgtcccagacaactccgtcaccccagctctgcctgtgcctttatccctgacagctgctgcactagccttcctgcttccctaaggacttagtggagggggaaagttgtttttggtactacttggtgggaagtaaggggaaggttggatcttgggtttggtctacccacccaagagaaaagactgttaactggaagaaaaaatatatatataaaattttatgta

SEQ ID NO: 120632 - DNA, 5642 bp, Homo sapiens
  Payload ID: 3629
  Gene Symbol: CC2D1B
  Gene Name: coiled-coil and C2 domain containing 1B
  Uniprot ID: Q5T0F9
  ENST ID: ENST00000371586
  CDS Start-End: 140-2716
tgttgcgcgcgagccacctcccctgctggcgcttcctgtcgctaccgctgcggcccagggcccgcgggagcccagggcggtgccgggtgagacaaggccggggtttggctcggattcaccgcgaggtatctaggctgccatgatgccagggccaagacctcggaagggccctcaggccagaggccaaggggtggccgctgccaagcagatggggctctttatggagtttggccctgaggacatgctgctgggcatggatgaggctgaagatgatgaggacctggaggctgagctgctggctctcacaggggaagcacaaaccacaggcaagaagccagcacccaaggggcaggcccccctgcccatggcccacatcgagaagttggcggcagactgtatgcgggatgtggaggaggaggaggaggaggaagggctggaggaagatgcagagctgctgacggagctgcaggaggtcttaggtgtggacgaggagactgagcccctggatggtgatgaggtagctgacccaggcggctctgaggaggagaacggcctagaagacactgaacctccagtgcagacagccgtcctgacagcttcagccccagcagctcaggccggagcatctcaggggctacacgctttgctggaggaacggattcacaactaccgagaggctgcggccagtgccaaggaggcaggcgaagcagccaaagccaggcgctgcgagcgcggcctgaagaccttggagtcgcagctagcctctgtgaggagaggcagaaagatcaatgaggatgagatcccacctccagtggccttaggaaagcggcccctggccccccaggaaccagccaacaggagccctgagacagaccctccagctccccctgccttggagtcagacaacccctcccaacctgagaccagcctccctggcatttctgcccagcccgtttcagacttagacccagacccgcgggccctgctgtcatcccgacagagagagtacaaagtggctgccctcagtgccaagcgggctggagagctagaccgtgcccgagagctcatgaggattgggaagagattcggtgctgtcctggaggccctggagaaggggcagcccgtggatctgagtgccatgcccccggcacctgaggatctgaagccccagcaggcttctcaggctcccacagcaccctcagtcattcccccagccgtggagcgagtgcagccagtgatggcccctgacgtcccagcaaccccagtggcccctacagagtcacagacagtgctggatgccctgcagcagaggctgaacaagtaccgcgaggcgggcatccaggcccggagtggtggggacgagcgcaaggctcggatgcatgagcgcattgccaagcaatatcaagatgctattcgagcacaccgagcaggacggaaagtcaactttgctgaattgcctgttcctccaggatttccccccatccctggcctggagtccactatgggtgttgaggaggacgcagtggcagcgacattggcagctgcagagaaactggcctctgcagaggattcagccccggctgataaagacgaggacgagcctcctgggcacctgcagggtgagcccccagcacaggccccagtggccaagaaacctgcacggcccacagtcccttcatcccagcgcctgcctgagcccagggcctcaagttctaaggagtcaccgagtccatctgtgcgggagcagctggcactgctggaggcacggaaactgcagtatcagcgggcagccctgcaggccaagcgcagccaggacctggagcaggccaaagcctatctgcgggtagccaaatggcttgaggctcagatcatccaggcccgatctggcagacctgttgatctgtccaaggtgccttcgcccttgacggatgaggagggtgacttcatcctcatccaccatgaggacctgcgactctcccagaaggcggaggaggtgtatgcccagctgcaaaaaatgcttctggagcaacaagagaagtgcctgctgttctccaagcagttcatgcaccagggcaacgtggctgagaccacccgatttgagaagcttgctcaggaccgcaagaaacagctggagatcctgcagctggcccaggctcagggcctcgaccctcccacccaccactttgagttgaagacattccagactgtgaggatcttctcagaactcaacagcacagaaatgcatctgatcattgtccggggaatgaacctcccagcccctccaggggtgactcccgatgacctggatgcttttgtgcggtttgagtttcactaccctaactcggaccaggctcaaaaaagcaaaacagctgtggtgaagaacacaaactctccagaatttgatcaactcttcaaactaaacatcaaccgaaaccaccggggcttcaagagggtgatccagagcaaaggcatcaagtttgagatcttccacaaagggtccttcttcagaagcgacaagctggttggcacagcacacctgaaactggagcggctggagaatgagtgtgagatcagagaaattgtggaggtcctggatggaaggaagcccaccggggggaagctggaggtgaaggtgaggctgcgggagcctctgagtggccaggatgtgcagatggtcactgagaactggctggttctggagcccaggggcttgtgaggtgggcagctctctgggccttcagaacctttgccccctccttttactcaactaactactcaactcatatctggagagaaaacctaggagtttctcatctatgagaaagacctaccatgctgggtagggcttatgggctgagtttctgatgttcctcagtagaactgggaagagaaggtaaccttccaaggtttaactatctatctatctatctatcttcaggaaaccctttctaaaatctttgtgttttcactgcagtttagactgacttcttgtgctttgcacccctgtgtagccgatggccagcaccaggagaggagtcaggccgcgactgtgcaggagatgactttcccagctttgctggcttcagaagcctttgtacataagagatgctgctacccaagcaccaaagacctgttaagcatgtgcactactgaccacgactctggtctttcctgttgttggcccctctggggctctacagaaacaggctgggttccaggagcccatctccccgctgtctccccctgccccgagtctggaagagggcaaggacacttccattcctctgtaccatggagtcctgcagccccttaacccctgcgtggcaactgtgtacagcttacccctgcctccagttgcaccacttctagatgtgcctttaaaagatctaactatgggatgggagaacttgagggtgatcgggaacctcccctgctgagggtggtgtcagggttccgtgactccagtgggccagtggtagcctgtcccagacaactccgtcaccccagctctgcctgtgcctttatccctgacagctgctgcactagccttcctgcttccctaaggacttagtggagggggaaagttgtttttggtactacttggtgggaagtaaggggaaggttggatcttgggtttggtctacccacccaagagaaaagactgttaactggaagaaaaaatatatatataaaattttatgtagacacgtttatttatctaggaaactaagtctaactcattgtagggattttatactcaactatacagagtatccaccaaagtcctaatctaaagtcctgctccctgtcactttttaaaagccagggtagcagtaacatgacaaacggctgctgtggcttcctcttgagagaggacagggaaagcctttcctcttcggctggttatgtggggaacttccttagtttttttccacaagaaattctcctttggctttgtttttctgaatggatggagactatgaaggggtttgtagttgtaagagatttaatattcaaaactgaaatattctgcatttcttagaaataccccatcttcccccaccccctttttgaattattaattcaagatcaacaaagcattcctcaagatcacttttaaaaaaggttagaagtgaagcaaatacattcagcttactgatcactatagtattgcataagcacagctcaagaactgagctttgtatgtgtccttttgggggataacagggctggaccatgcttccctgcccttaaacgcagagcttttagtgggtcacagagcgggaactacacacaagtgacttttttccccatgagccctctggccgattttttttttttttttttttttgagacagagtagctctctgccagccaggctggagtgcagtggcatgatctcagctcgctgcaacccccacctcccaggttcaagcgattctcctgtgtcagtctcctgagtagctgggattacaggcacccaccactatgcccagctaatttttttatttttagtagagacggtgtttcaccatgttggtcaggctggtctcgaactcctgacctcatgatccacccacctcagcctcccaaagtgctgggattacaggtgtgagccaccgcacccggctggccaatcttatcagaagtgagctaccaaaacttccacagatgtgagatttaacacttaattgcagtcacgtgtatgcaacacagcaataatctagaatgaaaaggagggtgattagccttcataagatgacctatagagcaaagaaaggtgactggaagggttcctaacccaacctactccccttagggtgtgtatccaacccagtgcttcctaagagggttacggaccactgtggttatcctctaaagttccagccagctctaggagtttctaaattcaggcctctgttggaaatggcctatttcgatagatagaaagttttctatagctctaaaggtttctcctttgcaacccattcaatttcagtctgctgctttgctctttcaaaacagaacctccaggctgacgaggcaagacaaagcctcccaccagacttggagattgaagttcttaaaaggcctttgttgtagccaaaggcatgcatgcgtcactggtagtaggaggagcctgtcccagcttcatcttgtcctgagatttatccacatacaggaaacaggcgggacacagtggctcacgcctgtaatcccaccactttggaaagctgaggcaggtggatcacctgaggtcaggaattcaagaccagcctggccaacatggtgaaaccccgtctccactaaaaacaaaaacaattagctgggcatggtggccggcgcctgtaatcccagctactagggaggctgagacacacgaatcccttgagcccaggaagcagaggttgcagtgagcctcgattgtaccactgcactccagcctgggcgacagagcaagactctgtctcaaaacaaacacaaatacagtatccaaacattggagattagtgactcacctgcagttgggagccagctacaacccaaatcattttaaaattttcaattctttgatctcatgcaatgcacactttcttctgaattagcaaactgaataaactacagaaattttttagaatcaa

SEQ ID NO: 120633 - DNA, 2521 bp, Homo sapiens
  Payload ID: 3629
  Gene Symbol: CC2D1B
  Gene Name: coiled-coil and C2 domain containing 1B
  ENST ID: ENST00000438021
  CDS Start-End: 1-1886
gaaagatcaatgaggatgagatcccacctccagtggccttaggaaagcggcccctggccccccaggaaccagccaacaggagccctgagacagaccctccagctccccctgccttggagtcagacaacccctcccaacctgagaccagcctccctggcatttctgcccagcccgtttcagacttagacccagacccgcgggccctgctgtcatcccgacagagagagtacaaagtggctgccctcagtgccaagcgggctggagagctagaccgtgcccgagagctcatgaggattgggaagagattcggtgctgtcctggaggccctggagaaggggcagcccgtggatctgagtgccatgcccccggcacctgaggatctgaagccccagcaggcttctcaggctcccacagcaccctcagtcattcccccagccgtggagcgagtgcagccagtgatggcccctgacgtcccagcaaccccagtggcccctacagagtcacagacagtgctggatgccctgcagcagaggctgaacaagtaccgcgaggcgggcatccaggcccggagtggtggggacgagcgcaaggctcggatgcatgagcgcattgccaagcaatatcaagatgctattcgagcacaccgagcaggacggaaagtcaactttgctgaattgcctgttcctccaggatttccccccatccctggcctggagtccactatgggtgttgaggaggacgcagtggcagcgacattggcagctgcagagaaactggcctctgcagaggattcagccccggctgataaagacgaggacgagggtgagcccccagcacaggccccagtggccaagaaacctgcacggcccacagtcccttcatcccagcgcctgcctgagcccagggcctcaagttctaaggagtcaccgagtccatctgtgcgggagcagctggcactgctggaggcacggaaactgcagtatcagcgggcagccctgcaggccaagcgcagccaggacctggagcaggccaaagcctatctgcgggtagccaaatggcttgaggctcagatcatccaggcccgatctggcagacctgttgatctgtccaaggtgccttcgcccttgacggatgaggagggtgacttcatcctcatccaccatgaggacctgcgactctcccagaaggcggaggaggtgtatgcccagctgcaaaaaatgcttctggagcaacaagagaagtgcctgctgttctccaagcagttcatgcaccagggcaacgtggctgagaccacccgatttgagaagcttgctcaggaccgcaagaaacagctggagatcctgcagctggcccaggctcagggcctcgaccctcccacccaccactttgagttgaagacattccagactgtgaggatcttctcagaactcaacagcacagaaatgcatctgatcattgtccggggaatgaacctcccagcccctccaggggtgactcccgatgacctggatgcttttgtgcggtttgagtttcactaccctaactcggaccaggctcaaaaaagcaaaacagctgtggtgaagaacacaaactctccagaatttgatcaactcttcaaactaaacatcaaccgaaaccaccggggcttcaagagggtgatccagagcaaaggcatcaagtttgagatcttccacaaagggtccttcttcagaagcgacaagctggttggcacagcacacctgaaactggagcggctggagaatgagtgtgagatcagagaaattgtggaggtcctggatggaaggaagcccaccggggggaagctggaggtgaagccgatggccagcaccaggagaggagtcaggccgcgactgtgcaggagatgactttcccagctttgctggcttcagaagcctttgtacataagagatgctgctacccaagcaccaaagacctgttaagcatgtgcactactgaccacgactctggtctttcctgttgttggcccctctggggctctacagaaacaggctgggttccaggagcccatctccccgctgtctccccctgccccgagtctggaagagggcaaggacacttccattcctctgtaccatggagtcctgcagccccttaacccctgcgtggcaactgtgtacagcttacccctgcctccagttgcaccacttctagatgtgcctttaaaagatctaactatgggatgggagaacttgagggtgatcgggaacctcccctgctgagggtggtgtcagggttccgtgactccagtgggccagtggtagcctgtcccagacaactccgtcaccccagctctgcctgtgcctttatccctgacagctgctgcactagccttcctgcttccctaaggacttagtggagggggaaagttgtttttggtactacttggtgggaagtaaggggaaggttggatcttgggtttggtctacccacccaagagaaaagactgttaactggaagaaaaaatatatatataaaattt

SEQ ID NO: 120634 - DNA, 2018 bp, Homo sapiens
  Payload ID: 3629
  Gene Symbol: CC2D1B
  Gene Name: coiled-coil and C2 domain containing 1B
  ENST ID: ENST00000450942
  CDS Start-End: 1-2018
ccggagcatctcaggggctacacgctttgctggaggaacggattcacaactaccgagaggctgcggccagtgccaaggaggcaggcgaagcagccaaagccaggcgctgcgagcgcggcctgaagaccttggagtcgcagctagcctctgtgaggagaggcagaaagatcaatgaggatgagatcccacctccagtggccttaggaaagcggcccctggccccccaggaaccagccaacaggagccctgagacagaccctccagctccccctgccttggagtcagacccagacccgcgggccctgctgtcatcccgacagagagagtacaaagtggctgccctcagtgccaagcgggctggagagctagaccgtgcccgagagctcatgaggattgggaagagattcggtgctgtcctggaggccctggagaaggggcagcccgtggatctgagtgccatgcccccggcacctgaggatctgaagccccagcaggcttctcaggctcccacagcaccctcagtcattcccccagccgtggagcgagtgcagccagtgatggcccctgacgtcccagcaaccccagtggcccctacagagtcacagacagtgctggatgccctgcagcagaggctgaacaagtaccgcgaggcgggcatccaggcccggagtggtggggacgagcgcaaggctcggatgcatgagcgcattgccaagcaatatcaagatgctattcgagcacaccgagcaggacggaaagtcaactttgctgaattgcctgttcctccaggatttccccccatccctggcctggagtccactatgggtgttgaggaggacgcagtggcagcgacattggcagctgcagagaaactggcctctgcagaggattcagccccggctgataaagacgaggacgagggtgagcccccagcacaggccccagtggccaagaaacctgcacggcccacagtcccttcatcccagcgcctgcctgagcccagggcctcaagttctaaggagtcaccgagtccatctgtgcgggagcagctggcactgctggaggcacggaaactgcagtatcagcgggcagccctgcaggccaagcgcagccaggacctggagcaggccaaagcctatctgcgggtagccaaatggcttgaggctcagatcatccaggcccgatctggcagacctgttgatctgtccaaggtgccttcgcccttgacggatgaggagggtgacttcatcctcatccaccatgaggacctgcgactctcccagaaggcggaggaggtgtatgcccagctgcaaaaaatgcttctggagcaacaagagaagtgcctgctgttctccaagcagttcatgcaccagggcaacgtggctgagaccacccgatttgagaagcttgctcaggaccgcaagaaacagctggagatcctgcagctggcccaggctcagggcctcgaccctcccacccaccactttgagttgaagacattccagactgtgaggatcttctcagaactcaacagcacagaaatgcatctgatcattgtccggggaatgaacctcccagcccctccaggggtgactcccgatgacctggatgcttttgtgcggtttgagtttcactaccctaactcggaccaggctcaaaaaagcaaaacagctgtggtgaagaacacaaactctccagaatttgatcaactcttcaaactaaacatcaaccgaaaccaccggggcttcaagagggtgatccagagcaaaggcatcaagtttgagatcttccacaaagggtccttcttcagaagcgacaagctggttggcacagcacacctgaaactggagcggctggagaatgagtgtgagatcagagaaattgtggaggtcctggatggaaggaagcccaccggggggaagctggaggtgaaggtgaggctgcgggagcctctgagtggccaggatgtgcagatggtcactgagaactggctggttctggagcccaggggcttgtga

SEQ ID NO: 120635 - DNA, 4488 bp, Homo sapiens
  Payload ID: 3630
  Gene Symbol: CC2D2A
  Gene Name: coiled-coil and C2 domain containing 2A
  ENST ID: ENST00000389652
  CDS Start-End: 1-4361
aggttccacctggcttcccttctgcagaagaggcctataacttctttactttcaactttgatcccgaaccagaaggatcagaggaaaaaccaaaagcaagacatagagcgggaactaatcaagaggaggaggaaggggaagaagaagaaccacctgcacaaggaggaggaaaggaaatggatgaggaagaactgcttaatggtgatgatgccgaggacttcctattgggcttagatcacgtggctgacgattttgtagcagtcagacctgcagattatgaaagcatccatgatcggctgcagatggaaagagaaatgctcttcatacccagtaggcagacagtccctacatataaaaagcttcctgagaatgtacagcccaggttcctggaagatgaaggcctttacaccggggtaagaccagaggtggcacgcaccaatcagaacatcatggagaacagattgctgatgcaggaccccgaaagaagatggtttggagatgacggcaggatcctagctctgccaaaccccatcaagccatttccttcaaggccgccagtactaacacaggagcagagcattaaggcagagcttgaaacactgtataaaaaggctgtaaaatacgttcacagtagtcagcatgtgatcagatctggagaccctcctggaaatttccaactggacattgatatttcagggttaatcttcactcatcatccctgttttagccgagagcatgttttggcagccaagctggcccagttatatgaccagtaccttgcaagacaccagagaaacaaggcgaaatttcttactgataagctccaagctttaagaaatgctgttcagactggccttgatccagaaaaacctcatcagtctctcgataccatccaaaaaaccatcaatgagtataaatctgaaattcgacaaacaagaaaattccgtgatgctgaacaagaaaaagatagaacattgcttaagactatcataaaagtttggaaagagatgaaatcccttcgagagttccagagatttacaaatactcccttgaaacttgttttgagaaaggaaaaagctgaccagaaagcagatgaagaagcatatgaagcagaaattcaagctgaaataagtgaactgttagaagagcacacggaggagtacgcacagaagatggaagaatacagaacgtcgttacaacagtggaaggcctggaggaaagtgcaaagggccaagaagaagaaaaggaaacaagcagcagaagaacatcccggtgatgagattgcagagccgtatcccgaggaggaccttgtgaagcccagccctccagagcccactgatcgggcagtgatagagcaggaggtgagggagagagcagcccagagcaggaggaggccttgggagcccacgctggtcccggagctaagcctggcaggaagcgtaacacccaatgaccagtgccccagagcggaggtctcgagaagggaggatgtaaagaagcgctcagtgtacttaaaagtgctgttcaacaacaaggaggtgtccaggacagtcagtcggccactaggagcagacttccgagttcactttgggcagattttcaatttgcaaatagtcaactggccggagagtttaacacttcaggtctatgaaactgtcggacacagtagtcccaccttgctagcagaagtgtttctgcctattcctgagactactgttgtcactggaagggctcctactgaagaagtggagtttagcagtaatcagcatgtgacactggaccacgagggagttggaagtggagtgcccttctcatttgaagctgatggcagtaaccagctgactctgatgacctcagggaaagtgtctcatagtgtggcatgggccattggagaaaacgggatacctttaattcctccattgtcacagcagaacatcggatttcggagtgctttgaagaaagcagatgccatctcatctattggcacatcaggactgacagacatgaaaaaattggccaagtgggcagcagagtccaagctcgacccaaatgaccccaacaatgcccctttgatgcagcttatctcggttgctaccagtggtgaatcctatgtccctgatttctttagactggagcagctgcaacaggagtttaactttgtttcagatcaagaattaaatagatccaaacgatttaggcttcttcatcttagaagccaagaggtgccagaattccgaaattataagcaagttccagtctatgaccgagaaattatggaaaaggtattccaggactatgagaaacggttacgagacagaaatgtaatagaaaccaaggaacacatagacacccatagggccatagtagccaagtacctccagcaggttagagaatcagtgataaatcgtttcttaattgcaaaacaatattttcttcttgctgatatgatagtagaagaagaagttcccaatatcagttctgaaggctcaggcattttgggcctaagccttttcaagctggcagaacaaaagcgaccactgcggccaaggagaaaaggtcggaagaaggtgacagcccaaaacctgtctgatggagacataaagctgctggtgaacattgtgcgagcttacgacattccagtgaggaagccggcagtgagcaaattccagcagccgtcgaggtcttcaaggatgttcagtgaaaagcatgctgcttccccaagcacgtacagcccaacccacaatgctgactaccccctcggccaggttttagtacgtccctttgtagaagtctcttttcaacgaacagtttgccatacgactacggctgaaggaccaaaccctagctggaatgaagaactagaacttccatttagggctcctaatggagattatagcacagccagtctgcagtcagtgaaagatgttgtgttcattaacatttttgatgaagtactgcatgatgtcttagaggatgaccgtgaaagaggaagtggaatccatactcgtattgagagacactggctgggatgtgtgaaaatgccatttagcacaatatatttccaagcaaggattgatggaacatttaaaatagatattcccccagttcttctgggctacagtaaggagcgaaatatgattcttgagcggggttttgattctgtccgaagcttaagtgaaggctcctacattaccctctttattaccattgagccccagctggttcctggagagtccattcgagaaaagatgagtaacatgcttaagaagtttgagtctcaggaagatgagaaattacttcaagcaactgagaagtttcaagctgaatgtgccttaaagtttccaaatcgtcagtgccttacaacagtaattgatataagcggaaaaactgtttttatcacacgttatctcaaacctttaaaccctcctcaggagctccttaatgtctaccccaataatctacaggcaactgcagaactggtggctcgatatgtgtccttgattcccttcttgcctgacactgtctcatttggtggtatctgtgacctctggagcacatctgatcaatttcttgatctcctggcaggggatgaagaagaacatgcagtactattgtgtaattactttctgtctctgggtaagaaggcctggctgttgatgggcaatgctattcctgagggtccaactgcctatgtgctaacttgggagcaaggtcgttatttaatatggaatccctgcagtggacatttttatggacaatttgatacattctgtcccttgaaaaatgtgggctgtttaataggtcctgacaatatttggtttaatattcaacgatatgaatctccactaaggataaattttgatgtcaccaggcccaagctatggaaatctttcttttcaagaagccttccatatcctggcctttccagtgttcagcctgaagagctaatttaccagcgctcagacaaagcagctgcagctgagctacaagacaggattgaaaaaatactaaaagaaaaaatcatggactggaggccacgccatctgactcggtggaataggtattgtacctctactctgcgtcacttcttgcctctgttagaaaaaagtcaaggagaagatgtagaagatgaccacagagcagaactgctaaaacagctgggagactacaggttctctggatttcctcttcacatgccttattctgaagtgaagcctttaattgacgctgtgtatagtactggagtacataatattgatgttcctaatgttgaatttgctttagctgtatacatacacccataccccaaaaatgttttgtctgtttggatctatgttgcctctcttatacgcaacaggtaatttttttcactgtactttctgtatcatgtaaaaactacacttaggatatgagaaaattttaaattatatgcatcacatcagaagaacatattattggcaaataataaaattatcaactgttttcaaa

SEQ ID NO: 120636 - DNA, 1673 bp, Homo sapiens
  Payload ID: 3630
  Gene Symbol: CC2D2A
  Gene Name: coiled-coil and C2 domain containing 2A
  Uniprot ID: Q9P2K1
  ENST ID: ENST00000438599
  CDS Start-End: 255-623
cttaggaacgggttgctaagctggtgtttttgctccaagacatggctgcagcttcccagggaggagcccaggggcatctccaacactcagcctttccctccggacccttttaaaagattcaacagcaccgtctctctccacttccatcctagaatgcagaatctgcaaagtgccttttgtaaagtttcttaaggtaaatcagtccctaaccggactttaggctgcaacattgtcagggacccatcccagccaaaatgaatcccagggaagaaaaagtaaaaataattacagaggagttcattgaaaatgatgaggatgcagacatgggaagacagaataagaactcaaaggttcgaagacagccaagaaagaaacagaagccaactcctttctcccgagcctgctggcagatcctcccccacctctccgcaggagttcccctcctaggctgggagcatcccgtgcagggtaaatcttttcaagccaccaactgctgtccccaaggaaatggtgtccgaaaaatcccaccttggcaacccccaggagcctgtgcaggaggagcccaagacccgcctcctgagtatgacagtccggagaggcccacggagagagctggttgttaaaaagagcctgggcaggccaggcacggtgactcacgtctgtaatcccagcactttggaaggccgaggcgggtaaatcacctgaggttgggagttcaagaccagcctgaccaacatggagaaaccccatctctactaaaaatacaaaaaaattagccaggcgtggtggcgcatgcctgtaatcccagctacttgggaggctgaggcatgagaattgcttgaacctgggaggtggaggttgcagtgagccgagatcggagcactgcactccagcctaggcaacagagcaagactccatctcagaaaacaaacaaacaaaaaagagcctggaacctcctcccctctctcttgctccctctctcaccatgcgacacacctgtttccccttccccttctgacataagtgaaagcttcctaaggcctcaccagaggcagatgctggcaccatgcttattgcacagtctgcagaacagtgagccaaaataaacctcttttctttataaattacccagtctcagatattcctttatagcaatgcaaaatggactaacaatacataagttagggagtgttaattagaatggaaattaaatatgcagaaactcaaaggaagatgaaattgttagggaagacatatgtgttaacctagtgaggcttgaatcagatgtttggaagaaatgagggaggtttctgaggctcctggtgaccttgccattgaggacacatatacttctccccctacacacgccttttcttcttccccagtacaatgaacattaggaattacctgctcattgtagggaaaatgaccacccttcaggcattgcttttcatgaaaagtggattagacaagaggagaagtggttacactttttaattgttacataattgttagactgttttccctatggcaaagttgggaaataagtaactgttggaaactagaggcctttggaagcaagtagactcttagattggaaaaatgtggttctaatctaaaagcaatgatacaatgagagctgttatgaattaataaaaacagaaccaaaattt

SEQ ID NO: 120637 - DNA, 5249 bp, Homo sapiens
  Payload ID: 3630
  Gene Symbol: CC2D2A
  Gene Name: coiled-coil and C2 domain containing 2A
  Uniprot ID: Q9P2K1
  ENST ID: ENST00000424120
  CDS Start-End: 255-5117
cttaggaacgggttgctaagctggtgtttttgctccaagacatggctgcagcttcccagggaggagcccaggggcatctccaacactcagcctttccctccggacccttttaaaagattcaacagcaccgtctctctccacttccatcctagaatgcagaatctgcaaagtgccttttgtaaagtttcttaaggtaaatcagtccctaaccggactttaggctgcaacattgtcagggacccatcccagccaaaatgaatcccagggaagaaaaagtaaaaataattacagaggagttcattgaaaatgatgaggatgcagacatgggaagacagaataagaactcaaaggttcgaagacagccaagaaagaaacagccaccaactgctgtccccaaggaaatggtgtccgaaaaatcccaccttggcaacccccaggagcctgtgcaggaggagcccaagacccgcctcctgagtatgacagtccggagaggcccacggagcttacctccaattccttcaacttccagaacaggctttgcagaattttccatgaggggacgcatgagggagaaattgcaagcagcgaggtccaaagcagaaagtgcattgctgcaggaaatccccactcctcggcccagacgcttacgaagtcccagtaagaaagaattggagactgaatttggcacagagccagggaaagaggtagaaaggactcaacaagaagttgactcccaaagttactcaagagtcaagttccatgattctgcacgaaaaatcaagcctaaaccccaggttccacctggcttcccttctgcagaagaggcctataacttctttactttcaactttgatcccgaaccagaaggatcagaggaaaaaccaaaagcaagacatagagcgggaactaatcaagaggaggaggaaggggaagaagaagaaccacctgcacaaggaggaggaaaggaaatggatgaggaagaactgcttaatggtgatgatgccgaggacttcctattgggcttagatcacgtggctgacgattttgtagcagtcagacctgcagattatgaaagcatccatgatcggctgcagatggaaagagaaatgctcttcatacccagtaggcagacagtccctacatataaaaagcttcctgagaatgtacagcccaggttcctggaagatgaaggcctttacaccggggtaagaccagaggtggcacgcaccaatcagaacatcatggagaacagattgctgatgcaggaccccgaaagaagatggtttggagatgacggcaggatcctagctctgccaaaccccatcaagccatttccttcaaggccgccagtactaacacaggagcagagcattaaggcagagcttgaaacactgtataaaaaggctgtaaaatacgttcacagtagtcagcatgtgatcagatctggagaccctcctggaaatttccaactggacattgatatttcagggttaatcttcactcatcatccctgttttagccgagagcatgttttggcagccaagctggcccagttatatgaccagtaccttgcaagacaccagagaaacaaggcgaaatttcttactgataagctccaagctttaagaaatgctgttcagactggccttgatccagaaaaacctcatcagtctctcgataccatccaaaaaaccatcaatgagtataaatctgaaattcgacaaacaagaaaattccgtgatgctgaacaagaaaaagatagaacattgcttaagactatcataaaagtttggaaagagatgaaatcccttcgagagttccagagatttacaaatactcccttgaaacttgttttgagaaaggaaaaagctgaccagaaagcagatgaagaagcatatgaagcagaaattcaagctgaaataagtgaactgttagaagagcacacggaggagtacgcacagaagatggaagaatacagaacgtcgttacaacagtggaaggcctggaggaaagtgcaaagggccaagaagaagaaaaggaaacaagcagcagaagaacatcccggtgatgagattgcagagccgtatcccgaggaggaccttgtgaagcccagccctccagagcccactgatcgggcagtgatagagcaggaggtgagggagagagcagcccagagcaggaggaggccttgggagcccacgctggtcccggagctaagcctggcaggaagcgtaacacccaatgaccagtgccccagagcggaggtctcgagaagggaggatgtaaagaagcgctcagtgtacttaaaagtgctgttcaacaacaaggaggtgtccaggacagtcagtcggccactaggagcagacttccgagttcactttgggcagattttcaatttgcaaatagtcaactggccggagagtttaacacttcaggtctatgaaactgtcggacacagtagtcccaccttgctagcagaagtgtttctgcctattcctgagactactgttgtcactggaagggctcctactgaagaagtggagtttagcagtaatcagcatgtgacactggaccacgagggagttggaagtggagtgcccttctcatttgaagctgatggcagtaaccagctgactctgatgacctcagggaaagtgtctcatagtgtggcatgggccattggagaaaacgggatacctttaattcctccattgtcacagcagaacatcggatttcggagtgctttgaagaaagcagatgccatctcatctattggcacatcaggactgacagacatgaaaaaattggccaagtgggcagcagagtccaagctcgacccaaatgaccccaacaatgcccctttgatgcagcttatctcggttgctaccagtggtgaatcctatgtccctgatttctttagactggagcagctgcaacaggagtttaactttgtttcagatcaagaattaaatagatccaaacgatttaggcttcttcatcttagaagccaagaggtgccagaattccgaaattataagcaagttccagtctatgaccgagaaattatggaaaaggtattccaggactatgagaaacggttacgagacagaaatgtaatagaaaccaaggaacacatagacacccatagggccatagtagccaagtacctccagcaggttagagaatcagtgataaatcgtttcttaattgcaaaacaatattttcttcttgctgatatgatagtagaagaagaagttcccaatatcagcattttgggcctaagccttttcaagctggcagaacaaaagcgaccactgcggccaaggagaaaaggtcggaagaaggtgacagcccaaaacctgtctgatggagacataaagctgctggtgaacattgtgcgagcttacgacattccagtgaggaagccggcagtgagcaaattccagcagccgtcgaggtcttcaaggatgttcagtgaaaagcatgctgcttccccaagcacgtacagcccaacccacaatgctgactaccccctcggccaggttttagtacgtccctttgtagaagtctcttttcaacgaacagtttgccatacgactacggctgaaggaccaaaccctagctggaatgaagaactagaacttccatttagggctcctaatggagattatagcacagccagtctgcagtcagtgaaagatgttgtgttcattaacatttttgatgaagtactgcatgatgtcttagaggatgaccgtgaaagaggaagtggaatccatactcgtattgagagacactggctgggatgtgtgaaaatgccatttagcacaatatatttccaagcaaggattgatggaacatttaaaatagatattcccccagttcttctgggctacagtaaggagcgaaatatgattcttgagcggggttttgattctgtccgaagcttaagtgaaggctcctacattaccctctttattaccattgagccccagctggttcctggagagtccattcgagaaaagtttgagtctcaggaagatgagaaattacttcaagcaactgagaagtttcaagctgaatgtgccttaaagtttccaaatcgtcagtgccttacaacagtaattgatataagcggaaaaactgtttttatcacacgttatctcaaacctttaaaccctcctcaggagctccttaatgtctaccccaataatctacaggcaactgcagaactggtggctcgatatgtgtccttgattcccttcttgcctgacactgtctcatttggtggtatctgtgacctctggagcacatctgatcaatttcttgatctcctggcaggggatgaagaagaacatgcagtactattgtgtaattactttctgtctctgggtaagaaggcctggctgttgatgggcaatgctattcctgagggtccaactgcctatgtgctaacttgggagcaaggtcgttatttaatatggaatccctgcagtggacatttttatggacaatttgatacattctgtcccttgaaaaatgtgggctgtttaataggtcctgacaatatttggtttaatattcaacgatatgaatctccactaaggataaattttgatgtcaccaggcccaagctatggaaatctttcttttcaagaagccttccatatcctggcctttccagtgttcagcctgaagagctaatttaccagcgctcagacaaagcagctgcagctgagctacaagacaggattgaaaaaatactaaaagaaaaaatcatggactggaggccacgccatctgactcggtggaataggtattgtacctctactctgcgtcacttcttgcctctgttagaaaaaagtcaaggagaagatgtagaagatgaccacagagcagaactgctaaaacagctgggagactacaggttctctggatttcctcttcacatgccttattctgaagtgaagcctttaattgacgctgtgtatagtactggagtacataatattgatgttcctaatgttgaatttgctttagctgtatacatacacccataccccaaaaatgttttgtctgtttggatctatgttgcctctcttatacgcaacaggtaatttttttcactgtactttctgtatcatgtaaaaactacacttaggatatgagaaaattttaaattatatgcatcacatcagaagaacatattattggcaaataataaaattatcaactgttttcaaactgtg

SEQ ID NO: 120638 - DNA, 5175 bp, Homo sapiens
  Payload ID: 3630
  Gene Symbol: CC2D2A
  Gene Name: coiled-coil and C2 domain containing 2A
  Uniprot ID: Q9P2K1
  ENST ID: ENST00000503292
  CDS Start-End: 181-5043
gcccaggggcatctccaacactcagcctttccctccggacccttttaaaagattcaacagcaccgtctctctccacttccatcctagaatgcagaatctgcaaagtgccttttgtaaagtttcttaagctatattctaatggatatgggctgacattaacaaggacccatcccagccaaaatgaatcccagggaagaaaaagtaaaaataattacagaggagttcattgaaaatgatgaggatgcagacatgggaagacagaataagaactcaaaggttcgaagacagccaagaaagaaacagccaccaactgctgtccccaaggaaatggtgtccgaaaaatcccaccttggcaacccccaggagcctgtgcaggaggagcccaagacccgcctcctgagtatgacagtccggagaggcccacggagcttacctccaattccttcaacttccagaacaggctttgcagaattttccatgaggggacgcatgagggagaaattgcaagcagcgaggtccaaagcagaaagtgcattgctgcaggaaatccccactcctcggcccagacgcttacgaagtcccagtaagaaagaattggagactgaatttggcacagagccagggaaagaggtagaaaggactcaacaagaagttgactcccaaagttactcaagagtcaagttccatgattctgcacgaaaaatcaagcctaaaccccaggttccacctggcttcccttctgcagaagaggcctataacttctttactttcaactttgatcccgaaccagaaggatcagaggaaaaaccaaaagcaagacatagagcgggaactaatcaagaggaggaggaaggggaagaagaagaaccacctgcacaaggaggaggaaaggaaatggatgaggaagaactgcttaatggtgatgatgccgaggacttcctattgggcttagatcacgtggctgacgattttgtagcagtcagacctgcagattatgaaagcatccatgatcggctgcagatggaaagagaaatgctcttcatacccagtaggcagacagtccctacatataaaaagcttcctgagaatgtacagcccaggttcctggaagatgaaggcctttacaccggggtaagaccagaggtggcacgcaccaatcagaacatcatggagaacagattgctgatgcaggaccccgaaagaagatggtttggagatgacggcaggatcctagctctgccaaaccccatcaagccatttccttcaaggccgccagtactaacacaggagcagagcattaaggcagagcttgaaacactgtataaaaaggctgtaaaatacgttcacagtagtcagcatgtgatcagatctggagaccctcctggaaatttccaactggacattgatatttcagggttaatcttcactcatcatccctgttttagccgagagcatgttttggcagccaagctggcccagttatatgaccagtaccttgcaagacaccagagaaacaaggcgaaatttcttactgataagctccaagctttaagaaatgctgttcagactggccttgatccagaaaaacctcatcagtctctcgataccatccaaaaaaccatcaatgagtataaatctgaaattcgacaaacaagaaaattccgtgatgctgaacaagaaaaagatagaacattgcttaagactatcataaaagtttggaaagagatgaaatcccttcgagagttccagagatttacaaatactcccttgaaacttgttttgagaaaggaaaaagctgaccagaaagcagatgaagaagcatatgaagcagaaattcaagctgaaataagtgaactgttagaagagcacacggaggagtacgcacagaagatggaagaatacagaacgtcgttacaacagtggaaggcctggaggaaagtgcaaagggccaagaagaagaaaaggaaacaagcagcagaagaacatcccggtgatgagattgcagagccgtatcccgaggaggaccttgtgaagcccagccctccagagcccactgatcgggcagtgatagagcaggaggtgagggagagagcagcccagagcaggaggaggccttgggagcccacgctggtcccggagctaagcctggcaggaagcgtaacacccaatgaccagtgccccagagcggaggtctcgagaagggaggatgtaaagaagcgctcagtgtacttaaaagtgctgttcaacaacaaggaggtgtccaggacagtcagtcggccactaggagcagacttccgagttcactttgggcagattttcaatttgcaaatagtcaactggccggagagtttaacacttcaggtctatgaaactgtcggacacagtagtcccaccttgctagcagaagtgtttctgcctattcctgagactactgttgtcactggaagggctcctactgaagaagtggagtttagcagtaatcagcatgtgacactggaccacgagggagttggaagtggagtgcccttctcatttgaagctgatggcagtaaccagctgactctgatgacctcagggaaagtgtctcatagtgtggcatgggccattggagaaaacgggatacctttaattcctccattgtcacagcagaacatcggatttcggagtgctttgaagaaagcagatgccatctcatctattggcacatcaggactgacagacatgaaaaaattggccaagtgggcagcagagtccaagctcgacccaaatgaccccaacaatgcccctttgatgcagcttatctcggttgctaccagtggtgaatcctatgtccctgatttctttagactggagcagctgcaacaggagtttaactttgtttcagatcaagaattaaatagatccaaacgatttaggcttcttcatcttagaagccaagaggtgccagaattccgaaattataagcaagttccagtctatgaccgagaaattatggaaaaggtattccaggactatgagaaacggttacgagacagaaatgtaatagaaaccaaggaacacatagacacccatagggccatagtagccaagtacctccagcaggttagagaatcagtgataaatcgtttcttaattgcaaaacaatattttcttcttgctgatatgatagtagaagaagaagttcccaatatcagcattttgggcctaagccttttcaagctggcagaacaaaagcgaccactgcggccaaggagaaaaggtcggaagaaggtgacagcccaaaacctgtctgatggagacataaagctgctggtgaacattgtgcgagcttacgacattccagtgaggaagccggcagtgagcaaattccagcagccgtcgaggtcttcaaggatgttcagtgaaaagcatgctgcttccccaagcacgtacagcccaacccacaatgctgactaccccctcggccaggttttagtacgtccctttgtagaagtctcttttcaacgaacagtttgccatacgactacggctgaaggaccaaaccctagctggaatgaagaactagaacttccatttagggctcctaatggagattatagcacagccagtctgcagtcagtgaaagatgttgtgttcattaacatttttgatgaagtactgcatgatgtcttagaggatgaccgtgaaagaggaagtggaatccatactcgtattgagagacactggctgggatgtgtgaaaatgccatttagcacaatatatttccaagcaaggattgatggaacatttaaaatagatattcccccagttcttctgggctacagtaaggagcgaaatatgattcttgagcggggttttgattctgtccgaagcttaagtgaaggctcctacattaccctctttattaccattgagccccagctggttcctggagagtccattcgagaaaagtttgagtctcaggaagatgagaaattacttcaagcaactgagaagtttcaagctgaatgtgccttaaagtttccaaatcgtcagtgccttacaacagtaattgatataagcggaaaaactgtttttatcacacgttatctcaaacctttaaaccctcctcaggagctccttaatgtctaccccaataatctacaggcaactgcagaactggtggctcgatatgtgtccttgattcccttcttgcctgacactgtctcatttggtggtatctgtgacctctggagcacatctgatcaatttcttgatctcctggcaggggatgaagaagaacatgcagtactattgtgtaattactttctgtctctgggtaagaaggcctggctgttgatgggcaatgctattcctgagggtccaactgcctatgtgctaacttgggagcaaggtcgttatttaatatggaatccctgcagtggacatttttatggacaatttgatacattctgtcccttgaaaaatgtgggctgtttaataggtcctgacaatatttggtttaatattcaacgatatgaatctccactaaggataaattttgatgtcaccaggcccaagctatggaaatctttcttttcaagaagccttccatatcctggcctttccagtgttcagcctgaagagctaatttaccagcgctcagacaaagcagctgcagctgagctacaagacaggattgaaaaaatactaaaagaaaaaatcatggactggaggccacgccatctgactcggtggaataggtattgtacctctactctgcgtcacttcttgcctctgttagaaaaaagtcaaggagaagatgtagaagatgaccacagagcagaactgctaaaacagctgggagactacaggttctctggatttcctcttcacatgccttattctgaagtgaagcctttaattgacgctgtgtatagtactggagtacataatattgatgttcctaatgttgaatttgctttagctgtatacatacacccataccccaaaaatgttttgtctgtttggatctatgttgcctctcttatacgcaacaggtaatttttttcactgtactttctgtatcatgtaaaaactacacttaggatatgagaaaattttaaattatatgcatcacatcagaagaacatattattggcaaataataaaattatcaactgttttcaaactgtg

SEQ ID NO: 120639 - DNA, 1949 bp, Homo sapiens
  Payload ID: 3630
  Gene Symbol: CC2D2A
  Gene Name: coiled-coil and C2 domain containing 2A
  ENST ID: ENST00000512702
  CDS Start-End: 186-1949
tttttgctccaagacatggctgcagcttcccagggaggagcccaggggcatctccaacactcagcctttccctccggacccttttaaaagattcaacagcaccgtctctctccacttccatcctagaatgcagaatctgcaaagtgccttttgtaaagtttcttaagggacccatcccagccaaaatgaatcccagggaagaaaaagtaaaaataattacagaggagttcattgaaaatgatgaggatgcagacatgggaagacagaataagaactcaaaggttcgaagacagccaagaaagaaacagccaccaactgctgtccccaaggaaatggtgtccgaaaaatcccaccttggcaacccccaggagcctgtgcaggaggagcccaagacccgcctcctgagtatgacagtccggagaggcccacggagcttacctccaattccttcaacttccagaacaggctttgcagaattttccatgaggggacgcatgagggagaaattgcaagcagcgaggtccaaagcagaaagtgcattgctgcaggaaatccccactcctcggcccagacgcttacgaagtcccagtaagaaagaattggagactgaatttggcacagagccagggaaagaggtagaaaggactcaacaagaagttgactcccaaagttactcaagagtcaagttccatgattctgcacgaaaaatcaagcctaaaccccaggttccacctggcttcccttctgcagaagaggcctataacttctttactttcaactttgatcccgaaccagaaggatcagaggaaaaaccaaaagcaagacatagagcgggaactaatcaagaggaggaggaaggggaagaagaagaaccacctgcacaaggaggaggaaaggaaatggatgaggaagaactgcttaatggtgatgatgccgaggacttcctattgggcttagatcacgtggctgacgattttgtagcagtcagacctgcagattatgaaagcatccatgatcggctgcagatggaaagagaaatgctcttcatacccagtaggcagacagtccctacatataaaaagcttcctgagaatgtacagcccaggttcctggaagatgaaggcctttacaccggggtaagaccagaggtggcacgcaccaatcagaacatcatggagaacagattgctgatgcaggaccccgaaagaagatggtttggagatgacggcaggatcctagctctgccaaaccccatcaagccatttccttcaaggccgccagtactaacacaggagcagagcattaaggcagagcttgaaacactgtataaaaaggctgtaaaatacgttcacagtagtcagcatgtgatcagatctggagaccctcctggaaatttccaactggacattgatatttcagggttaatcttcactcatcatccctgttttagccgagagcatgttttggcagccaagctggcccagttatatgaccagtaccttgcaagacaccagagaaacaaggcgaaatttcttactgataagctccaagctttaagaaatgctgttcagactggccttgatccagaaaaacctcatcagtctctcgataccatccaaaaaaccatcaatgagtataaatctgaaattcgacaaacaagaaaattccgtgatgctgaacaagaaaaagatagaacattgcttaagactatcataaaagtttggaaagagatgaaatcccttcgagagttccagagatttacaaatactcccttgaaacttgttttgagaaaggaaaaagctgaccagaaagcagatgaagaagcatatgaagcagaaattcaagctgaaataagtgaactgttagaagagcacacggaggagtacgcacagaagatggaagaatacagaacgtcgttacaacagtggaaggcctggaggaaagtgcaa

SEQ ID NO: 120640 - DNA, 3259 bp, Homo sapiens
  Payload ID: 3630
  Gene Symbol: CC2D2A
  Gene Name: coiled-coil and C2 domain containing 2A
  ENST ID: ENST00000506643
  CDS Start-End: 1-2711
aactgttagaagagcacacggaggagtacgcacagaagatggaagaatacagaacgtcgttacaacagtggaaggcctggaggaaagtgcaaagggccaagaagaagaaaaggaaacaagcagcagaagaacatcccggtgatgagattgcagagccgtatcccgaggaggaccttgtgaagcccagccctccagagcccactgatcgggcagtgatagagcaggaggtgagggagagagcagcccagagcaggaggaggccttgggagcccacgctggtcccggagctaagcctggcaggaagcgtaacacccaatgaccagtgccccagagcggaggtctcgagaagggaggatgtaaagaagcgctcagtgtacttaaaagtgctgttcaacaacaaggaggtgtccaggacagtcagtcggccactaggagcagacttccgagttcactttgggcagattttcaatttgcaaatagtcaactggccggagagtttaacacttcaggtctatgaaactgtcggacacagtagtcccaccttgctagcagaagtgtttctgcctattcctgagactactgttgtcactggaagggctcctactgaagaagtggagtttagcagtaatcagcatgtgacactggaccacgagggagttggaagtggagtgcccttctcatttgaagctgatggcagtaaccagctgactctgatgacctcagggaaagtgtctcatagtgtggcatgggccattggagaaaacgggatacctttaattcctccattgtcacagcagaacatcggatttcggagtgctttgaagaaagcagatgccatctcatctattggcacatcaggactgacagacatgaaaaaattggccaagtgggcagcagagtccaagctcgacccaaatgaccccaacaatgcccctttgatgcagcttatctcggttgctaccagtggtgaatcctatgtccctgatttctttagactggagcagctgcaacaggagtttaactttgtttcagatcaagaattaaatagatccaaacgatttaggcttcttcatcttagaagccaagaggtgccagaattccgaaattataagcaagttccagtctatgaccgagaaattatggaaaaggtattccaggactatgagaaacggttacgagacagaaatgtaatagaaaccaaggaacacatagacacccatagggccatagtagccaagtacctccagcaggttagagaatcagtgataaatcgtttcttaattgcaaaacaatattttcttcttgctgatatgatagtagaagaagaagttcccaatatcagcattttgggcctaagccttttcaagctggcagaacaaaagcgaccactgcggccaaggagaaaaggtcggaagaaggtgacagcccaaaacctgtctgatggagacataaagctgctggtgaacattgtgcgagcttacgacattccagtgaggaagccggcagtgagcaaattccagcagccgtcgaggtcttcaaggatgttcagtgaaaagcatgctgcttccccaagcacgtacagcccaacccacaatgctgactaccccctcggccaggttttagtacgtccctttgtagaagtctcttttcaacgaacagtttgccatacgactacggctgaaggaccaaaccctagctggaatgaagaactagaacttccatttagggctcctaatggagattatagcacagccagtctgcagtcagtgaaagatgttgtgttcattaacatttttgatgaagtactgcatgatgtcttagaggatgaccgtgaaagaggaagtggaatccatactcgtattgagagacactggctgggatgtgtgaaaatgccatttagcacaatatatttccaagcaaggattgatggaacatttaaaatagatattcccccagttcttctgggctacagtaaggagcgaaatatgattcttgagcggggttttgattctgtccgaagcttaagtgaaggctcctacattaccctctttattaccattgagccccagctggttcctggagagtccattcgagaaaagtttgagtctcaggaagatgagaaattacttcaagcaactgagaagtttcaagctgaatgtgccttaaagtttccaaatcgtcagtgccttacaacagtaattgatataagcggaaaaactgtttttatcacacgttatctcaaacctttaaaccctcctcaggagctccttaatgtctaccccaataatctacaggcaactgcagaactggtggctcgatatgtgtccttgattcccttcttgcctgacactgtctcatttggtggtatctgtgacctctggagcacatctgatcaatttcttgatctcctggcaggggatgaagaagaacatgcagtactattgtgtaattactttctgtctctgggtaagaaggcctggctgttgatgggcaatgctattcctgagggtccaactgcctatgtgctaacttgggagcaaggtcgttatttaatatggaatccctgcagtggacatttttatggacaatttgatacattctgtcccttgaaaaatgtgggctgtttaataggtcctgacaatgcccaagctatggaaatctttcttttcaagaagccttccatatcctggcctttccagtgttcagcctgaagagctaatttaccagcgctcagacaaagcagctgcagctgagctacaagacaggattgaaaaaatactaaaagaaaaaatcatggactggaggccacgccatctgactcggtggaataggtattgtacctctactctgcgtcacttcttgcctctgttagaaaaaagtcaaggagaagatgtagaagatgaccacagagcagaactgctaaaacagctgggagactacaggttctctggatttcctcttcacatgccttattctgaagtgaagcctttaattgacgctgtgtatagtactggagtacataatattgatgttcctaatgttgaatttgctttagctgtatacatacacccataccccaaaaatgttttgtctgtttggatctatgttgcctctcttatacgcaacaggtaatttttttcactgtactttctgtatcatgtaaaaactacacttaggatatgagaaaattttaaattatatgcatcacatcagaagaacatattattggcaaataataaaattatcaactgttttcaaa

SEQ ID NO: 120641 - DNA, 1474 bp, Homo sapiens
  Payload ID: 3630
  Gene Symbol: CC2D2A
  Gene Name: coiled-coil and C2 domain containing 2A
  Uniprot ID: Q9P2K1
  ENST ID: ENST00000515124
  CDS Start-End: 165-500
gcagcttcccagggaggagcccaggggcatctccaacactcagcctttccctccggacccttttaaaagattcaacagcaccgtctctctccacttccatcctagaatgcagaatctgcaaagtgccttttgtaaagtttcttaagggacccatcccagccaaaatgaatcccagggaagaaaaagtaaaaataattacagaggagttcattgaaaatgatgaggatgcagacatgggaagacagaataagaactcaaaggttcgaagacagccaagaaagaaacagccaccaactgctgtccccaaggaaatggtgtccgaaaaatcccaccttggcaacccccaggagcctgtgcaggaggagcccaagacccgcctcctgagtatgacagtccggagaggcccacggagagagctggttgttaaaaagagcctgggcaggccaggcacggtgactcacgtctgtaatcccagcactttggaaggccgaggcgggtaaatcacctgaggttgggagttcaagaccagcctgaccaacatggagaaaccccatctctactaaaaatacaaaaaaattagccaggcgtggtggcgcatgcctgtaatcccagctacttgggaggctgaggcatgagaattgcttgaacctgggaggtggaggttgcagtgagccgagatcggagcactgcactccagcctaggcaacagagcaagactccatctcagaaaacaaacaaacaaaaaagagcctggaacctcctcccctctctcttgctccctctctcaccatgcgacacacctgtttccccttccccttctgacataagtgaaagcttcctaaggcctcaccagaggcagatgctggcaccatgcttattgcacagtctgcagaacagtgagccaaaataaacctcttttctttataaattacccagtctcagatattcctttatagcaatgcaaaatggactaacaatacataagttagggagtgttaattagaatggaaattaaatatgcagaaactcaaaggaagatgaaattgttagggaagacatatgtgttaacctagtgaggcttgaatcagatgtttggaagaaatgagggaggtttctgaggctcctggtgaccttgccattgaggacacatatacttctccccctacacacgccttttcttcttccccagtacaatgaacattaggaattacctgctcattgtagggaaaatgaccacccttcaggcattgcttttcatgaaaagtggattagacaagaggagaagtggttacactttttaattgttacataattgttagactgttttccctatggcaaagttgggaaataagtaactgttggaaactagaggcctttggaagcaagtagactcttagattggaaaaatgtggttctaatctaaaagcaatgatacaatgagagctgttatgaattaataaaaacagaaccaaaa

SEQ ID NO: 120642 - DNA, 1663 bp, Homo sapiens
  Payload ID: 3630
  Gene Symbol: CC2D2A
  Gene Name: coiled-coil and C2 domain containing 2A
  ENST ID: ENST00000511544
  CDS Start-End: 186-407
tttttgctccaagacatggctgcagcttcccagggaggagcccaggggcatctccaacactcagcctttccctccggacccttttaaaagattcaacagcaccgtctctctccacttccatcctagaatgcagaatctgcaaagtgccttttgtaaagtttcttaagggacccatcccagccaaaatgaatcccagggaagaaaaagtaaaaataattacagaggagttcattgaaaatgatgaggatgcagacatgggaagacagaataagaactcaaaggttcgaagacagccaagaaagaaacaggcagaagccaactcctttctcccgagcctgctggcagatcctcccccacctctccgcaggagttcccctcctaggctgggagcatcccgtgcagggtaaatcttttcaagccaccaactgctgtccccaaggaaatggtgtccgaaaaatcccaccttggcaacccccaggagcctgtgcaggaggagcccaagacccgcctcctgagtatgacagtccggagaggcccacggagagagctggttgttaaaaagagcctgggcaggccaggcacggtgactcacgtctgtaatcccagcactttggaaggccgaggcgggtaaatcacctgaggttgggagttcaagaccagcctgaccaacatggagaaaccccatctctactaaaaatacaaaaaaattagccaggcgtggtggcgcatgcctgtaatcccagctacttgggaggctgaggcatgagaattgcttgaacctgggaggtggaggttgcagtgagccgagatcggagcactgcactccagcctaggcaacagagcaagactccatctcagaaaacaaacaaacaaaaaagagcctggaacctcctcccctctctcttgctccctctctcaccatgcgacacacctgtttccccttccccttctgacataagtgaaagcttcctaaggcctcaccagaggcagatgctggcaccatgcttattgcacagtctgcagaacagtgagccaaaataaacctcttttctttataaattacccagtctcagatattcctttatagcaatgcaaaatggactaacaatacataagttagggagtgttaattagaatggaaattaaatatgcagaaactcaaaggaagatgaaattgttagggaagacatatgtgttaacctagtgaggcttgaatcagatgtttggaagaaatgagggaggtttctgaggctcctggtgaccttgccattgaggacacatatacttctccccctacacacgccttttcttcttccccagtacaatgaacattaggaattacctgctcattgtagggaaaatgaccacccttcaggcattgcttttcatgaaaagtggattagacaagaggagaagtggttacactttttaattgttacataattgttagactgttttccctatggcaaagttgggaaataagtaactgttggaaactagaggcctttggaagcaagtagactcttagattggaaaaatgtggttctaatctaaaagcaatgatacaatgagagctgttatgaattaataaaaacagaaccaaaatttatctcatatggctgtttctttttctaaatgctcaaaattatttattactaccaaa

SEQ ID NO: 120643 - DNA, 605 bp, Homo sapiens
  Payload ID: 3630
  Gene Symbol: CC2D2A
  Gene Name: coiled-coil and C2 domain containing 2A
  Uniprot ID: Q9P2K1
  ENST ID: ENST00000503658
  CDS Start-End: 98-466
ctagaatgcagaatctgcaaagtgccttttgtaaagtttcttaagctatattctaatggatatgggctgacattaacaaggacccatcccagccaaaatgaatcccagggaagaaaaagtaaaaataattacagaggagttcattgaaaatgatgaggatgcagacatgggaagacagaataagaactcaaaggttcgaagacagccaagaaagaaacagaagccaactcctttctcccgagcctgctggcagatcctcccccacctctccgcaggagttcccctcctaggctgggagcatcccgtgcagggtaaatcttttcaagccaccaactgctgtccccaaggaaatggtgtccgaaaaatcccaccttggcaacccccaggagcctgtgcaggaggagcccaagacccgcctcctgagtatgacagtccggagaggcccacggagagagctggttgttaaaaagagcctgggcaggccaggcacggtgactcacgtctgtaatcccagcactttggaaggccgaggcgggtaaatcacctgaggttgggagttcaagaccagcctgaccaacatggagaaaccccatctctactaaaaa

SEQ ID NO: 120644 - DNA, 548 bp, Homo sapiens
  Payload ID: 3630
  Gene Symbol: CC2D2A
  Gene Name: coiled-coil and C2 domain containing 2A
  Uniprot ID: Q9P2K1
  ENST ID: ENST00000507954
  CDS Start-End: 208-543
gacatggctgcagcttcccagggaggagcccaggggcatctccaacactcagcctttccctccggacccttttaaaagattcaacagcaccgtctctctccacttccatcctagaatgcagaatctgcaaagtgccttttgtaaagtttcttaagctatattctaatggatatgggctgacattaacaaggacccatcccagccaaaatgaatcccagggaagaaaaagtaaaaataattacagaggagttcattgaaaatgatgaggatgcagacatgggaagacagaataagaactcaaaggttcgaagacagccaagaaagaaacagccaccaactgctgtccccaaggaaatggtgtccgaaaaatcccaccttggcaacccccaggagcctgtgcaggaggagcccaagacccgcctcctgagtatgacagtccggagaggcccacggagagagctggttgttaaaaagagcctgggcaggccaggcacggtgactcacgtctgtaatcccagcactttggaaggccgaggcgggtaaatcac

SEQ ID NO: 120645 - DNA, 425 bp, Homo sapiens
  Payload ID: 3630
  Gene Symbol: CC2D2A
  Gene Name: coiled-coil and C2 domain containing 2A
  ENST ID: ENST00000514039
  CDS Start-End: 1-425
ttgatacattctgtcccttgaaaaatgtgggctgtttaataggtcctgacaatcctgaagagctaatttaccagcgctcagacaaagcagctgcagctgagctacaagacaggattgaaaaaatactaaaagaaaaaatcatggactggaggccacgccatctgactcggtggaataggtattgtacctctactctgcgtcacttcttgcctctgttagaaaaaagtcaaggagaagatgtagaagatgaccacagagcagaactgctaaaacagctgggagactacaggttctctggatttcctcttcacatgccttattctgaagtgaagcctttaattgacgctgtgtatagtactggagtacataatattgatgttcctaatgttgaatttgctttagctgtatacatacacccatacccc

SEQ ID NO: 120646 - DNA, 4790 bp, Homo sapiens
  Payload ID: 3630
  Gene Symbol: CC2D2A
  Gene Name: coiled-coil and C2 domain containing 2A
  ENST ID: ENST00000634028
  CDS Start-End: 1-390
aagccaactcctttctcccgagcctgctggcagatcctcccccacctctccgcaggagttcccctcctaggctgggagcatcccgtgcagggtaaatcttttcaagccaccaactgctgtccccaaggaaatggtgtccgaaaaatcccaccttggcaacccccaggagcctgtgcaggaggagcccaagacccgcctcctgagtatgacagtccggagaggcccacggagcttacctccaattccttcaacttccagaacaggctttgcagaattttccatgaggggacgcatgagggagaaattgcaagcagcgaggtccaaagcagaaagtgcattgctgcaggaaatccccactcctcggcccagacgcttacgaagtcccagtaagaaagaattggagactgaatttggcacagagccagggaaagaggtagaaaggactcaacaagaagttgactcccaaagttactcaagagtcaagttccatgattctgcacgaaaaatcaagcctaaaccccaggttccacctggcttcccttctgcagaagaggcctataacttctttactttcaactttgatcccgaaccagaaggatcagaggaaaaaccaaaagcaagacatagagcgggaactaatcaagaggaggaggaaggggaagaagaagaaccacctgcacaaggaggaggaaaggaaatggatgaggaagaactgcttaatggtgatgatgccgaggacttcctattgggcttagatcacgtggctgacgattttgtagcagtcagacctgcagattatgaaagcatccatgatcggctgcagatggaaagagaaatgctcttcatacccagtaggcagacagtccctacatataaaaagcttcctgagaatgtacagcccaggttcctggaagatgaaggcctttacaccggggtaagaccagaggtggcacgcaccaatcagaacatcatggagaacagattgctgatgcaggaccccgaaagaagatggtttggagatgacggcaggatcctagctctgccaaaccccatcaagccatttccttcaaggccgccagtactaacacaggagcagagcattaaggcagagcttgaaacactgtataaaaaggctgtaaaatacgttcacagtagtcagcatgtgatcagatctggagaccctcctggaaatttccaactggacattgatatttcagggttaatcttcactcatcatccctgttttagccgagagcatgttttggcagccaagctggcccagttatatgaccagtaccttgcaagacaccagagaaacaaggcgaaatttcttactgataagctccaagctttaagaaatgctgttcagactggccttgatccagaaaaacctcatcagtctctcgataccatccaaaaaaccatcaatgagtataaatctgaaattcgacaaacaagaaaattccgtgatgctgaacaagaaaaagatagaacattgcttaagactatcataaaagtttggaaagagatgaaatcccttcgagagttccagagatttacaaatactcccttgaaacttgttttgagaaaggaaaaagctgaccagaaagcagatgaagaagcatatgaagcagaaattcaagctgaaataagtgaactgttagaagagcacacggaggagtacgcacagaagatggaagaatacagaacgtcgttacaacagtggaaggcctggaggaaagtgcaaagggccaagaagaagaaaaggaaacaagcagcagaagaacatcccggtgatgagattgcagagccgtatcccgaggaggaccttgtgaagcccagccctccagagcccactgatcgggcagtgatagagcaggaggtgagggagagagcagcccagagcaggaggaggccttgggagcccacgctggtcccggagctaagcctggcaggaagcgtaacacccaatgaccagtgccccagagcggaggtctcgagaagggaggatgtaaagaagcgctcagtgtacttaaaagtgctgttcaacaacaaggaggtgtccaggacagtcagtcggccactaggagcagacttccgagttcactttgggcagattttcaatttgcaaatagtcaactggccggagagtttaacacttcaggtctatgaaactgtcggacacagtagtcccaccttgctagcagaagtgtttctgcctattcctgagactactgttgtcactggaagggctcctactgaagaagtggagtttagcagtaatcagcatgtgacactggaccacgagggagttggaagtggagtgcccttctcatttgaagctgatggcagtaaccagctgactctgatgacctcagggaaagtgtctcatagtgtggcatgggccattggagaaaacgggatacctttaattcctccattgtcacagcagaacatcggatttcggagtgctttgaagaaagcagatgccatctcatctattggcacatcaggactgacagacatgaaaaaattggccaagtgggcagcagagtccaagctcgacccaaatgaccccaacaatgcccctttgatgcagcttatctcggttgctaccagtggtgaatcctatgtccctgatttctttagactggagcagctgcaacaggagtttaactttgtttcagatcaagaattaaatagatccaaacgatttaggcttcttcatcttagaagccaagaggtgccagaattccgaaattataagcaagttccagtctatgaccgagaaattatggaaaaggtattccaggactatgagaaacggttacgagacagaaatgtaatagaaaccaaggaacacatagacacccatagggccatagtagccaagtacctccagcaggttagagaatcagtgataaatcgtttcttaattgcaaaacaatattttcttcttgctgatatgatagtagaagaagaagttcccaatatcagcattttgggcctaagccttttcaagctggcagaacaaaagcgaccactgcggccaaggagaaaaggtcggaagaaggtgacagcccaaaacctgtctgatggagacataaagctgctggtgaacattgtgcgagcttacgacattccagtgaggaagccggcagtgagcaaattccagcagccgtcgaggtcttcaaggatgttcagtgaaaagcatgctgcttccccaagcacgtacagcccaacccacaatgctgactaccccctcggccaggttttagtacgtccctttgtagaagtctcttttcaacgaacagtttgccatacgactacggctgaaggaccaaaccctagctggaatgaagaactagaacttccatttagggctcctaatggagattatagcacagccagtctgcagtcagtgaaagatgttgtgttcattaacatttttgatgaagtactgcatgatgtcttagaggatgaccgtgaaagaggaagtggaatccatactcgtattgagagacactggctgggatgtgtgaaaatgccatttagcacaatatatttccaagcaaggtttgagtctcaggaagatgagaaattacttcaagcaactgagaagtttcaagctgaatgtgccttaaagtttccaaatcgtcagtgccttacaacagtaattgatataagcggaaaaactgtttttatcacacgttatctcaaacctttaaaccctcctcaggagctccttaatgtctaccccaataatctacaggcaactgcagaactggtggctcgatatgtgtccttgattcccttcttgcctgacactgtctcatttggtggtatctgtgacctctggagcacatctgatcaatttcttgatctcctggcaggggatgaagaagaacatgcagtactattgtgtaattactttctgtctctgggtaagaaggcctggctgttgatgggcaatgctattcctgagggtccaactgcctatgtgctaacttgggagcaaggtcgttatttaatatggaatccctgcagtggacatttttatggacaatttgatacattctgtcccttgaaaaatgtgggctgtttaataggtcctgacaatatttggtttaatattcaacgatatgaatctccactaaggataaattttgatgtcaccaggcccaagctatggaaatctttcttttcaagaagccttccatatcctggcctttccagtgttcagcctgaagagctaatttaccagcgctcagacaaagcagctgcagctgagctacaagacaggattgaaaaaatactaaaagaaaaaatcatggactggaggccacgccatctgactcggtggaataggtattgtacctctactctgcgtcacttcttgcctctgttagaaaaaagtcaaggagaagatgtagaagatgaccacagagcagaactgctaaaacagctgggagactacaggttctctggatttcctcttcacatgccttattctgaagtgaagcctttaattgacgctgtgtatagtactggagtacataatattgatgttcctaatgttgaatttgctttagctgtatacatacacccataccccaaaaatgttttgtctgtttggatctatgttgcctctcttatacgcaacaggtaatttttttcactgtactttctgtatcatgtaaaaactacacttaggatatgagaaaattttaaattatatgcatcacatcagaagaacatattattggcaaataataaaattatcaactgtt

SEQ ID NO: 120647 - DNA, 1809 bp, Homo sapiens
  Payload ID: 3631
  Gene Symbol: CC2D2B
  Gene Name: coiled-coil and C2 domain containing 2B
  Uniprot ID: Q6DHV5
  ENST ID: ENST00000344386
  CDS Start-End: 165-1133
tacaatatcacctttcttatagattcgcatatacatggccaaaggaacaactccatgttttctaaaaggcctagagaacatacatcagctcaccaggacatgattatagcttctcaagcttatctaaaataaaagataacatatatatcaacatttttgatgaaatgatgactgaaaaacatgaggatcactgtctcaagagctgtagtggtcactcatatataagaaagaattggcttggatgcattgtcttccctttttctgctcttctgcaacaatctgagtttttagatcaaacagaggtcttgcagagagcacagatttttaaaaagaattgtaaggcaatgtttcccaaccgaagaatcgtaactactgtttttaatgatgaagggatacagttcttagtcacaagatatatcaaggcattaaatccacctcagcaacttctggatatatttcttcacaattctaatgcaacatttgacctcattgctcgatttgtatctttgattccttttgtgcctaatacaccagatgaaaatgatggctctgatatatggatgacatcagagcactgcatcagtttagctatcggaaataaggaggagcatgccatccttctctgtaatttctttctgtattttggaaagaaggcactggtcctcttgggaacgtcagtgttagaagggcatgtggcttatgtagtaactcaagaaactaatgaatatttgctttggaatccatcaactggccaatgttataagcagtttgacccgttttgtcccttaaaaagtgtagattgtttgtttgatgatagaaatgtctggtttaatattcaacaaaataatacaccaatggctgtattttttgactattcaaaggaaagtttctggaagcagttgcttccaaaaaacgttcaaggaacaaaaatacaaagcatacaggtcacgggatttcccatccagatgccatacattgatgtacagtcaattattgatgctgtttatcaaactggaattcactctgctgaatttccccagacagaatttgctttagctgtatacattcacccatacccaaacaacatattatctgtgtgggtctatttggcttccttagttcaacatcaatgaaaaggaagcagagcaaagtaaaagattgtactatagtcctctagtaccaacaaaaacttttctggtaccttgagattttgctgtttattctcaagtccagctaagtgctgggcccaatttttgattcacttacagagctgggcactatggagactcgcacccctgagtgagtctttgaggaggagtctagatgagcttctcaccagagacctctccaggaaggacctttggatagtctggctttcttgggtcactgtctgcagtaggtcttattctgggaaagaagcaattttggcctcttctcctaagaccaatgtttctcaaattgtagaattcacaccacctccatttgaatcatctggagagccttgttgaaaatgcagattactagatcctcctcaagacccactgaatcagcacctctgggagtgaagctacagactctgcattattttcaacaagctccccagataattctgatgcactgttatgagggagagcccagccttatagaatgttgtcactactaaactaaggctggtacgtttgatgctgggtctgatacaatttcagatggaagctgctcgagtggaaaactaaggtcattgcctctcatggataaaatgttatttcactggtaaagaaaaataaaataaaatctaccatgttgggctga

SEQ ID NO: 120648 - DNA, 1792 bp, Homo sapiens
  Payload ID: 3631
  Gene Symbol: CC2D2B
  Gene Name: coiled-coil and C2 domain containing 2B
  Uniprot ID: Q6DHV5
  ENST ID: ENST00000410012
  CDS Start-End: 212-1417
attctcttgatgtctacaatatcacctttcttatagattcgcatatacatggccaaaggaacaactccatgttttctaaaaggcctagagaacatacatcagaagttttaaactgtaccagtcctttcctttatgctcaccaggacatgattatagcttctcaagcttatctaaaataaaagataacatatatatcaacatttttgatgaaatgatgactgaaaaacatgaggatcactgtctcaagagctgtagtggtcactcatatataagaaagaattggcttggatgcattgtcttccctttttctgctcttctgcaacaatctgagtttttagatcaaacagaggtcttgcagagagcacagatttttaaaaagaattgtaaggcaatgtttcccaaccgaagaatcgtaactactgtttttaatgatgaagggatacagttcttagtcacaagatatatcaaggcattaaatccacctcagcaacttctggatatatttcttcacaattctaatgcaacatttgacctcattgctcgatttgtatctttgattccttttgtgcctaatacaccagatgaaaatgatggctctgatatatggatgacatcagagcactgcatcagtttagctatcggaaataaggaggagcatgccatccttctctgtaatttctttctgtattttggaaagaaggcactggtcctcttgggaacgtcagtgttagaagggcatgtggcttatgtagtaactcaagaaactaatgaatatttgctttggaatccatcaactggccaatgttataagcagtttgacccgttttgtcccttaaaaagtgtagattgtttgtttgatgatagaaatgtctggtttaatattcaacaaaataatacaccaatggctgtattttttgactattcaaaggaaagtttctggaagcagttgcttccaaaaaacgttcaaggaacaaaaatacaaagcatacagcctgaagaaataatttattttgaaactgataaaagcatggtagaagatctaaggaataggatcgaaaggactctgaagagtaaagtgatggaatggcgacctaaacacccaacacattggaatcgacagtgtacttttattttgcgacaaatccttcctaagctggaatttggcataggaagctttgtttcatctgaaggagataatgaatttgaaagaatactacaattttattgggtcacgggatttcccatccagatgccatacattgatgtacagtcaattattgatgctgtttatcaaactggaattcactctgctgaatttccccagacagaatttgctttagctgtatacattcacccatacccaaacaacatattatctgtgtgggtctatttggcttccttagttcaacatcaatgaaaaggaagcagagcaaagtaaaagattgtactatagtcctctagtaccaacaaaaacttttctggtaccttgagattttgctgtttattctcaagtccagctaagtgctgggcccaatttttgattcacttacagagctgggcactatggagactcgcacccctgagtgagtctttgaggaggagtctagatgagcttctcaccagagacctctccaggaaggacctttggatagtctggctttcttgggtcactgtctgcagtaggtcttattctgggaaagaagcaattttggcctcttctcctaagaccaatgtttctcaaattgtagaattcacaccacctccatttgaatcatctggagagccttgttga

SEQ ID NO: 120649 - DNA, 818 bp, Homo sapiens
  Payload ID: 3631
  Gene Symbol: CC2D2B
  Gene Name: coiled-coil and C2 domain containing 2B
  ENST ID: ENST00000424464
  CDS Start-End: 233-818
attcctttttaaacaatatccattctcttgatgtctacaatatcacctttcttatagattcgcatatacatggccaaaggaacaactccatgttttctaaaaggcctagagaacatacatcagaagttttaaactgtaccagtcctttcctttatgctcaccaggacatgattatagcttctcaagcttatctaaaataaaagataacatatatatcaacatttttgatgaaatgatgactgaaaaacatgaggatcactgtctcaagagctgtagtggtcactcatatataagaaagaattggcttggatgcattgtcttccctttttctgctcttctgcaacaatctgagattagtggaacatttcaagtaactattccaccagttttgctcgggtatacttggagtaatacttatgtatttcctaaagaagattccaatgagcagaatttaaaagaatgtacattcttaaatatttttgctaccattgaacctcaaatatcatatgtcacctgtaatccaacactagataagtttttagatcaaacagaggtcttgcagagagcacagatttttaaaaagaattgtaaggcaatgtttcccaaccgaagaatcgtaactactgtttttaatgatgaagggatacagttcttagtcacaagatatatcaaggcattaaatccacctcagcaacttctggatatatttcttcacaattctaatgcaacatttgacctcattgctcgatttgtatctttgattccttttgtgcctaatacaccagatgaaaatgatggctctgatatatggatgacat

SEQ ID NO: 120650 - DNA, 2463 bp, Homo sapiens
  Payload ID: 3632
  Gene Symbol: CCDC102A
  Gene Name: coiled-coil domain containing 102A
  Uniprot ID: Q96A19
  ENST ID: ENST00000258214
  CDS Start-End: 248-1900
ccctccctcggcccctccggcggcggtcgcagctgcacggtgcccgctctaccccgccgcagcggctgggacgtacggagcccgcaagtcccggcccgaggtccgaggaggcgtcctccgcccggtggcccagagggaagcggggcacggcgtcatcatgcacagttgtatcgcgcccgccgcgcgtccccggagccgcccctgagcccgaccgcgagttcgagctcagggcccgcccggccgcaccatgagccacgggcccagcccccggctggccgagtccccgcagctgtccaagggcagcctcctgaccatcctgggcagcccgtcgccggagcgcatggggcctgccgactccttgccgcccacgccgcccagcggcacgccctcgcccgggccgccgcccgcactgcccctgccccccgcgcccgcgctgctggccgacggcgactgggagagccgcgaggagctgcggctgcgggagctggaggaggcgcgggcgcgggcggcgcagatggagaagaccatgcgccggtggtcggactgcactgccaattggcgcgagaaatggagcaaggtgcgcgctgagcgcaaccgcgcgcgcgaggaggtgcgccagctgcgccagcgcctggacgcgctcaccaaggagctggcgggcgcacggcgcgagcgccaagaggcgcagggcgagtgcgaggcacggggccgcgagctggcgcggctgaggggcgcccggggggtcgccgaccagacgcgcgacggccccgagccggaagcggagcgcgagccagtgcgtgacgtcgggtccgagaggccgccaggcagccaggaactggagctggtggagagcctgctgaagagcatgccagaggagtctgaggactgctgggaggcgcgcagcctgggggctgggggcccgcggggcagctcaggccgccaggagcgcagccggctaccctgggaggacacagctgccacggaggaggaggcctccaagttgaccgccctgcggctacggctggatgagtcccagaaggtgctgctcaaggagcgagaggataaactggcgttgagcaggaacattgagaagctagagggggagctcagccagtggaagatcaagtatgaggagctgagcaagaccaagcaggagatgctcaagcagctcagcatcctgaaggaggcgcaccaggacgagctgggccgcatgtctgaggacctggaagatgagctcggtgcacgctccagcatggaccggaaaatggccgagctgaggggcgagatggagcggctgcaggccgaaaacgctgcggagtggggccgccgggagcggctggagacagagaaactgggccttgagcgggagaacaagaagctgcgggcacaggtcggagacctggaggaggcgctggcccggcggcggcggcaaacagccagcgcactggactgcgacctgagggccagccaggccgcgctcttcgagaagaacaaggagctggcagacctgaagcatgtgcatggcaagctgaagaagcagttccaggagaaggtggcagagctggcacatgccaaccggcgggtggagcagcacgaggctgaggtgaagaagctgcggctgcgggtggaggagctcaagaaggagctggcccaggctgaggacgagctggacgaggcccacaaccaggcacgtaagctgcagcggtcgctggacgagcagacggagcagagcgagaacctgcaagtgcaactggagcacctgcagtccaggctccgcaggcagcagcagaacgctcccctcttcgggaagatccgcagtgctcgctttggcaccgaggaggccgaggatggaaccagtgacctggacgaggacgaggacctgcaaatccaggtggcctagagcttcctgtggctgggcaggatgggccgccccatacctgcccagggtccaggctaaccagccactcaaactgatgcagtgcctaggctcactctgggaccagtccctgccacagccgactttcttctctcccagggatggcgtcaacagtcccacctaccaacgccctgtggaaaggaagcctatgttttatatatatatatacacacacgcgcgcgcgcgcgcgcacacccagaagtctttggacccatttggttttataaatacaggacagctccaaggcccagtccagatgacctcacccacccaggacttcatgcagggctgggcatgttgggggcagttgttggagccccaccctgggctgcctctctaggcttcgctgttcatcatacaatgcagtgaacccagttatttgtaataaatgaagttcaagttcttggggcatctgaaagtatggcagatgtgggcgggggttgtgggggacggcatcggcctgcacctgacgctgaaccagagctcaggaatgtcaagtaacttaataaatgagtgaatgtgaagaa

SEQ ID NO: 120651 - DNA, 2644 bp, Homo sapiens
  Payload ID: 3633
  Gene Symbol: CCDC102B
  Gene Name: coiled-coil domain containing 102B
  Uniprot ID: Q68D86
  ENST ID: ENST00000319445
  CDS Start-End: 51-1592
agaacttggcaggatgaagacaaagtgtgtgaaaggtcttaaaaataaatatgaatttagattccatacatcgattaattgaggaaacacagatcttccagatgcaacaatcatcaattaagtcacgcggcgacatggtggcacctgcctcaccccccagggatacctgtaatacctgcttcccacttcatgggctacaatctcatgctgctcacaatttctgtgctcactcatataacaccaacaaatgggatatttgtgaagaacttcgcctgcgggagcttgaagaagtcaaggccagagctgctcagatggaaaagaccatgcggtggtggtcggactgcactgccaactggagagaaaaatggagtaaagttcgagctgaaaggaacagtgccagggaggaaggaagacaactcagaataaaactagagatggcgatgaaagaattgagtacactgaaaaagaaacagagtttgccacctcagaaggaggcattagaagctaaagttacccaggatctgaagcttcctggcttcgtagaagaatcctgtgaacatacagaccaatttcaattgagttcacaaatgcatgagtctatcagagagtatttggtaaaaagacaattttctacaaaggaggacacaaataataaggaacaaggtgtggttattgattctctaaaattaagtgaggagatgaagcccaatctagatggtgttgatttattcaacaatggtggttctggaaacggtgaaacgaaaactgggctgagactgaaagcaataaatctgcctttggaaaatgaagtaactgaaatttcagctttgcaggtgcatttggatgaattccaaaaaatcttatggaaggaaagagaaatgcgcacagctttggaaaaagaaatagagagactggagtcggctttgtctctgtggaagtggaagtatgaagaactgaaagaatcaaagccaaaaaatgtgaaagagtttgacattcttcttggtcaacataatgatgaaatgcaagaactgtcaggcaatataaaggaagaatccaaatctcaaaacagcaaagacagagtgatttgtgagttaagagcagagctagagagattgcaagctgaaaatacctcggagtgggacaagagggaaatacttgaaagagaaaagcagggactggagagagaaaatagaaggctgaagatccaggtgaaagaaatggaagagcttttggataagaaaaatagattaagtgcaaactctcaaagtcctgatttcaagatgtcacaaattgatctgcaagaaaaaaaccaggaattactgaaccttcaacatgcctactataaactaaacagacaataccaggcaaatattgcagaactgactcatgcaaacaaccgagtggatcaaaatgaagcagaagtaaagaaactaagattacgagtggaagaactaaagcagggactcaatcaaaaagaagatgagcttgatgattccctgaatcagatccgtaagctccagaggtctctggatgaagagaaagaaagaaatgaaaacttagagactgaactcaggcacttgcaaaactggtaattttttcacaaaatatgctgaattaaagattagggccttaaagacatttccatatccttttcttaaatatcagtaaaattgtttttattaactagaaatattaatgaaaaaaacgtagacaatacacaaattaatgggcttcttcacttcttctaatttttgcctaacagatactgcatattctcaaaaagacaatttaaatgtcatttaaaaacaactttaattctaagatgtgtaaatattttgaaagtcaaaaagggctttcagaatactttttacataaaatctgaaagagttataatatcggtaagaaaaagtaagttgaaaaccatacaagacgctgggtcattaataagaaaaccattgactttaagtataaagtactggtttgtttaaataattggtaaacttttatgtacgtgttgtctatgtggtggggatggcaggttgtattaacaaaaatgaatcattctagaggtgtaacaatacatttcttatataattttataagtcatttctaatctttgtataaaacagaagtgagcagatgaatcagaaaaaagtgttttgtattttaaagtaacagataaccagtgattgaatctaagacaggctgtaagcatcgctgagaaactaaaaggacttttgacttttatctggatagacatttctacagtaaaatcatggaaaggcatcagcattgcaaagtagcatctaggtagaaatcaggccaaaattaagctgtggtttccctctgagtagtgggaatagagaaaattaggaaattgtggttatgtgaatatttctttaaaacttttatgtacattatagtttattgcttcatatttaagtttagtttttaaggtaaaatgttattttgaacaaaaagacacttataattttccatacctattttcaactgaaggcaacttgtaagatttaactcagtcaataacatactggttttactcatctccccctccattgattagccaaaaaaaaatgaaatcttactaattcattattgaataaagaccacttttatcagagtc

SEQ ID NO: 120652 - DNA, 673 bp, Homo sapiens
  Payload ID: 3633
  Gene Symbol: CCDC102B
  Gene Name: coiled-coil domain containing 102B
  ENST ID: ENST00000358653
  CDS Start-End: 226-645
ggaggacacaaataataaggaacaaggtgtggttattgattctctaaaattaagtgaggagatgaagcccaatctagatggtgttgatttattcaacaatggtggttctggaaacggtgaaacgaaaactgggctgagactgaaagcaataaatctgcctttggaaaatgaagtaactgaaatttcagctttgcaggtgcatttggatgaattccaaaaaatcttatggaaggaaagagaaatgcgcacagctttggaaaaagaaatagagagactggagtcggctttgtctctgtggaagtggaatttgacattcttcttggtcaacataatgatgaaatgcaagaactgtcaggcaatataaaggaagaatccaaatctcaaaacagcaaagacagagtgatttgtgagttaagagcagagctagagagattgcaagctgaaaatacctcggagtgggacaagagggaaatacttgaaagagaaaagcagggactggagagagaaaatagaaggctgaagatccaggtgaaagaaatggaagagcttttggataagaaaaatagattaagtgcaaactctcaaagtcctgatttcaagatgtcacaaattgatctgcaagaaaaaaaccaggatgtaaaataacgttcatgcatctgaaacaaagtgtgtc

SEQ ID NO: 120653 - DNA, 2711 bp, Homo sapiens
  Payload ID: 3633
  Gene Symbol: CCDC102B
  Gene Name: coiled-coil domain containing 102B
  Uniprot ID: Q68D86
  ENST ID: ENST00000360242
  CDS Start-End: 118-1659
aggactccagaactgtacggatgagaaaaggatgcaggaaattctgttgtttacacatgtggctgcaactgagacactggagcagcccagcaagcccagagggtcttaaaaataaatatgaatttagattccatacatcgattaattgaggaaacacagatcttccagatgcaacaatcatcaattaagtcacgcggcgacatggtggcacctgcctcaccccccagggatacctgtaatacctgcttcccacttcatgggctacaatctcatgctgctcacaatttctgtgctcactcatataacaccaacaaatgggatatttgtgaagaacttcgcctgcgggagcttgaagaagtcaaggccagagctgctcagatggaaaagaccatgcggtggtggtcggactgcactgccaactggagagaaaaatggagtaaagttcgagctgaaaggaacagtgccagggaggaaggaagacaactcagaataaaactagagatggcgatgaaagaattgagtacactgaaaaagaaacagagtttgccacctcagaaggaggcattagaagctaaagttacccaggatctgaagcttcctggcttcgtagaagaatcctgtgaacatacagaccaatttcaattgagttcacaaatgcatgagtctatcagagagtatttggtaaaaagacaattttctacaaaggaggacacaaataataaggaacaaggtgtggttattgattctctaaaattaagtgaggagatgaagcccaatctagatggtgttgatttattcaacaatggtggttctggaaacggtgaaacgaaaactgggctgagactgaaagcaataaatctgcctttggaaaatgaagtaactgaaatttcagctttgcaggtgcatttggatgaattccaaaaaatcttatggaaggaaagagaaatgcgcacagctttggaaaaagaaatagagagactggagtcggctttgtctctgtggaagtggaagtatgaagaactgaaagaatcaaagccaaaaaatgtgaaagagtttgacattcttcttggtcaacataatgatgaaatgcaagaactgtcaggcaatataaaggaagaatccaaatctcaaaacagcaaagacagagtgatttgtgagttaagagcagagctagagagattgcaagctgaaaatacctcggagtgggacaagagggaaatacttgaaagagaaaagcagggactggagagagaaaatagaaggctgaagatccaggtgaaagaaatggaagagcttttggataagaaaaatagattaagtgcaaactctcaaagtcctgatttcaagatgtcacaaattgatctgcaagaaaaaaaccaggaattactgaaccttcaacatgcctactataaactaaacagacaataccaggcaaatattgcagaactgactcatgcaaacaaccgagtggatcaaaatgaagcagaagtaaagaaactaagattacgagtggaagaactaaagcagggactcaatcaaaaagaagatgagcttgatgattccctgaatcagatccgtaagctccagaggtctctggatgaagagaaagaaagaaatgaaaacttagagactgaactcaggcacttgcaaaactggtaattttttcacaaaatatgctgaattaaagattagggccttaaagacatttccatatccttttcttaaatatcagtaaaattgtttttattaactagaaatattaatgaaaaaaacgtagacaatacacaaattaatgggcttcttcacttcttctaatttttgcctaacagatactgcatattctcaaaaagacaatttaaatgtcatttaaaaacaactttaattctaagatgtgtaaatattttgaaagtcaaaaagggctttcagaatactttttacataaaatctgaaagagttataatatcggtaagaaaaagtaagttgaaaaccatacaagacgctgggtcattaataagaaaaccattgactttaagtataaagtactggtttgtttaaataattggtaaacttttatgtacgtgttgtctatgtggtggggatggcaggttgtattaacaaaaatgaatcattctagaggtgtaacaatacatttcttatataattttataagtcatttctaatctttgtataaaacagaagtgagcagatgaatcagaaaaaagtgttttgtattttaaagtaacagataaccagtgattgaatctaagacaggctgtaagcatcgctgagaaactaaaaggacttttgacttttatctggatagacatttctacagtaaaatcatggaaaggcatcagcattgcaaagtagcatctaggtagaaatcaggccaaaattaagctgtggtttccctctgagtagtgggaatagagaaaattaggaaattgtggttatgtgaatatttctttaaaacttttatgtacattatagtttattgcttcatatttaagtttagtttttaaggtaaaatgttattttgaacaaaaagacacttataattttccatacctattttcaactgaaggcaacttgtaagatttaactcagtcaataacatactggttttactcatctccccctccattgattagccaaaaaaaaatgaaatcttactaattcattattgaataaagaccacttttatcagagtc

SEQ ID NO: 120654 - DNA, 537 bp, Homo sapiens
  Payload ID: 3633
  Gene Symbol: CCDC102B
  Gene Name: coiled-coil domain containing 102B
  ENST ID: ENST00000578970
  CDS Start-End: 261-537
ggtgcccccctccacgcccaggagcgtgggaaccctgcttaagggctttactagggaaaacggtgctggttcactggggcgcgtttccgggaaggtgaataccggtgaaagttatgctgagggtgagtaaactcaaaaactgacactcgattcagctattggaaagtttttttaatgtggttggaacaactgagaattccgaattccaagaacctggacaacttgccgtcaagactttccatcaggtcttaaaaataaatatgaatttagattccatacatcgattaattgaggaaacacagatcttccagatgcaacaatcatcaattaagtcacgcggcgacatggtggcacctgcctcaccccccagggatacctgtaatacctgcttcccacttcatgggctacaatctcatgctgctcacaatttctgtgctcactcatataacaccaacaaatgggatatttgtgaagaacttcgcctgcgggagcttgaagaagtcaaggccagagctgctcagatggaaaagaccatgc

SEQ ID NO: 120655 - DNA, 465 bp, Homo sapiens
  Payload ID: 3633
  Gene Symbol: CCDC102B
  Gene Name: coiled-coil domain containing 102B
  ENST ID: ENST00000581520
  CDS Start-End: 54-465
tgtctttaaaaaataactgtatactaagcaaaactcaggtcttaaaaataaatatgaatttagattccatacatcgattaattgaggaaacacagatcttccagatgcaacaatcatcaattaagtcacgcggcgacatggtggcacctgcctcaccccccagggatacctgtaatacctgcttcccacttcatgggctacaatctcatgctgctcacaatttctgtgctcactcatataacaccaacaaatgggatatttgtgaagaacttcgcctgcgggagcttgaagaagtcaaggccagagctgctcagatggaaaagaccatgcggtggtggtcggactgcactgccaactggagagaaaaatggagtaaagttcgagctgaaaggaacagtgccagggaggaaggaagacaactcagaataaaactagagatggcgatgaaagaattgagtacactga

SEQ ID NO: 120656 - DNA, 1554 bp, Homo sapiens
  Payload ID: 3633
  Gene Symbol: CCDC102B
  Gene Name: coiled-coil domain containing 102B
  Uniprot ID: Q68D86
  ENST ID: ENST00000584156
  CDS Start-End: 1-1452
atgaatttagattccatacatcgattaattgaggaaacacagatcttccagatgcaacaatcatcaattaagtcacgcggcgacatggtggcacctgcctcaccccccagggatacctgtaatacctgcttcccacttcatgggctacaatctcatgctgctcacaatttctgtgctcactcatataacaccaacaaatgggatatttgtgaagaacttcgcctgcgggagcttgaagaagtcaaggccagagctgctcagatggaaaagaccatgcggtggtggtcggactgcactgccaactggagagaaaaatggagtaaagttcgagctgaaaggaacagtgccagggaggaaggaagacaactcagaataaaactagagatggcgatgaaagaattgagtacactgaaaaagaaacagagtttgccacctcagaaggaggcattagaagctaaagttacccaggatctgaagcttcctggcttcgtagaagaatcctgtgaacatacagaccaatttcaattgagttcacaaatgcatgagtctatcagagagtatttggtaaaaagacaattttctacaaaggaggacacaaataataaggaacaaggtgtggttattgattctctaaaattaagtgaggagatgaagcccaatctagatggtgttgatttattcaacaatggtggttctggaaacggtgaaacgaaaactgggctgagactgaaagcaataaatctgcctttggaaaatgaagtaactgaaatttcagctttgcaggtgcatttggatgaattccaaaaaatcttatggaaggaaagagaaatgcgcacagctttggaaaaagaaatagagagactggagtcggctttgtctctgtggaagtggaagtatgaagaactgaaagaatcaaagccaaaaaatgtgaaagagtttgacattcttcttggtcaacataatgatgaaatgcaagaactgtcaggcaatataaaggaagaatccaaatctcaaaacagcaaagacagagtgatttgtgagttaagagcagagctagagagattgcaagctgaaaatacctcggagtgggacaagagggaaatacttgaaagagaaaagcagggactggagagagaaaatagaaggctgaagatccaggtgaaagaaatggaagagcttttggataagaaaaatagattaagtgcaaactctcaaagtcctgatttcaagatgtcacaaattgatctgcaagaaaaaaaccaggaattactgaaccttcaacatgcctactataaactaaacagacaataccaggcaaatattgcagaactgactcatgcaaacaaccgagtggatcaaaatgaagcagaagtaaagaaactaagattacgagtggaagaactaaagcagggactcaatcaaaaagaagatgaggtactactttatgagtgaacacgtgctggacagcttctaaatagtattttagagcatatctaaagattgtctcccttattaacatatggcattaatgggatataaatattcatatcttaa

SEQ ID NO: 120657 - DNA, 541 bp, Homo sapiens
  Payload ID: 3633
  Gene Symbol: CCDC102B
  Gene Name: coiled-coil domain containing 102B
  ENST ID: ENST00000582371
  CDS Start-End: 170-541
aagggctttactagggaaaacggtgctggttcactggggcgcgtttccgggaaggtgaataccggtgaaagttatgctgagggtgagtaaactcaaaaactgacactcgattcagctattggaaagtttttttaatgtggttggaacaactgaggtcttaaaaataaatatgaatttagattccatacatcgattaattgaggaaacacagatcttccagatgcaacaatcatcaattaagtcacgcggcgacatggtggcacctgcctcaccccccagggatacctgtaatacctgcttcccacttcatgggctacaatctcatgctgctcacaatttctgtgctcactcatataacaccaacaaatgggatatttgtgaagaacttcgcctgcgggagcttgaagaagtcaaggccagagctgctcagatggaaaagaccatgcggtggtggtcggactgcactgccaactggagagaaaaatggagtaaagttcgagctgaaaggaacagtgccagggaggaaggaagacaactcaga

SEQ ID NO: 120658 - DNA, 1179 bp, Homo sapiens
  Payload ID: 3633
  Gene Symbol: CCDC102B
  Gene Name: coiled-coil domain containing 102B
  ENST ID: ENST00000584775
  CDS Start-End: 203-1179
aagggctttactagggaaaacggtgctggttcactggggcgcgtttccgggaaggtgaataccggtgaaagttatgctgagggtgagtaaactcaaaaactgacactcgattcagctattggaaagtttttttaatgtggttggaacaactgagaacttggcaggatgaagacaaagtgtgtgaaaggtcttaaaaataaatatgaatttagattccatacatcgattaattgaggaaacacagatcttccagatgcaacaatcatcaattaagtcacgcggcgacatggtggcacctgcctcaccccccagggatacctgtaatacctgcttcccacttcatgggctacaatctcatgctgctcacaatttctgtgctcactcatataacaccaacaaatgggatatttgtgaagaacttcgcctgcgggagcttgaagaagtcaaggccagagctgctcagatggaaaagaccatgcggtggtggtcggactgcactgccaactggagagaaaaatggagtaaagttcgagctgaaaggaacagtgccagggaggaaggaagacaactcagaataaaactagagatggcgatgaaagaattgagtacactgaaaaagaaacagagtttgccacctcagaaggaggcattagaagctaaagttacccaggatctgaagcttcctggcttcgtagaagaatcctgtgaacatacagaccaatttcaattgagttcacaaatgcatgagtctatcagagagtatttggtaaaaagacaattttctacaaaggaggacacaaataataaggaacaaggtgtggttattgattctctaaaattaagtgaggagatgaagcccaatctagatggtgttgatttattcaacaatggtggttctggaaacggtgaaacgaaaactgggctgagactgaaagcaataaatctgcctttggaaaatgaagtaactgaaatttcagctttgcaggtgcatttggatgaattccaaaaaatcttatggaaggaaagagaaatgcgcacagctttggaaaaagaaatagagagactggagtcggctttgtctctgtggaagtggaagtatgaagaactgaaagaatcaaagccaaaaaatgtgaaagagtttgacattcttcttggtcaacataatgatgaaatgcaaga

SEQ ID NO: 120659 - DNA, 849 bp, Homo sapiens
  Payload ID: 3634
  Gene Symbol: CCDC103
  Gene Name: coiled-coil domain containing 103
  ENST ID: ENST00000357776
  CDS Start-End: 138-849
gctaggcaaccacagctgcgggcgtggtctgcgcggggttgccctcctgttctggtttatcaggggatccccaaagaaagcaaggggaccaaggccgggactgctggggtgaaggtccgggaggctgagcacaggccatggaaaggaatgacatcatcaacttcaaggctttggagaaagagctgcaggctgcactcactgctgatgagaagtacaaacgggagaatgctgccaagttacgggcagtggaacagagggtggcttcctatgaggagttcaggggtattgtccttgcatcacatctgaagccactggagcggaaggataagatgggaggaaagagaactgtgccctggaactgtcacactattcagggaaggaccttccaggatgtggccactgaaatctccccggagaaagcccccctccagcccgagacgtctgctgacttctatcgtgattggcgacgacacttgccaagtgggccagagcgctaccaggctctactgcagcttgggggtccaaggctcggctgcctcttccagacagatgtgggatttggacttcttggggagctgctggtggcactggctgatcacgtggggccggctgaccgggcagcggtgctggggatcctatgcagcctggcgagcactgggcgcttcaccctgaacctaagcctgctgagccgggcagagagagagagctgcaagggcttgtttcagaagctgcaagccatgggcaaccccagatccgtgaaggaggggctcagctgggaggagcagggtctggaggagcagtctggtgggctccaggaggaggagaggctcctgcaggagctgctggagc

SEQ ID NO: 120660 - DNA, 571 bp, Homo sapiens
  Payload ID: 3634
  Gene Symbol: CCDC103
  Gene Name: coiled-coil domain containing 103
  Uniprot ID: Q8IW40
  ENST ID: ENST00000410027
  CDS Start-End: 131-427
gtggtctgcgcggggttgccctcctgttctggtttatcaggggatccccaaagaaagcaaggggaccaaggccgggactgctggggtgaaggtccgggaggctgagtaaggggacggaagggcacaggccatggaaaggaatgacatcatcaacttcaaggctttggagaaagagctgcaggctgcactcactgctgatgagaagtacaaacgggagaatgctgccaagttacgggcagtggaacagagggtggcttcctatgaggagttcaggggtattgtccttgcatcacatctgaagccactggagcggaaggataagatgggaggaaagagaactgtgccctggaactgtcacactattcagggaaggaccttccaggatgtggccactgaaatctccccgaacagctggaagagctcctgactccctttccttcctttgtggtccaggagaaagcccccctccagcccgagacgtctgctgacttctatcgtgattggcgacgacacttgccaagtgggccagagcgctaccaggctctactgcagcttgggggtccaaggctcg

SEQ ID NO: 120661 - DNA, 921 bp, Homo sapiens
  Payload ID: 3634
  Gene Symbol: CCDC103
  Gene Name: coiled-coil domain containing 103
  Uniprot ID: Q8IW40
  ENST ID: ENST00000410006
  CDS Start-End: 128-856
agttgctaggcaaccacagctgcgggcgtggtctgcgcggggttgccctcctgttctggtttatcaggggatccccaaagaaagcaaggggaccaaggccgggactgctggggtgaaggcacaggccatggaaaggaatgacatcatcaacttcaaggctttggagaaagagctgcaggctgcactcactgctgatgagaagtacaaacgggagaatgctgccaagttacgggcagtggaacagagggtggcttcctatgaggagttcaggggtattgtccttgcatcacatctgaagccactggagcggaaggataagatgggaggaaagagaactgtgccctggaactgtcacactattcagggaaggaccttccaggatgtggccactgaaatctccccggagaaagcccccctccagcccgagacgtctgctgacttctatcgtgattggcgacgacacttgccaagtgggccagagcgctaccaggctctactgcagcttgggggtccaaggctcggctgcctcttccagacagatgtgggatttggacttcttggggagctgctggtggcactggctgatcacgtggggccggctgaccgggcagcggtgctggggatcctatgcagcctggcgagcactgggcgcttcaccctgaacctaagcctgctgagccgggcagagagagagagctgcaagggcttgtttcagaagctgcaagccatgggcaaccccagatccgtgaaggaggggctcagctgggaggagcagggtctggaggagcagtctggtgggctccaggaggaggagaggctcctgcaggagctgctggagctgtaccaggttgactgatgcggcaagctaccctcagaggtcccagtggtcactggaggcagttttttggttgttgtcttggg

SEQ ID NO: 120662 - DNA, 3397 bp, Homo sapiens
  Payload ID: 3634
  Gene Symbol: CCDC103
  Gene Name: coiled-coil domain containing 103
  Uniprot ID: Q8IW40
  ENST ID: ENST00000417826
  CDS Start-End: 96-824
atcaggggatccccaaagaaagcaaggggaccaaggccgggactgctggggtgaaggtccgggaggctgagtaaggggacggaagggcacaggccatggaaaggaatgacatcatcaacttcaaggctttggagaaagagctgcaggctgcactcactgctgatgagaagtacaaacgggagaatgctgccaagttacgggcagtggaacagagggtggcttcctatgaggagttcaggggtattgtccttgcatcacatctgaagccactggagcggaaggataagatgggaggaaagagaactgtgccctggaactgtcacactattcagggaaggaccttccaggatgtggccactgaaatctccccggagaaagcccccctccagcccgagacgtctgctgacttctatcgtgattggcgacgacacttgccaagtgggccagagcgctaccaggctctactgcagcttgggggtccaaggctcggctgcctcttccagacagatgtgggatttggacttcttggggagctgctggtggcactggctgatcacgtggggccggctgaccgggcagcggtgctggggatcctatgcagcctggcgagcactgggcgcttcaccctgaacctaagcctgctgagccgggcagagagagagagctgcaagggcttgtttcagaagctgcaagccatgggcaaccccagatccgtgaaggaggggctcagctgggaggagcagggtctggaggagcagtctggtgggctccaggaggaggagaggctcctgcaggagctgctggagctgtaccaggttgactgatgcggcaagctaccctcagaggtcccagtggtcactggaggcagttttttggttgttgtcttgggggttctgcaggaccataataagaaacccacacctggttcccttctcaacttggaattttcagagcaaaaacaggaatcaagtcttccccacttctccagtccctcagtgtctcgctgttttgaactgtgtgtatccatggacagtcaagagctcaggaagttgagagcggttttgtttcccacccttagagtctgccaagcctctagcccactggccttgagagatgagtgtgtgcccaaccaaatgctggctataccagttacagcctccactcataaaagggaaaaagcaaaatctttatggtaaacaaacactgatctccacagctcttaacaagaatgtttatagccccaaaccaatgaatggacatgtaatcaacaaatgatcaaatactacatcatttgaggtgttgaattttcccctagagactcagttcttgtgcaggttgggcctgggaaagtcccaagccatcagctcaggtccagccagcctcccggatggccagatatgcaggagggtgggtttccttcatcccccaggttgatgaaagacttttccaccaggctggcagggcagggcctggagcactgaggcagagatctccctgcccgagcacctcggcccgcccttctcattccggtttcctttgacccattcttgggtgagcgccagtgttctagaaaggggagtaaaggccaggttctagaatggctttccccccccaccctgagatcaggtctggaatgttagaagggcatcttgtacatccactgggaataaattgccttgcacttggcggcttcctctgcagattgttgctgcttttcctggctgcataatcctttcctcatctagaggcttccgcttagcagagctttctaggagccctatgagcctttaatgccctggttttgccctgcccctctgacccctgcctccttcaggtatgcacctggccctcaccactgtgctcctgtgggcatgggggctccaggcctttgaaattgtggagaaggaaaacatttttcagaggaccccctgccctgctttcctgatgtttgaaaatgcagcctacctggccgacatgagctttgagcttccctgtcactgcaaacccgaagaggtgccagctgtagtctggttctaccaaaagcacctaggtagcagccacaccaaagtgctgacggactttgatgggcgggtgctgacggaggcagcccaggtacgtgtgggcagcgacatgctgacccgcttcagcatccgcatgttcagcttgttggttttcagggctcagtctgaggactcaggcctgtacttctgcggcacccgcaagggggactacttttacgcctacgatgtggacatccagaacagtgagggaatggtggccactttccaggacaagggccaggagccctttgcagatgaatactatgggcacctccatgtcttcaccaccttctgggaatggaccccctgtgaccgctgcggagtgcgtggggagcagtggcgcatcggcctctgctacctgcagagcccagacctctccccacgctacctcaaggccgtgcccgatgtggtgtcttgtggctcaagggctgtgccaaggaagctgcggaccaaggccagggaccacacgcctgaggtgctggttcggagctgcttagtaccctgtgagaagacaaagaccatccgggagggcgtgctggccatcattaactatgtgtccaaagtgggcagccggccctgggtgccccaggtgcccattcagttccaccagcagagactgggccatggactcatcatctcctgtcctggggcccggccagagcatgcagtggcctgggacaaagaccgccagcacctctaccgcacacagtacctgaagggtgtcaacaggtccatgagggtgttcattgaccacggcaaccagctccacatccgcttcacccagctggatgaccggggcatctactattgctggaggcagggtgtgctagttgctggcttccggctgggtgtgacatctcatgggcactacccagcctcgttctcagatcctgagactcgctcggctgtggagctcaccctgataggctacctgctcatcacagcagtctttgtcaccattcacttctgtcgttgctgctgctacttatttcactgttgtcccagcttctccccctaggagctctcttcagctctgaagaccagttgtccttcaatgtgtttgttaaatgataccagatgtctctgggtgggtaccctgggttgggacaggtggtaggaacatgtggacaaatctgttacagcctgctccccattttcatgggcaggtctgggacctgatctgagaagtggaggggcctgaggctggtgggagattggggactgagctcaggatggaagtagggcacatgtgtttcctgacttcacatttaggtcagagaaggaaagtgtgaactcagatttatccagtggtaaacactgatcagtgttgaatcatg

SEQ ID NO: 120663 - DNA, 576 bp, Homo sapiens
  Payload ID: 3634
  Gene Symbol: CCDC103
  Gene Name: coiled-coil domain containing 103
  ENST ID: ENST00000577339
  CDS Start-End: 399-576
ggcagccccgaaatcgaggtgtgtgcgtgtgtgcgcgcttcggaagccttgggaaggcacgaggacgacagggtcttccattctttttcccgctccaggcctcaatttaccgatccgtaaagcgaaaggggccaatagcatataaggccccttccagatctgacgctttttaatttcctatcccacctggagcaacccttccgtgccgctgacccgcttcaacttacctctcgcctgctcagctaagagttcccaggccgctgccggagatcgtgcttccgccccacgccgaggaaacgcctgcgcccgccgccaggaaggaccccgcagacgccgctgtcgcctttctgcccgggaggacaaccctctgcctgaggaccagttccgaggcacaggccatggaaaggaatgacatcatcaacttcaaggctttggagaaagagctgcaggctgcactcactgctgatgagaagtacaaacgggagaatgctgccaagttacgggcagtggaacagagggtggcttcctatgaggagttcaggggtattgtccttgcatcacatctgaagccactgg

SEQ ID NO: 120664 - DNA, 1732 bp, Homo sapiens
  Payload ID: 3635
  Gene Symbol: CCDC105
  Gene Name: coiled-coil domain containing 105
  Uniprot ID: Q8IYK2
  ENST ID: ENST00000292574
  CDS Start-End: 83-1582
gccaggaaagagttgtgtgtctttggggtcccttccgctccgcctagggttcccggccaggccgagagaccaagcagggaccatgcgcgtgttggtacccccggctgagcgcagccaggacacacgcgttggggccccagcatggcgcgaggcagctcaggccatggcgaggaccgcgcacattctgaccgatcgctgcgggcaggaggcggtgaccatgtggcagcccaaggacagcgtgctggacccgaacgtggcccaccacctcggccgcgccgcctacatccagccctggcgcttccgcgtggagatgatcaaaggcggcggcaccttggagaagccgccgccaggcgagggcgtcacgctgtggaagggcaagatgaagccgcccgcctggtacgcccgcctgccgctacccttgcaccgcaaagcgcgcgccctgcagaccaccgaggtggtgcacgcgcacgcgcgtggagcgcgcctcaccgccgcccgcctcggccgcgcgcagcaccagattaacgggcgggtgcgacagctgctgcgccagcgcgaggtcaccgaccacaggctcagcgaagtgcgcaagggtctgcttattaaccagcagagcgtcaagctgcggggctacaggcccaagtctgagaaggtccctgacaaagctgacagtatgcttacatgggagaaagaggagctgaaaagcatgaagaggaaaatggagagagatatggaaaaatcagaggtcctactcaagaccctggcctcctgccgagacactctgaacttctgcttcaaggagcggctccaagccgtggacctcatgaaccagcctctggacaaggttctggagcaggccagacgccactcatgggtgaacctctcccgagcccccactccacgcacacagggtcagaaaacgcctcctccagaccctgtgggcacctataacccagcgtgcgccttggcgctaaacgaagccaagcggttgttggtcgagtccaaggacaccttggtagaaatggcaaagaacgaggtggacgtccgggagcaacagctgcagataagcgaccgtgtgtgtgcctcgctggcgcagaaggcgagcgagaccttggagctgaaggaaagattaaatatgacgttaggactgatgaggggaactatcctccggtgtacgaaatataaccaagagttgtacaccacccacggtctcatcaagggtcctctgtcgaaagttcacctggagaccgcagaaaagctggacagacccctggttcgcatgtaccagagacacgtgggcacccaactcccggaggctgcgcgcctcgcacagggcaccgacaagctgcagtgccacatcacgtacctggaaaagaacctggacgagctgctcgccacgcacaagaacctcagctggggcctcaactgcaagaacatcgggcatgaggtggacggcaacgtggtgcgcctgcgcctgcgccagcggcaaccgcacgtgtgctacgagcaggcgcagcgcctggttaaggactgggacccgcgcacgccgccgccgcgcagcaagagcagcgcggacccctagtgaccccagcgtcccccgccccagccagctgattggatgctggctgggacctcggagagcagacacagccccatggccctccctctcccctgacgcaccctccctccaagcaccctctaggagaattataattaaaaataacaataatta

SEQ ID NO: 120665 - DNA, 1546 bp, Homo sapiens
  Payload ID: 3636
  Gene Symbol: CCDC106
  Gene Name: coiled-coil domain containing 106
  Uniprot ID: Q9BWC9
  ENST ID: ENST00000308964
  CDS Start-End: 289-1131
aacggcgggcctcacctggacccggggactcttcaacgaggggcgctagcctggcccgactgggcgagtccccgcgtccctgcccgttccgtcgctcagttccacgacacgctcccctgccgccccgcctgttcgcgggtgggtgggcgcttccctcggctccccgtgacactttgcagacgctccccggcgccgggcatgggcgccgccgccgtcggtccccgagccggattccgcgagcggtgcccctgaggccctcggctgctggggtccgtaggaagccgcgccatgaatgaccggagcagtcggaggcggacaatgaaggacgatgagaccttcgagatctccattcccttcgatgaggcaccccacctagacccacagatcttttacagtctgagcccctctcggagaaacttcgaggagcctccggaggctgcgtcctccgccctggctctgatgaacagcgtcaagacccagctgcacatggctctggagaggaactcctggctgcagaagcgcatcgaggacctggaggaagagagggacttcctgcggtgccagctggacaaattcatctcttctgctcggatggaggcagaggaccactgccggatgaagcctgggcccaggcggatggagggggacagccgtggtggggctgggggcgaggcctcggaccctgagtcagcagcctcctccctcagcggagcgtccgaagaaggcagcgccagtgagaggaggcggcagaagcagaagggaggtgctagtcggaggcgctttgggaagcccaaggcccgggagaggcagcgagtgaaggacgccgacggggtcctctgccggtacaagaagatcctgggcaccttccagaagctcaagagcatgtcgcgggccttcgagcaccaccgcgtggacaggaacaccgtggcgctgaccacgcccatcgccgagctgctcattgtggcccccgagaagctggccgaggtgggcgagttcgacccctccaaggagcgcctgctcgagtactcccgccgctgctttctggccctggacgacgagacgctcaagaaggtgcaggcgctcaagaagagcaagctgctgctgcccatcacctaccgcttcaagcggtgatcgcaccacgcctccgcgcctccacccgggccttcctcccccgtggaccccggtggatgacctgcccctctccccgccgcgcccctgcccctcctcctcgctccctgggttgggggctcccttagccgggcccccaagcgcgacggccccggaccggccgcggccccttcccgaacgccggcacccccttccgcttgggctgcccagccctgtcctcgccgggccccttcctcctggaaaaccaggcaggcgggtgcccccccctcgagtgggggactgtacagaccccgtctccgccctggccccgcggaggagctgcccacctgattcccggacagacctccccaactccgcgtgagacagagaattattcagataatttaaattaaaaaacgacgtgaaaatttggaataaa

SEQ ID NO: 120666 - DNA, 2162 bp, Homo sapiens
  Payload ID: 3636
  Gene Symbol: CCDC106
  Gene Name: coiled-coil domain containing 106
  Uniprot ID: Q9BWC9
  ENST ID: ENST00000586790
  CDS Start-End: 905-1747
acgctcccctgccgccccgcctgttcgcgggtgggtgggcgcttccctcggctccccgtgacactttgcagacgctccccggcgccgggcatgggcgccgccgccgtcggtccccgagccggattccgcgagcgggtgggtgagcgcggggggcctcggcccctcggaccccgggcacccgcgggcgggggatggtggccgcgtttgcacccccgccctagtgcatgttcccgctggaatcgttccacgaccgctccccctcccacccgcgggacaaagggcgggggcggggggggcgcacccccacgcgtgacctttccccgtactgcgcacgcgcccagcccccaccaccgggggacggtccgcccgcccacgcgagtgcgggggaggggtgtgggggccccgaaggtagaggaggcagcgcgcacgggctggacctcctcctaccctgggaagttggggcagtttccccctgcacctgcctcttccttaggcctggcagtggcccgcgatgagagagggtccttccccttcaggctaggtgtccctggtcaggcgaccccttggggcacccagcaatttagggcttcagcttccttttccttcgatacccaggagcccacgtccccagctcacttctcccccaggacctaggcggctgggccccctgcccctgactccaggagcccaggagtttgaagcccaggcgcgttttgcctcagtcctggggtccaggctccctcctccctcagaccaggggtccaggccagaaggtccctcctgtctcacttcacctcccccaggatggaccctccagtccatctgcgtctctccatttgtggctgccgtttctgtccagtgcccctgaggccctcggctgctggggtccgtaggaagccgcgccatgaatgaccggagcagtcggaggcggacaatgaaggacgatgagaccttcgagatctccattcccttcgatgaggcaccccacctagacccacagatcttttacagtctgagcccctctcggagaaacttcgaggagcctccggaggctgcgtcctccgccctggctctgatgaacagcgtcaagacccagctgcacatggctctggagaggaactcctggctgcagaagcgcatcgaggacctggaggaagagagggacttcctgcggtgccagctggacaaattcatctcttctgctcggatggaggcagaggaccactgccggatgaagcctgggcccaggcggatggagggggacagccgtggtggggctgggggcgaggcctcggaccctgagtcagcagcctcctccctcagcggagcgtccgaagaaggcagcgccagtgagaggaggcggcagaagcagaagggaggtgctagtcggaggcgctttgggaagcccaaggcccgggagaggcagcgagtgaaggacgccgacggggtcctctgccggtacaagaagatcctgggcaccttccagaagctcaagagcatgtcgcgggccttcgagcaccaccgcgtggacaggaacaccgtggcgctgaccacgcccatcgccgagctgctcattgtggcccccgagaagctggccgaggtgggcgagttcgacccctccaaggagcgcctgctcgagtactcccgccgctgctttctggccctggacgacgagacgctcaagaaggtgcaggcgctcaagaagagcaagctgctgctgcccatcacctaccgcttcaagcggtgatcgcaccacgcctccgcgcctccacccgggccttcctcccccgtggaccccggtggatgacctgcccctctccccgccgcgcccctgcccctcctcctcgctccctgggttgggggctcccttagccgggcccccaagcgcgacggccccggaccggccgcggccccttcccgaacgccggcacccccttccgcttgggctgcccagccctgtcctcgccgggccccttcctcctggaaaaccaggcaggcgggtgcccccccctcgagtgggggactgtacagaccccgtctccgccctggccccgcggaggagctgcccacctgattcccggacagacctccccaactccgcgtgagacagagaattattcagataatttaaattaaaaaacgacgtgaaaatttggaataaa

SEQ ID NO: 120667 - DNA, 1153 bp, Homo sapiens
  Payload ID: 3636
  Gene Symbol: CCDC106
  Gene Name: coiled-coil domain containing 106
  ENST ID: ENST00000591241
  CDS Start-End: 129-866
cctcctgtctcacttcacctcccccaggatggaccctccagtccatctgcgtctctccatttgtggctgccgtttctgtccagtgcccctgaggccctcggctgctggggtccgtaggaagccgcgccatgaatgaccggagcagtcggaggcggacaaagcctccggaggctgcgtcctccgccctggctctgatgaacagcgtcaagacccagctgcacatggctctggagaggaactcctggctgcagaagcgcatcgaggacctggaggaagagagggacttcctgcggtgccagctggacaaattcatctcttctgctcggatggaggcagaggaccactgccggatgaagcctgggcccaggcggatggagggggacagccgtggtggggctgggggcgaggcctcggaccctgagtcagcagcctcctccctcagcggagcgtccgaagaaggcagcgccagtgagaggaggcggcagaagcagaagggaggtgctagtcggaggcgctttgggaagcccaaggcccgggagaggcagcgagtgaaggacgccgacggggtcctctgccggtacaagaagatcctgggcaccttccagaagctcaagagcatgtcgcgggccttcgagcaccaccgcgtggacaggaacaccgtggcgctgaccacgcccatcgccgagctgctcattgtggcccccgagaagctggccgaggtgggcgagttcgacccctccaaggagcgcctgctcgagtactcccgccgctgctttctggccctggacgacgagacgctcaagaaggtgcaggcgctcaagaagagcaagctgctgctgcccatcacctaccgcttcaagcggtgatcgcaccacgcctccgcgcctccacccgggccttcctcccccgtggaccccggtggatgacctgcccctctccccgccgcgcccctgcccctcctcctcgctccctgggttgggggctcccttagccgggcccccaagcgcgacggccccggaccggccgcggccccttcccgaacgccggcacccccttccgcttgggctgcccagccctgtcctcgccgggccccttcctcctggaaaaccaggcaggcgggtgcccccccctcgagtgggggactgtacagacc

SEQ ID NO: 120668 - DNA, 741 bp, Homo sapiens
  Payload ID: 3636
  Gene Symbol: CCDC106
  Gene Name: coiled-coil domain containing 106
  ENST ID: ENST00000592996
  CDS Start-End: 224-741
cggcgccgccggcccggagctgcccggaagtctcggttccgccgccggcgctcgccaggggaagcccggggccgcccgggacctcggcccgttcctccggacccgagaggccgccgcacggggatggaccctccagtccatctgcgtctctccatttgtggctgccgtttctgtccagtgcccctgaggccctcggctgctggggtccgtaggaagccgcgccatgaatgaccggagcagtcggaggcggacaatgaaggacgatgagaccttcgagatctccattcccttcgatgaggcaccccacctagacccacagatcttttacagtctgagcccctctcggagaaacttcgaggagcctccggaggctgcgtcctccgccctggctctgatgaacagcgtcaagacccagctgcacatggctctggagaggaactcctggctgcagaagcgcatcgaggacctggaggaagagagggacttcctgcggtgccagctggacaaattcatctcttctgctcggatggaggcagaggaccactgccggatgaagcctgggcccaggcggatggagggggacagccgtggtggggctgggggcgaggcctcggaccctgagtcagcagcctcctccctcagcggagcgtccgaagaaggcagcgccagtgagaggaggcggcagaagcagaagggaggtgctagtcggaggcgctttgggaagcccaaggcccgggagag

SEQ ID NO: 120669 - DNA, 1592 bp, Homo sapiens
  Payload ID: 3636
  Gene Symbol: CCDC106
  Gene Name: coiled-coil domain containing 106
  Uniprot ID: Q9BWC9
  ENST ID: ENST00000591578
  CDS Start-End: 335-1177
atgggcgccgccgccgtcggtccccgagccggattccgcgagcgggagcccacgtccccagctcacttctcccccaggacctaggcggctgggccccctgcccctgactccaggagcccaggagtttgaagcccaggcgcgttttgcctcagtcctggggtccaggctccctcctccctcagaccaggggtccaggccagaaggtccctcctgtctcacttcacctcccccaggatggaccctccagtccatctgcgtctctccatttgtggctgccgtttctgtccagtgcccctgaggccctcggctgctggggtccgtaggaagccgcgccatgaatgaccggagcagtcggaggcggacaatgaaggacgatgagaccttcgagatctccattcccttcgatgaggcaccccacctagacccacagatcttttacagtctgagcccctctcggagaaacttcgaggagcctccggaggctgcgtcctccgccctggctctgatgaacagcgtcaagacccagctgcacatggctctggagaggaactcctggctgcagaagcgcatcgaggacctggaggaagagagggacttcctgcggtgccagctggacaaattcatctcttctgctcggatggaggcagaggaccactgccggatgaagcctgggcccaggcggatggagggggacagccgtggtggggctgggggcgaggcctcggaccctgagtcagcagcctcctccctcagcggagcgtccgaagaaggcagcgccagtgagaggaggcggcagaagcagaagggaggtgctagtcggaggcgctttgggaagcccaaggcccgggagaggcagcgagtgaaggacgccgacggggtcctctgccggtacaagaagatcctgggcaccttccagaagctcaagagcatgtcgcgggccttcgagcaccaccgcgtggacaggaacaccgtggcgctgaccacgcccatcgccgagctgctcattgtggcccccgagaagctggccgaggtgggcgagttcgacccctccaaggagcgcctgctcgagtactcccgccgctgctttctggccctggacgacgagacgctcaagaaggtgcaggcgctcaagaagagcaagctgctgctgcccatcacctaccgcttcaagcggtgatcgcaccacgcctccgcgcctccacccgggccttcctcccccgtggaccccggtggatgacctgcccctctccccgccgcgcccctgcccctcctcctcgctccctgggttgggggctcccttagccgggcccccaagcgcgacggccccggaccggccgcggccccttcccgaacgccggcacccccttccgcttgggctgcccagccctgtcctcgccgggccccttcctcctggaaaaccaggcaggcgggtgcccccccctcgagtgggggactgtacagaccccgtctccgccctggccccgcggaggagctgcccacctgattcccggacagacctccccaactccgcgtgagacagagaattattcagataatttaaattaaaaaacgacgtgaaaatttggaataaa

SEQ ID NO: 120670 - DNA, 626 bp, Homo sapiens
  Payload ID: 3636
  Gene Symbol: CCDC106
  Gene Name: coiled-coil domain containing 106
  ENST ID: ENST00000587213
  CDS Start-End: 510-626
ggggactcttcaacgaggggcgctagcctggcccgactgggcgagtccccgcgtccctgcccgttccgtcgctcagttccacgacacgctcccctgccgccccgcctgttcgcgggtgggtgggcgcttccctcggctccccgtgacactttgcagacgctccccggcgccgggcatgggcgccgccgccgtcggtccccgagccggattccgcgagcgggagcccacgtccccagctcacttctcccccaggacctaggcggctgggccccctgcccctgactccaggagcccaggagtttgaagcccaggcgcgttttgcctcagtcctggggtccaggctccctcctccctcagaccaggggtccaggccagaaggtccctcctgtctcacttcacctcccccaggatggaccctccagtccatctgcgtctctccatttgtggctgccgtttctgtccagtgcccctgaggccctcggctgctggggtccgtaggaagccgcgccatgaatgaccggagcagtcggaggcggacaatgaaggacgatgagaccttcgagatctccattcccttcgatgaggcaccccacctagacccacagatcttttacagtctgagcccc

SEQ ID NO: 120671 - DNA, 552 bp, Homo sapiens
  Payload ID: 3636
  Gene Symbol: CCDC106
  Gene Name: coiled-coil domain containing 106
  ENST ID: ENST00000593069
  CDS Start-End: 417-552
agaccctctgcttctgccgcaaacggcgggcctcacctggacccggggactcttcaacgaggggcgctagcctggcccgactgggcgagtccccgcgtccctgcccgttccgtcgctcagttccacgacacgctcccctgccgccccgcctgttcgcgggtgggtgggcgcttccctcggctccccgtgacactttgcagacgctccccggcgccgggcatgggcgccgccgccgtcggtccccgagccggattccgcgagcggaccaggggtccaggccagaaggtccctcctgtctcacttcacctcccccaggatggaccctccagtccatctgcgtctctccatttgtggctgccgtttctgtccagtgcccctgaggccctcggctgctggggtccgtaggaagccgcgccatgaatgaccggagcagtcggaggcggacaatgaaggacgatgagaccttcgagatctccattcccttcgatgaggcaccccacctagacccacagatcttttacagtctgagcccctctcggagaaacttcgagg

SEQ ID NO: 120672 - DNA, 1404 bp, Homo sapiens
  Payload ID: 3636
  Gene Symbol: CCDC106
  Gene Name: coiled-coil domain containing 106
  Uniprot ID: Q9BWC9
  ENST ID: ENST00000588740
  CDS Start-End: 147-989
atgggcgccgccgccgtcggtccccgagccggattccgcgagcgggatggaccctccagtccatctgcgtctctccatttgtggctgccgtttctgtccagtgcccctgaggccctcggctgctggggtccgtaggaagccgcgccatgaatgaccggagcagtcggaggcggacaatgaaggacgatgagaccttcgagatctccattcccttcgatgaggcaccccacctagacccacagatcttttacagtctgagcccctctcggagaaacttcgaggagcctccggaggctgcgtcctccgccctggctctgatgaacagcgtcaagacccagctgcacatggctctggagaggaactcctggctgcagaagcgcatcgaggacctggaggaagagagggacttcctgcggtgccagctggacaaattcatctcttctgctcggatggaggcagaggaccactgccggatgaagcctgggcccaggcggatggagggggacagccgtggtggggctgggggcgaggcctcggaccctgagtcagcagcctcctccctcagcggagcgtccgaagaaggcagcgccagtgagaggaggcggcagaagcagaagggaggtgctagtcggaggcgctttgggaagcccaaggcccgggagaggcagcgagtgaaggacgccgacggggtcctctgccggtacaagaagatcctgggcaccttccagaagctcaagagcatgtcgcgggccttcgagcaccaccgcgtggacaggaacaccgtggcgctgaccacgcccatcgccgagctgctcattgtggcccccgagaagctggccgaggtgggcgagttcgacccctccaaggagcgcctgctcgagtactcccgccgctgctttctggccctggacgacgagacgctcaagaaggtgcaggcgctcaagaagagcaagctgctgctgcccatcacctaccgcttcaagcggtgatcgcaccacgcctccgcgcctccacccgggccttcctcccccgtggaccccggtggatgacctgcccctctccccgccgcgcccctgcccctcctcctcgctccctgggttgggggctcccttagccgggcccccaagcgcgacggccccggaccggccgcggccccttcccgaacgccggcacccccttccgcttgggctgcccagccctgtcctcgccgggccccttcctcctggaaaaccaggcaggcgggtgcccccccctcgagtgggggactgtacagaccccgtctccgccctggccccgcggaggagctgcccacctgattcccggacagacctccccaactccgcgtgagacagagaattattcagataatttaaattaaaaaacgacgtgaaaatttggaataaa

SEQ ID NO: 120673 - DNA, 804 bp, Homo sapiens
  Payload ID: 3637
  Gene Symbol: CCDC107
  Gene Name: coiled-coil domain containing 107
  Uniprot ID: Q8WV48
  ENST ID: ENST00000327351
  CDS Start-End: 64-531
cggccggccaatgccggaccgcttcggcaccgcccgcccgatccctccacccgtgggccggcaatggcgggcgcagtttcgctcttgggtgtggtggggctgctgcttgtgtctgcgctgtccggggtcctaggagaccgcgccaatcccgacctccgggcacacccagggaacgcagcccaccccggctctggagccacggaaccccggcggcgaccaccgctcaaggatcaacgcgagcggacccgggccgggtcgctgcctctgggggcgctgtacaccgcggccgtcgcggcttttgtgctgtacaagtgtttgcaggggaaagatgaaactgcggttctccacgaggaggcaagcaagcagcagccactgcagtcagagcaacagctggcccagttgacacaacagctggcccagacagagcagcacctgaacaacctgatggcccagctggaccccctttttgagcgcccagcaggagcttctgaacatgaagctatggaccatccacgagctgctgcaagatagcaagccggacaaggatatggaggcttcagaaccagaggccagcagacctcttcctgaggacttctgtttaaaggaggacgaggaggagattggtgacagtcaggcctgggaggagcccacaaactggagcacagagacatggaacctagctacttcctgggaggtggggcggggactacggagaaggtgcagccaggctgtggcaaagggccccagtcacagccttggctgggaaggagggacgacagctgaaggtcgactaaaacaaagtct

SEQ ID NO: 120674 - DNA, 1016 bp, Homo sapiens
  Payload ID: 3637
  Gene Symbol: CCDC107
  Gene Name: coiled-coil domain containing 107
  ENST ID: ENST00000378406
  CDS Start-End: 67-480
gggcggccggccaatgccggaccgcttcggcaccgcccgcccgatccctccacccgtgggccggcaatggcgggcgcagtttcgctcttgggtgtggtggggctgctgcttgtgtctgcgctgtccggggtcctaggagaccgcgccaatcccgacctccgggcacacccagggaacgcagcccaccccggctctggagccacggaaccccggcggcgaccaccgctcaaggatcaacgcgagcggacccgggccgggtcgctgcctctgggggcgctgtacaccgcggccgtcgcggcttttgtgctgtacaagtgtttgcaggggaaagatgaaactgcggttctccacgaggaggcaagcaagcagcagccactgcagtcagagcaacagctggcccagttgacacaacagctggcccagacagagcagcacctgaacaacctgatggcccagctggaccccctttttgagcggtgaggagagcaatgattctgtgaatttttggggaatttgtggcaggagggaggaatggggacataggttgggagccactgagtggacatttcttcagtgtgactactctggctggagcccagcaggagcttctgaacatgaagctatggaccatccacgagctgctgcaagatagcaagccggacaaggatatggaggcttcagaaccaggtgaaggctcgggaggcgagtctgctggaggtggagacaaagtctctgaaactggaacattcctgatctctccccacacagaggccagcagacctcttcctgaggacttctgtttaaaggaggacgaggaggagattggtgacagtcaggcctgggaggagcccacaaactggagcacagagacatggaacctagctacttcctgggaggtggggcggggactacggagaaggtgcagccaggctgtggcaaagggccccagtcacagccttggctgggaaggagggacgacagctgaaggtcgactaaaacaaagtctgttttcatga

SEQ ID NO: 120675 - DNA, 899 bp, Homo sapiens
  Payload ID: 3637
  Gene Symbol: CCDC107
  Gene Name: coiled-coil domain containing 107
  Uniprot ID: Q8WV48
  ENST ID: ENST00000378407
  CDS Start-End: 77-496
gtgcgcgttggggcggccggccaatgccggaccgcttcggcaccgcccgcccgatccctccacccgtgggccggcaatggcgggcgcagtttcgctcttgggtgtggtggggctgctgcttgtgtctgcgctgtccggggtcctaggagaccgcgccaatcccgacctccgggcacacccagggaacgcagcccaccccggctctggagccacggaaccccggcggcgaccaccgctcaaggatcaacgcgagcggacccgggccgggtcgctgcctctgggggcgctgtacaccgcggccgtcgcggcttttgtgctgtacaagtgtttgcaggggaaagatgaaactgcggttctccacgaggaggcaagcaagcagcagccactgcagtcagagcaacagctggcccagttgacacaacagctggcccagacagagcagcacctgaacaacctgatggcccagctggaccccctttttgagcggagcttctgaacatgaagctatggaccatccacgagctgctgcaagatagcaagccggacaaggatatggaggcttcagaaccaggtgaaggctcgggaggcgagtctgctggaggtggagacaaagtctctgaaactggaacattcctgatctctccccacacagaggccagcagacctcttcctgaggacttctgtttaaaggaggacgaggaggagattggtgacagtcaggcctgggaggagcccacaaactggagcacagagacatggaacctagctacttcctgggaggtggggcggggactacggagaaggtgcagccaggctgtggcaaagggccccagtcacagccttggctgggaaggagggacgacagctgaaggtcgactaaaacaaagtctgttttcatg

SEQ ID NO: 120676 - DNA, 1173 bp, Homo sapiens
  Payload ID: 3637
  Gene Symbol: CCDC107
  Gene Name: coiled-coil domain containing 107
  Uniprot ID: Q8WV48
  ENST ID: ENST00000378409
  CDS Start-End: 91-861
ctgctcgcgtgcgcgtgcgcgttggggcggccggccaatgccggaccgcttcggcaccgcccgcccgatccctccacccgtgggccggcaatggcgggcgcagtttcgctcttgggtgtggtggggctgctgcttgtgtctgcgctgtccggggtcctaggagaccgcgccaatcccgacctccgggcacacccagggaacgcagcccaccccggctctggagccacggaaccccggcggcgaccaccgctcaaggatcaacgcgagcggacccgggccgggtcgctgcctctgggggcgctgtacaccgcggccgtcgcggcttttgtgctgtacaagtgtttgcaggggaaagatgaaactgcggttctccacgaggaggcaagcaagcagcagccactgcagtcagagcaacagctggcccagttgacacaacagctggcccagacagagcagcacctgaacaacctgatggcccagctggaccccctttttgagcgtgtgactactctggctggagcccagcaggagcttctgaacatgaagctatggaccatccacgagctgctgcaagatagcaagccggacaaggatatggaggcttcagaaccagaggccagcagacctcttcctgaggacttctgtttaaaggaggacgaggaggagattggtgacagtcaggcctgggaggagcccacaaactggagcacagagacatggaacctagctacttcctgggaggtggggcggggactacggagaaggtgcagccaggctgtggcaaagggccccagtcacagccttggctgggaaggagggacgacagctgaaggtcgactaaaacaaagtctgttttcatgatggagtgctcctgtgtgttttttcgatcctagttggttgtacacacccatactaggtgcctaaggacaactgggccttcttgaagagctgtccttattaggacaaaaagaggctgccttccagtgtgacagcagagaagatagagggagctccagctcttttcctcgtattcctgaggccaccagcatgcccgcgttcagggcccaaaaatcccttttctcatagcaaaactgagacagaagggtctttcccaaaaaaaagaaaaaaaactttactcaaatccagtggaaaaataaatgatagaaactatac

SEQ ID NO: 120677 - DNA, 1324 bp, Homo sapiens
  Payload ID: 3637
  Gene Symbol: CCDC107
  Gene Name: coiled-coil domain containing 107
  Uniprot ID: Q8WV48
  ENST ID: ENST00000421582
  CDS Start-End: 64-423
cggccggccaatgccggaccgcttcggcaccgcccgcccgatccctccacccgtgggccggcaatggcgggcgcagtttcgctcttgggtgtggtggggctgctgcttgtgtctgcgctgtccggggtcctaggagaccgcgccaatcccgacctccgggcacacccagggaacgcagcccaccccggctctggagccacggaaccccggcggcgaccaccgctcaaggatcaacgcgagcggacccgggccgggtcgctgcctctgggggcgctgtacaccgcggccgtcgcggcttttgtgctgtacaagtgtttgcaggggaaagatgaaactgcggttctccacgaggaggcaagcaagcagcagccactgcagtcaggtgggtttagcagaagtctgtgctgggtcgggggagtttaggggacagcagaagatacataaccacttctgcccccttttttcccttatccccagagcaacagctggcccagttgacacaacagctggcccagacagagcagcacctgaacaacctgatggcccagctggaccccctttttgagcggtgaggagagcaatgattctgtgaatttttggggaatttgtggcaggagggaggaatggggacataggttgggagccactgagtggacatttcttcagtgtgactactctggctggagcccagcaggagcttctgaacatgaagctatggaccatccacgagctgctgcaagatagcaagccggacaaggatatggaggcttcagaaccaggtgaaggctcgggaggcgagtctgctggaggtggagacaaagtctctgaaactggaacattcctgatctctccccacacagaggccagcagacctcttcctgaggacttctgtttaaaggaggacgaggaggagattggtgacagtcaggcctgggaggagcccacaaactggagcacagagacatggaacctagctacttcctgggaggtggggcggggactacggagaaggtgcagccaggctgtggcaaagggccccagtcacagccttggctgggaaggagggacgacagctgaaggtcgactaaaacaaagtctgttttcatgatggagtgctcctgtgtgttttttcgatcctagttggttgtacacacccatactaggtgcctaaggacaactgggccttcttgaagagctgtccttattaggacaaaaagaggctgccttccagtgtgacagcagagaagatagagggagctccagctcttttcctcgtattcctgaggccaccagcatgcccgcgttcagggcccaaaaatccctt

SEQ ID NO: 120678 - DNA, 1242 bp, Homo sapiens
  Payload ID: 3637
  Gene Symbol: CCDC107
  Gene Name: coiled-coil domain containing 107
  Uniprot ID: Q8WV48
  ENST ID: ENST00000426546
  CDS Start-End: 67-918
gggcggccggccaatgccggaccgcttcggcaccgcccgcccgatccctccacccgtgggccggcaatggcgggcgcagtttcgctcttgggtgtggtggggctgctgcttgtgtctgcgctgtccggggtcctaggagaccgcgccaatcccgacctccgggcacacccagggaacgcagcccaccccggctctggagccacggaaccccggcggcgaccaccgctcaaggatcaacgcgagcggacccgggccgggtcgctgcctctgggggcgctgtacaccgcggccgtcgcggcttttgtgctgtacaagtgtttgcaggggaaagatgaaactgcggttctccacgaggaggcaagcaagcagcagccactgcagtcagagcaacagctggcccagttgacacaacagctggcccagacagagcagcacctgaacaacctgatggcccagctggaccccctttttgagcgtgtgactactctggctggagcccagcaggagcttctgaacatgaagctatggaccatccacgagctgctgcaagatagcaagccggacaaggatatggaggcttcagaaccaggtgaaggctcgggaggcgagtctgctggaggtggagacaaagtctctgaaactggaacattcctgatctctccccacacagaggccagcagacctcttcctgaggacttctgtttaaaggaggacgaggaggagattggtgacagtcaggcctgggaggagcccacaaactggagcacagagacatggaacctagctacttcctgggaggtggggcggggactacggagaaggtgcagccaggctgtggcaaagggccccagtcacagccttggctgggaaggagggacgacagctgaaggtcgactaaaacaaagtctgttttcatgatggagtgctcctgtgtgttttttcgatcctagttggttgtacacacccatactaggtgcctaaggacaactgggccttcttgaagagctgtccttattaggacaaaaagaggctgccttccagtgtgacagcagagaagatagagggagctccagctcttttcctcgtattcctgaggccaccagcatgcccgcgttcagggcccaaaaatcccttttctcatagcaaaactgagacagaagggtctttcccaaaaaaaagaaaaaaaactttactcaaatccagtggaaaaataaatgatagaaactatacacaacataaaaa

SEQ ID NO: 120679 - DNA, 2259 bp, Homo sapiens
  Payload ID: 3638
  Gene Symbol: CCDC108
  Gene Name: coiled-coil domain containing 108
  Uniprot ID: Q6ZU64
  ENST ID: ENST00000295729
  CDS Start-End: 125-619
gtcctgtatctatggagacggcaatatggaggcgatcttacatttctttgatttcatctgaacgtccagttcacaattggagctccatactcagagtgctccctttggactgtgtcccaaggacatgatgctcacccaggctccaagctccgtcgtgaggtccaggaacagcaggaaccacaccgtgaactctggtggatcctgcctgagtgccagcacagtggccatccctgccatcaacgacagcagtgcagccatgagtgcctgcagcaccatcagcgcccagcccgcaagctccatggacactcagatgcactccccaaagaagcaggagagagtgaacaagagggtcatctggggcattgaggtggctgaggagctgcattggaaaggctgggagctaggaaaggagaccacaaggaatctggttctgaaaaatcgatccttgaaactccagaagatgaagtacaggtaccagtataagggatcaaggacccagtgccacagccttgagccccgaaagcaggctctcttcaaaacaaaacaaaacaaacaaaaaaaacctttaacatgccatataaaagccagtgagtgtttaaaatacgtgcagtatgaataattatgcagctataatccattatttttcattgtggtatagtgtcccaatgtgtgcctgtaccataatgtattcatccagaatgaaggaagtttgggctgtttctatttgggactgttggcattcgtgtatatgtgtccagttacataagtacaagagtttttctggggaataccaggtactatgaaggctcacgtgattttggagtcttatgaaggttttttttttttttttcctgcgtagttgttaaattggtgaccttgcgggatggaaccttctattccaccaccttgctccaccttctgtcttttctggggaatagacgcaggagtagaattgcggaggcttgggccatgtacctgttcacttgctgtagataaaccaaactatttcccaaagtgcatggatttctttagacacccaccagcagcattagagagttcccattcctccacatccttaccaataactgctattgtcagaatttaaaatttttgccagtaatggtaacttgtggttttaatttgcatttccctgattactaatgaatgaggatgagtgtctttttgtaggttattgacactttgcatttcttcatgtgtgaaatttatgatcaagtctgtggccatttttctcttacattatcttgtcttttttctttttggtataagttcttatcccaattacaaactctttgccagttatgcgttgtggatatcttctctcatcttatgatttgtctttactccctttattgtgtcttttgaagaataaaagttcaaagttgaattttaaaggtatcaactttatcagtctttttattttatgattggtgcttttttatgcttctcctaagaagtccttctctacccctaggtcattaagatattttcctctagtatcttctaaagactttatatttttgccttttatatttgtcttttgtctatatggaattgatttttatgaatagtaagtcttgatagctggtagtatacgtcctcctacttaattcttcttcaagattgtcttggctattcttggccctccctttgatctcttacataaatattcaaatcagcttatcatacatgcacataaaacacttcttgagattttgattgggatttaattggacctatagatgaatatgaggagaaatgatatcattataatattgagtcttttactccatgaacatgggctatttctgtattcattaggttatctttcctgtctctcaatagagtgtaaagttttctccatagacatttagcacatccttagttagatttattcataagtattttatatttttgctgttgttatatatgacatattttttagttgttttatttctgtttgttgctagtttttaaaatgtcatttttatataggtattatgttcagtgatcttggcaaatcctcttattctaataatttatttgttaattttcttgttttttcatgcacacatttgtattttaaatggaaaatgacatttttttttctttctagtccttacacctttggctttccttactgcattgttaaatagaaaagtgttgaacagaagtggttatagaggcatctttgttttgtttatcatctcagagtaaaggactgcaatgtttcactattaa

SEQ ID NO: 120680 - DNA, 5953 bp, Homo sapiens
  Payload ID: 3638
  Gene Symbol: CCDC108
  Gene Name: coiled-coil domain containing 108
  Uniprot ID: Q6ZU64
  ENST ID: ENST00000341552
  CDS Start-End: 85-5862
gtcctgtatctatggagacggcaatatggaggcgatcttacatttctttgatttcatctgaacgtccagttcacaattggagtgatgtttaccttaaccggttgtagactggtggagaaaacccagaaggtggagaatccatcagtctcatttgcctcttctttcccccttattcctcttctcctaagaggcaagagtgttcagaagaaacaagcagagagtaaaagccagataaagctccatactcagagtgctccctttggactgtgtcccaaggacatgatgctcacccaggctccaagctccgtcgtgaggtccaggaacagcaggaaccacaccgtgaactctggtggatcctgcctgagtgccagcacagtggccatccctgccatcaacgacagcagtgcagccatgagtgcctgcagcaccatcagcgcccagcccgcaagctccatggacactcagatgcactccccaaagaagcaggagagagtgaacaagagggtcatctggggcattgaggtggctgaggagctgcattggaaaggctgggagctaggaaaggagaccacaaggaatctggttctgaaaaatcgatccttgaaactccagaagatgaagtacaggccccccaagaccaagttcttcttcacggtcatccctcagcccatcttcctgagcccaggcataaccctcacgctccccatcgtcttccggcctctggaggcgaaggagtacatggaccagctgtggtttgagaaagcggaggggatgttctgtgtcggcctacgggccaccctgccctgccacaggctgatctgccgcccaccatccctgcagctgcccatgtgtgctgtgggagatacgactgaggcctttttctgcctggataatgtgggggacctgcccaccttcttcacctgggagttctccagcccattccagatgctgcccgccacggggctcctggagccaggccaggcctctcagatcaaggtgacctttcagccccttacagccgtcatctacgaggtgcaggccacgtgctggtacggggcgggcagccggcagaggagcagcatccagctgcaggctgtggccaagtgcgcccagctgctggtgagcataaagcacaagtgcccggaggaccaggatgccgagggcttccagaagctgttgtactttggctctgttgctgtgggctgcacctcggagaggcagatcaggctacacaacccgtcggcggtaaatgcccccttcaggattgaaatttccccggatgaactggccgaagaccaggccttctcatgccccacggcccatggcatcgtgcttccgggagagaagaaatgtgtgtcggtgttcttccaccccaagactctggacaccagaactgtggactactgctccatcatgccttctggctgtgcctccaagaccctgcttaaagtcgttggtttctgtagaggccctgctgtgtccctgcagcactactgtgtcaacttcagctgggtcaaccttggggagcgctccgagcagcccctgtggattgagaaccaatcggactgcacggcccacttccagtttgccatcgactgcttggagagtgtctttaccatcaggcctgcctttgggacgctggtgggcaaggcccgtatgaccctgcactgtgccttccagcccactcaccccatcatctgctttcggcgtgtggcctgtctcatccaccaccaggacccactgttcctggacctgatggggacctgccactcggacagcaccaagccagccatcctgaagcctcagcacctcacctggtaccgcacacacctggcccggggcctgacgctctacccccctgacatcctggatgccatgctgaaggagaagaagctggcacaggaccagaacggggctctcatgattcccatccaggatctggaggacatgccggccccgcagtacccttatatcccccccatgaccgagttcttcttcgacggcaccagcgacataaccatcttccccccgcccatcagtgtagagcctgtcgaggtagacttcggtgcctgcccagggcctgaggcccccaaccctgtacccctgtgcctgatgaaccacaccaagggcaagatcatggtggtctggacgcgaaggtctgactgccccttctgggtgactccagagagctgcgacgtgcccccactcaagtccatggccatgcgcctgcacttccagccgcctcaccccaactgcctttacacggtggagctcgaagccttcgccatctataaggtcctgcagagctacagtaatattgaggaggactgcaccatgtgcccatcctggtgcctgacggtgcgggcacgaggccacagctatttcgctggctttgagcaccacatcccccagtattccctagatgtccccaagctatttccagcagtgtcctccggtgagcccacctaccgcagcctgctcctggtcaacaaagactgcaagctgctgaccttcagcctggccccccagagaggctcagacgtcatccttcggcccacttcgggccttgtggcacccggggcccaccagatcatcctcatctgcacctaccctgagggcagctcctggaagcagcacactttctatctgcagtgcaatgcttccccccagtatctcaaggaggtgagcatgtacagccgggaggagccactgcagctgaagctggacacccacaaaagcctctacttcaagcccacctgggtgggctgctcctccaccagccccttcaccttccgcaacccctcgcgtctgcccctgcagttcgagtggagggtctctgagcagcatcgaaagctgctggctgtccagccctccagggggctaatccagcccaacgagagacttacgctgacgtggaccttcagccctttggaggagaccaagtacctgttccaagtggggatgtgggtctgggaagccggcctgtccccaaatgccaaccccgctgccaccacccactacatgctccggctggtgggcgttgggctcaccagcagcctctctgcaaaggaaaaggagctggcctttgggaatgtgctggtgaacagcaagcagtccaggttccttgtcctcctgaatgacggcaactgcaccctctattaccgcctctacctggagcagggcagccctgaggccgttgacaaccaccccctcgctctgcagctggaccgaacagaggggagcatgccaccccggtcccaggacaccatctgcctgactgcctgtcccaagcagcggtcccagtactcctggaccatcacctactctctcctttcccacagagataacaaggctggggagaagcaggagctgtgctgcgtctccctggtggccgtgtaccccttgctttccatcctggatgtcagctccatgggcagtgctgagggtatcacccggaagcacctgtggcgcctcttctctctggacctgcttaacagttacttggagcgtgaccccaccccctgtgagctcacctacaaggtgcccacccggcacagcatgagccagatcccccccgtcctcacccctttaaggcttgacttcaatttcggggccgcaccattcaaggccccaccttccgtggtattcctggccctgaagaacagcggagtggtgtccctggactgggccttcctccttccaagtgaccagcggattgacgtggagctctgggcagagcaagcagagttgaattccactgagctccaccagatgcgcgtgcaggacaattgcctcttctccatcagccccaaggctgggagcctgagtcctgggcaggagcagatggtggagttaaaatacagccacctgttcatcggtactgatcacctcccagtgctcttcaaggtgtcccatggccgggagatcctgctaaatttcataggtgtgacagtgaagccggagcagaagtatgtgcacttcacctctactacccaccagttcatccccattcccattggtgacacgctacccccacggcagatttatgagctgtataatggtggctcagtgcccgtgacatatgaggtccagaccgatgtcctgtcacaggttcaggaaaaaaattttgatcaccccatcttttgctgcctcaaccccaaaggggagatccagccaggcagcactgcccgggtcttgtggatcttctcacctatcgaggccaagacctacacggtggacgtgcccatacacatcctgggatggaactcggccctcatccacttccagggagtgggctacaacccccatatgatgggggacacagccccattccacaacatctcctcgtgggacaacagttccatacactctaggctggtggtgcctggacagaatgtcttcctgtcccagtctcatatttccctgggaaacatacctgtgcagagcaagtgcagccgcctgctcttcctcaacaacatctccaagaacgaggaaattgccttctcctggcagccaagtcctctagattttggggaggtgtctgtgagtcccatgataggggtggtggctcctgaagagacggtcccatttgtggtgaccttgagggcctctgtgcatgccagcttctacagtgcagacctggtatgcaagctgtactcgcagcagctcatgaggcagtatcacaaggagctgcaggagtggaaggacgagaaggtgcggcaggaagtggagttcaccatcaccgacatgaaagtgaagaagagaacatgctgcacagcctgtgaacctgcgaggaagtacaagacactgcctcccatcaagaaccagcagtctgtcagccggcctgccagctggaaactgcagaccccaaaggaggaggtgtcctggccctgcccccagccaccctcgccaggcatgctctgcctgggccttactgcccgagcccatgccaccgactactttctggctaacttcttctcagagtttccctgccactttttgcaccgggagctgccaaagaggaaggcccccagggaagagtcagagacttctgaggaaaaatcccctaacaagtggggccctgtttccaagcagaagaagcagctcctggttgacattctcaccacaataatcaggggcctgctggaagacaagaacttccatgaggctgtggaccaaagcctggtggagcaggtgccgtacttccgccaattctggaatgagcagtcaactaagttcatggaccagaaaaacagcctgtacttaatgccaatcctgcctgtaccctccagcagctgggaggatgggaagggcaagcagccgaaggaagacagaccagagcactatccagggttgggaaagaaggaagagggggaggaggagaagggtgaagaggaagaagaagagttggaggaggaagaggaggaagaagaggagacagaagaggaggagttgggcaaggaggagatagaggagaaggaggaggagagggatgagaaggaagagaaagtgagctgggcgggcatcgggcccacaccacagcctgagtcccaggagtccatgcaatggcagtggcaacagcagctgaatgtcatggtgaaggaggagcaagaacaggacgagaaggaggccatcagaaggctcccggccttcgccaacctgcaggaggcgctgctggagaacatgatccagaacatcctggtggaggcgagccgcggggaggtggtactcacctcgcggccacgcgtcatcgccctgccgccgttctgcgtgcccaggagtctgaccccggacacgctgctgccgacgcagcaagcagaggtactccacccggtggtgccacttcctaccgaccttccgtaaatgcccgcgcccagcctctccgacatgccgctaggggtcacgcctggccccctctccaccgccagtaaaagcatctagtcttttttctgta

SEQ ID NO: 120681 - DNA, 2703 bp, Homo sapiens
  Payload ID: 3638
  Gene Symbol: CCDC108
  Gene Name: coiled-coil domain containing 108
  Uniprot ID: Q6ZU64
  ENST ID: ENST00000410037
  CDS Start-End: 118-2310
atctatggagacggcaatatggaggcgatcttacatttctttgatttcatctgaacgtccagttcacaattggagctccatactcagagtgctccctttggactgtgtcccaaggacatgatgctcacccaggctccaagctccgtcgtgaggtccaggaacagcaggaaccacaccgtgaactctggtggatcctgcctgagtgccagcacagtggccatccctgccatcaacgacagcagtgcagccatgagtgcctgcagcaccatcagcgcccagcccgcaagctccatggacactcagatgcactccccaaagaagcaggagagagtgaacaagagggtcatctggggcattgaggtggctgaggagctgcattggaaaggctgggagctaggaaaggagaccacaaggaatctggttctgaaaaatcgatccttgaaactccagaagatgaagtacaggccccccaagaccaagttcttcttcacggtcatccctcagcccatcttcctgagcccaggcataaccctcacgctccccatcgtcttccggcctctggaggcgaaggagtacatggaccagctgtggtttgagaaagcggaggggatgttctgtgtcggcctacgggccaccctgccctgccacaggctgatctgccgcccaccatccctgcagctgcccatgtgtgctgtgggagatacgactgaggcctttttctgcctggataatgtgggggacctgcccaccttcttcacctgggagttctccagcccattccagatgctgcccgccacggggctcctggagccaggccaggcctctcagatcaaggtgacctttcagccccttacagccgtcatctacgaggtgcaggccacgtgctggtacggggcgggcagccggcagaggagcagcatccagctgcaggctgtggccaagtgcgcccagctgctggtgagcataaagcacaagtgcccggaggaccaggatgccgagggcttccagaagctgttgtactttggctctgttgctgtgggctgcacctcggagaggcagatcaggctacacaacccgtcggcggtaaatgcccccttcaggattgaaatttccccggatgaactggccgaagaccaggccttctcatgccccacggcccatggcatcgtgcttccgggagagaagaaatgtgtgtcggtgttcttccaccccaagactctggacaccagaactgtggactactgctccatcatgccttctggctgtgcctccaagaccctgcttaaagtcgttggtttctgtagaggccctgctgtgtccctgcagcactactgtgtcaacttcagctgggtcaaccttggggagcgctccgagcagcccctgtggattgagaaccaatcggactgcacggcccacttccagtttgccatcgactgcttggagagtgtctttaccatcaggcctgcctttgggacgctggtgggcaaggcccgtatgaccctgcactgtgccttccagcccactcaccccatcatctgctttcggcgtgtggcctgtctcatccaccaccaggacccactgttcctggacctgatggggacctgccactcggacagcaccaagccagccatcctgaagcctcagcacctcacctggtaccgcacacacctggcccggggcctgacgctctacccccctgacatcctggatgccatgctgaaggagaagaagctggcacaggaccagaacggggctctcatgattcccatccaggatctggaggacatgccggccccgcagtacccttatatcccccccatgaccgagttcttcttcgacggcaccagcgacataaccatcttccccccgcccatcagtgtagagcctgtcgaggtagacttcggtgcctgcccagggcctgaggcccccaaccctgtacccctgtgcctgatgaaccacaccaagggcaagatcatggtggtctggacgcgaaggtctgactgccccttctgggtgactccagagagctgcgacgtgcccccactcaagtccatggccatgcgcctgcacttccagccgcctcaccccaactgcctttacacggtggagctcgaagccttcgccatctataaggtgtgtgcacgcaatgagagggaggaatgcggggtctctgctaggagcctgagtggcttggtggggtggcaggaagtgaccgagggcagcttcaggctccatcctctgcgtgccaggctttctcttggctggacagtgacccctatgagtttgtctcctccaaagctcctggcctagctcggcccatctgattttctcattcttatgtaagtctcccctcccctccaagggagaactcagctgagatcaagctgtttgggaaaactgggtgcacagggagatactccctggggctcctggctaggaggcctcctagcttctctactagtccttgaattaagaagtggtcactctaaaggagctttgagcgggcaggaagctgggcctagagacaaagtcagcagcaccagataattgtgatggaaagggcttctgactcagcttccctgggtcgggaactccgagtgccggctgtccccagccctgctgttctggccccagatgcgtggtgccccctcctcatccgttagtcctgcccatcccttccttcttgactctgcccaccccact

SEQ ID NO: 120682 - DNA, 2769 bp, Homo sapiens
  Payload ID: 3638
  Gene Symbol: CCDC108
  Gene Name: coiled-coil domain containing 108
  Uniprot ID: Q6ZU64
  ENST ID: ENST00000409865
  CDS Start-End: 5-2359
atctatggagacggcaatatggaggcgatcttacatttctttgatttcatctgaacgtccagttcacaattggagaggcaagagtgttcagaagaaacaagcagagagtaaaagccagataaagctccatactcagagtgctccctttggactgtgtcccaaggacatgatgctcacccaggctccaagctccgtcgtgaggtccaggaacagcaggaaccacaccgtgaactctggtggatcctgcctgagtgccagcacagtggccatccctgccatcaacgacagcagtgcagccatgagtgcctgcagcaccatcagcgcccagcccgcaagctccatggacactcagatgcactccccaaagaagcaggagagagtgaacaagagggtcatctggggcattgaggtggctgaggagctgcattggaaaggctgggagctaggaaaggagaccacaaggaatctggttctgaaaaatcgatccttgaaactccagaagatgaagtacaggccccccaagaccaagttcttcttcacggtcatccctcagcccatcttcctgagcccaggcataaccctcacgctccccatcgtcttccggcctctggaggcgaaggagtacatggaccagctgtggtttgagaaagcggaggggatgttctgtgtcggcctacgggccaccctgccctgccacaggctgatctgccgcccaccatccctgcagctgcccatgtgtgctgtgggagatacgactgaggcctttttctgcctggataatgtgggggacctgcccaccttcttcacctgggagttctccagcccattccagatgctgcccgccacggggctcctggagccaggccaggcctctcagatcaaggtgacctttcagccccttacagccgtcatctacgaggtgcaggccacgtgctggtacggggcgggcagccggcagaggagcagcatccagctgcaggctgtggccaagtgcgcccagctgctggtgagcataaagcacaagtgcccggaggaccaggatgccgagggcttccagaagctgttgtactttggctctgttgctgtgggctgcacctcggagaggcagatcaggctacacaacccgtcggcggtaaatgcccccttcaggattgaaatttccccggatgaactggccgaagaccaggccttctcatgccccacggcccatggcatcgtgcttccgggagagaagaaatgtgtgtcggtgttcttccaccccaagactctggacaccagaactgtggactactgctccatcatgccttctggctgtgcctccaagaccctgcttaaagtcgttggtttctgtagaggccctgctgtgtccctgcagcactactgtgtcaacttcagctgggtcaaccttggggagcgctccgagcagcccctgtggattgagaaccaatcggactgcacggcccacttccagtttgccatcgactgcttggagagtgtctttaccatcaggcctgcctttgggacgctggtgggcaaggcccgtatgaccctgcactgtgccttccagcccactcaccccatcatctgctttcggcgtgtggcctgtctcatccaccaccaggacccactgttcctggacctgatggggacctgccactcggacagcaccaagccagccatcctgaagcctcagcacctcacctggtaccgcacacacctggcccggggcctgacgctctacccccctgacatcctggatgccatgctgaaggagaagaagctggcacaggaccagaacggggctctcatgattcccatccaggatctggaggacatgccggccccgcagtacccttatatcccccccatgaccgagttcttcttcgacggcaccagcgacataaccatcttccccccgcccatcagtgtagagcctgtcgaggtagacttcggtgcctgcccagggcctgaggcccccaaccctgtacccctgtgcctgatgaaccacaccaagggcaagatcatggtggtctggacgcgaaggtctgactgccccttctgggtgactccagagagctgcgacgtgcccccactcaagtccatggccatgcgcctgcacttccagccgcctcaccccaactgcctttacacggtggagctcgaagccttcgccatctataaggtgtgtgcacgcaatgagagggaggaatgcggggtctctgctaggagcctgagtggcttggtggggtggcaggaagtgaccgagggcagcttcaggctccatcctctgcgtgccaggctttctcttggctggacagtgacccctatgagtttgtctcctccaaagctcctggcctagctcggcccatctgattttctcattcttatgtaagtctcccctcccctccaagggagaactcagctgagatcaagctgtttgggaaaactgggtgcacagggagatactccctggggctcctggctaggaggcctcctagcttctctactagtccttgaattaagaagtggtcactctaaaggagctttgagcgggcaggaagctgggcctagagacaaagtcagcagcaccagataattgtgatggaaagggcttctgactcagcttccctgggtcgggaactccgagtgccggctgtccccagccctgctgttctggccccagatgcgtggtgccccctcctcatccgttagtcctgcccatcccttccttcttgactctgcccaccccactgcccttgcccagaggcc

SEQ ID NO: 120683 - DNA, 707 bp, Homo sapiens
  Payload ID: 3638
  Gene Symbol: CCDC108
  Gene Name: coiled-coil domain containing 108
  ENST ID: ENST00000457968
  CDS Start-End: 5-707
atctatggagacggcaatatggaggcgatcttacatttctttgatttcatctgaacgtccagttcacaattggagaggcaagagtgttcagaagaaacaagcagagagtaaaagccagataaagctccatactcagagtgctccctttggactgtgtcccaaggacatgatgctcacccaggctccaagctccgtcgtgaggtccaggaacagcaggaaccacaccgtgaactctggtggatcctgcctgagtgccagcacagtggccatccctgccatcaacgacagcagtgcagccatgagtgcctgcagcaccatcagcgcccagcccgcaagctccatggacactcagatgcactccccaaagaagcaggagagagtgaacaagagggtcatctggggcattgaggtggctgaggagctgcattggaaaggctgggagctaggaaaggagaccacaaggaatctggttctgaaaaatcgatccttgaaactccagaagatgaagtacaggccccccaagaccaagttcttcttcacggtcatccctcagcccatcttcctgagcccaggcataaccctcacgctccccatcgtcttccggcctctggaggcgccccttacagccgtcatctacgaggtgcaggccacgtgctggtacggggcgggcagccggcagaggagcagcatccagctgcaggctgtgg

SEQ ID NO: 120684 - DNA, 1123 bp, Homo sapiens
  Payload ID: 3638
  Gene Symbol: CCDC108
  Gene Name: coiled-coil domain containing 108
  ENST ID: ENST00000413871
  CDS Start-End: 1-383
agaagcaggagctgtgctgcgtctccctggtggccgtgtaccccttgctttccatcctggatgtcagctccatgggcagtgctgagggtatcacccggaagcacctgtggcgcctcttctctctggacctgcttaacagttacttggagcgtgaccccaccccctgtgagctcacctacaaggtgcccacccggcacagcatgagccagatcccccccgtcctcacccctttaaggcttgacttcaatttcggggccgcaccattcaaggccccaccttccgtggtattcctggccctgaagaacagcggagtggtgtccctggactggtatggcttgaagggggccactggggggcctgggagacaagtgcctagaggctgaaggagaacaagagctgcactctcttgcccgtggtggcctggctgcttgctgtctgtgaagagtggacctcacattgacggctgtggaggccagggtggaactggggttgccagcaggactccgggcctgtcaccggctgagacacggtgataggctcagaagcggtgggactgccctgatggagcctgggcatagtggccttaataacttaacaaatgagacacattcactgggcatctgctgcatgccaggacctgcgctttacaagtcttttctcctccaatcctgtgggaaactcctctctagactctttcatggacagggaggctgagggtcagcaaggttaaggactcagcgaagaccattcagccatgaatggacagagccaggttcaaagctgaatttgtccagtccagagcccttgcctaccccagttagtcagcaagaagactgagttgcttctacatagtacgcactgcctcgttgctggagcccgcctgacggagccccagcttagtggaggctgggcctgaatgggggcaagttgagggtctctggtggggaaggacagggacctgctgccggggacagagctgcccccgagggtcctggctgaggggcttttctcccccagaggctcagaacttgtgcccagcaaacatcctgcttccatgcatggacttttcctccctccaccatgtgcctttgtttcctagtaaactccttttgatgacttccaa

SEQ ID NO: 120685 - DNA, 516 bp, Homo sapiens
  Payload ID: 3638
  Gene Symbol: CCDC108
  Gene Name: coiled-coil domain containing 108
  ENST ID: ENST00000436631
  CDS Start-End: 165-516
atctatggagacggcaatatggaggcgatcttacatttctttgatttcatctgaacgtccagttcacaattggaggcaagagtgttcagaagaaacaagcagagagtaaaagccagataaagctccatactcagagtgctccctttggactgtgtcccaaggacatgatgctcacccaggctccaagctccgtcgtgaggtccaggaacagcaggaaccacaccgtgaactctggtggatcctgcctgagtgccagcacagtggccatccctgccatcaacgacagcagtgcagccatgagtgcctgcagcaccatcagcgcccagcccgcaagctccatggacactcagatgcactccccaaagaagcaggagagagtgaacaagagggtcatctggggcattgaggtggctgaggagctgcattggaaaggctgggagctaggaaaggagaccacaaggaatctggttctgaaaaatcgatccttgaaactccagaagatgaagtacaggcccc

SEQ ID NO: 120686 - DNA, 5877 bp, Homo sapiens
  Payload ID: 3638
  Gene Symbol: CCDC108
  Gene Name: coiled-coil domain containing 108
  Uniprot ID: Q6ZU64
  ENST ID: ENST00000453220
  CDS Start-End: 10-5787
atttcagtgatgtttaccttaaccggttgtagactggtggagaaaacccagaaggtggagaatccatcagtctcatttgcctcttctttcccccttattcctcttctcctaagaggcaagagtgttcagaagaaacaagcagagagtaaaagccagataaagctccatactcagagtgctccctttggactgtgtcccaaggacatgatgctcacccaggctccaagctccgtcgtgaggtccaggaacagcaggaaccacaccgtgaactctggtggatcctgcctgagtgccagcacagtggccatccctgccatcaacgacagcagtgcagccatgagtgcctgcagcaccatcagcgcccagcccgcaagctccatggacactcagatgcactccccaaagaagcaggagagagtgaacaagagggtcatctggggcattgaggtggctgaggagctgcattggaaaggctgggagctaggaaaggagaccacaaggaatctggttctgaaaaatcgatccttgaaactccagaagatgaagtacaggccccccaagaccaagttcttcttcacggtcatccctcagcccatcttcctgagcccaggcataaccctcacgctccccatcgtcttccggcctctggaggcgaaggagtacatggaccagctgtggtttgagaaagcggaggggatgttctgtgtcggcctacgggccaccctgccctgccacaggctgatctgccgcccaccatccctgcagctgcccatgtgtgctgtgggagatacgactgaggcctttttctgcctggataatgtgggggacctgcccaccttcttcacctgggagttctccagcccattccagatgctgcccgccacggggctcctggagccaggccaggcctctcagatcaaggtgacctttcagccccttacagccgtcatctacgaggtgcaggccacgtgctggtacggggcgggcagccggcagaggagcagcatccagctgcaggctgtggccaagtgcgcccagctgctggtgagcataaagcacaagtgcccggaggaccaggatgccgagggcttccagaagctgttgtactttggctctgttgctgtgggctgcacctcggagaggcagatcaggctacacaacccgtcggcggtaaatgcccccttcaggattgaaatttccccggatgaactggccgaagaccaggccttctcatgccccacggcccatggcatcgtgcttccgggagagaagaaatgtgtgtcggtgttcttccaccccaagactctggacaccagaactgtggactactgctccatcatgccttctggctgtgcctccaagaccctgcttaaagtcgttggtttctgtagaggccctgctgtgtccctgcagcactactgtgtcaacttcagctgggtcaaccttggggagcgctccgagcagcccctgtggattgagaaccaatcggactgcacggcccacttccagtttgccatcgactgcttggagagtgtctttaccatcaggcctgcctttgggacgctggtgggcaaggcccgtatgaccctgcactgtgccttccagcccactcaccccatcatctgctttcggcgtgtggcctgtctcatccaccaccaggacccactgttcctggacctgatggggacctgccactcggacagcaccaagccagccatcctgaagcctcagcacctcacctggtaccgcacacacctggcccggggcctgacgctctacccccctgacatcctggatgccatgctgaaggagaagaagctggcacaggaccagaacggggctctcatgattcccatccaggatctggaggacatgccggccccgcagtacccttatatcccccccatgaccgagttcttcttcgacggcaccagcgacataaccatcttccccccgcccatcagtgtagagcctgtcgaggtagacttcggtgcctgcccagggcctgaggcccccaaccctgtacccctgtgcctgatgaaccacaccaagggcaagatcatggtggtctggacgcgaaggtctgactgccccttctgggtgactccagagagctgcgacgtgcccccactcaagtccatggccatgcgcctgcacttccagccgcctcaccccaactgcctttacacggtggagctcgaagccttcgccatctataaggtcctgcagagctacagtaatattgaggaggactgcaccatgtgcccatcctggtgcctgacggtgcgggcacgaggccacagctatttcgctggctttgagcaccacatcccccagtattccctagatgtccccaagctatttccagcagtgtcctccggtgagcccacctaccgcagcctgctcctggtcaacaaagactgcaagctgctgaccttcagcctggccccccagagaggctcagacgtcatccttcggcccacttcgggccttgtggcacccggggcccaccagatcatcctcatctgcacctaccctgagggcagctcctggaagcagcacactttctatctgcagtgcaatgcttccccccagtatctcaaggaggtgagcatgtacagccgggaggagccactgcagctgaagctggacacccacaaaagcctctacttcaagcccacctgggtgggctgctcctccaccagccccttcaccttccgcaacccctcgcgtctgcccctgcagttcgagtggagggtctctgagcagcatcgaaagctgctggctgtccagccctccagggggctaatccagcccaacgagagacttacgctgacgtggaccttcagccctttggaggagaccaagtacctgttccaagtggggatgtgggtctgggaagccggcctgtccccaaatgccaaccccgctgccaccacccactacatgctccggctggtgggcgttgggctcaccagcagcctctctgcaaaggaaaaggagctggcctttgggaatgtgctggtgaacagcaagcagtccaggttccttgtcctcctgaatgacggcaactgcaccctctattaccgcctctacctggagcagggcagccctgaggccgttgacaaccaccccctcgctctgcagctggaccgaacagaggggagcatgccaccccggtcccaggacaccatctgcctgactgcctgtcccaagcagcggtcccagtactcctggaccatcacctactctctcctttcccacagagataacaaggctggggagaagcaggagctgtgctgcgtctccctggtggccgtgtaccccttgctttccatcctggatgtcagctccatgggcagtgctgagggtatcacccggaagcacctgtggcgcctcttctctctggacctgcttaacagttacttggagcgtgaccccaccccctgtgagctcacctacaaggtgcccacccggcacagcatgagccagatcccccccgtcctcacccctttaaggcttgacttcaatttcggggccgcaccattcaaggccccaccttccgtggtattcctggccctgaagaacagcggagtggtgtccctggactgggccttcctccttccaagtgaccagcggattgacgtggagctctgggcagagcaagcagagttgaattccactgagctccaccagatgcgcgtgcaggacaattgcctcttctccatcagccccaaggctgggagcctgagtcctgggcaggagcagatggtggagttaaaatacagccacctgttcatcggtactgatcacctcccagtgctcttcaaggtgtcccatggccgggagatcctgctaaatttcataggtgtgacagtgaagccggagcagaagtatgtgcacttcacctctactacccaccagttcatccccattcccattggtgacacgctacccccacggcagatttatgagctgtataatggtggctcagtgcccgtgacatatgaggtccagaccgatgtcctgtcacaggttcaggaaaaaaattttgatcaccccatcttttgctgcctcaaccccaaaggggagatccagccaggcagcactgcccgggtcttgtggatcttctcacctatcgaggccaagacctacacggtggacgtgcccatacacatcctgggatggaactcggccctcatccacttccagggagtgggctacaacccccatatgatgggggacacagccccattccacaacatctcctcgtgggacaacagttccatacactctaggctggtggtgcctggacagaatgtcttcctgtcccagtctcatatttccctgggaaacatacctgtgcagagcaagtgcagccgcctgctcttcctcaacaacatctccaagaacgaggaaattgccttctcctggcagccaagtcctctagattttggggaggtgtctgtgagtcccatgataggggtggtggctcctgaagagacggtcccatttgtggtgaccttgagggcctctgtgcatgccagcttctacagtgcagacctggtatgcaagctgtactcgcagcagctcatgaggcagtatcacaaggagctgcaggagtggaaggacgagaaggtgcggcaggaagtggagttcaccatcaccgacatgaaagtgaagaagagaacatgctgcacagcctgtgaacctgcgaggaagtacaagacactgcctcccatcaagaaccagcagtctgtcagccggcctgccagctggaaactgcagaccccaaaggaggaggtgtcctggccctgcccccagccaccctcgccaggcatgctctgcctgggccttactgcccgagcccatgccaccgactactttctggctaacttcttctcagagtttccctgccactttttgcaccgggagctgccaaagaggaaggcccccagggaagagtcagagacttctgaggaaaaatcccctaacaagtggggccctgtttccaagcagaagaagcagctcctggttgacattctcaccacaataatcaggggcctgctggaagacaagaacttccatgaggctgtggaccaaagcctggtggagcaggtgccgtacttccgccaattctggaatgagcagtcaactaagttcatggaccagaaaaacagcctgtacttaatgccaatcctgcctgtaccctccagcagctgggaggatgggaagggcaagcagccgaaggaagacagaccagagcactatccagggttgggaaagaaggaagagggggaggaggagaagggtgaagaggaagaagaagagttggaggaggaagaggaggaagaagaggagacagaagaggaggagttgggcaaggaggagatagaggagaaggaggaggagagggatgagaaggaagagaaagtgagctgggcgggcatcgggcccacaccacagcctgagtcccaggagtccatgcaatggcagtggcaacagcagctgaatgtcatggtgaaggaggagcaagaacaggacgagaaggaggccatcagaaggctcccggccttcgccaacctgcaggaggcgctgctggagaacatgatccagaacatcctggtggaggcgagccgcggggaggtggtactcacctcgcggccacgcgtcatcgccctgccgccgttctgcgtgcccaggagtctgaccccggacacgctgctgccgacgcagcaagcagaggtactccacccggtggtgccacttcctaccgaccttccgtaaatgcccgcgcccagcctctccgacatgccgctaggggtcacgcctggccccctctccaccgccagtaaaagcatctagtcttttttctgt

SEQ ID NO: 120687 - DNA, 3416 bp, Homo sapiens
  Payload ID: 3638
  Gene Symbol: CCDC108
  Gene Name: coiled-coil domain containing 108
  ENST ID: ENST00000441968
  CDS Start-End: 1678-2493
aaggtggagaatccatcagtctcatttgcctcttctttcccccttattcctcttctcctaagaggcaagagtgttcagaagaaacaagcagagagtaaaagccagataaagctccatactcagagtgctccctttggactgtgtcccaaggacatgatgctcacccaggctccaagctccgtcgtgaggtccaggaacagcaggaaccacaccgtgaactctggtggatcctgcctgagtgccagcacagtggccatccctgccatcaacgacagcagtgcagccatgagtgcctgcagcaccatcagcgcccagcccgcaagctccatggacactcagatgcactccccaaagaagcaggagagagtgaacaagagggtcatctggggcattgaggtggctgaggagctgcattggaaaggctgggagctaggaaaggagaccacaaggaatctggttctgaaaaatcgatccttgaaactccagaagatgaagtacaggccccccaagaccaagttcttcttcacggtcatccctcagcccatcttcctgagcccaggcataaccctcacgctccccatcgtcttccggcctctggaggcgggacctgcccaccttcttcacctgggagttctccagcccattccagatgctgcccgccacggggctcctggagccaggccaggcctctcagatcaaggtgacctttcagccccttacagccgtcatctacgaggtgcaggccacgtgctggtacggggcgggcagccggcagaggagcagcatccagctgcaggctgtggccaagtgcgcccagctgctggtgagcataaagcacaagtgcccggaggaccaggatgccgagggcttccagaagctgttgtactttggctctgttgctgtgggctgcacctcggagaggcagatcaggctacacaacccgtcggcggtaaatgcccccttcaggattgaaatttccccggatgaactggccgaagaccaggccttctcatgccccacggcccatggcatcgtgcttccgggagagaagaaatgtgtgtcggtgttcttccaccccaagactctggacaccagaactgtggactactgctccatcatgccttctggctgtgcctccaagaccctgcttaaagtcgttggtttctgtagaggtaccggtgaccccaggggcctcccctggggacaggagcagcccctgctgaggattctgaagagctccttccctgctcctaggaggcggggccaccttgcctcagcctgggtgtctgctgccccctggtggccctgtggggaatcatccgtgactacctggagatcccagtcccactggcatccagtgatgctggagttctgctcaggctgccagggctctgggcctgtagcctggccctgagagtaccacctcccttcagtggaactttgtctaagatatccttggggaagctgataccccatctcctgtgtccaggccctgctgtgtccctgcagcactactgtgtcaacttcagctgggtcaaccttggggagcgctccgagcagcccctgtggattgagaaccaatcggactgcacggcccacttccagtttgccatcgactgcttggagagtgtctttaccatcaggcctgcctttgggacgctggtgggcaaggcccgtatgaccctgcactgtgccttccagcccactcaccccatcatctgctttcggcgtgtggcctgtctcatccaccaccaggacccactgttcctggacctgatggggacctgccactcggacagcaccaagccagccatcctgaagcctcagcacctcacctggtaccgcacacacctggcccggggcctgacgctctacccccctgacatcctggatgccatgctgaaggagaagaagctggcacaggaccagaacggggctctcatgattcccatccaggatctggaggacatgccggccccgcagtacccttatatcccccccatgaccgagttcttcttcgacggcaccagcgacataaccatcttccccccgcccatcagtgtagagcctgtcgaggtagacttcggtgcctgcccagggcctgaggcccccaaccctgtacccctgtgcctgatgaaccacaccaagggcaagatcatggtggtctggacgcgaaggtctgactgccccttctgggtgactccagagagctgcgacgtgcccccactcaagtccatggccatgcgcctgcacttccagccgcctcaccccaactgcctttacacggtggagctcgaagccttcgccatctataaggtgtgtgcacgcaatgagagggaggaatgcggggtctctgctaggagcctgagtggcttggtggggtggcaggaagtgaccgagggcagcttcaggctccatcctctgcgtgccaggctttctcttggctggacagtgacccctatgagtttgtctcctccaaagctcctggcctagctcggcccatctgattttctcattcttatgtaagtctcccctcccctccaagggagaactcagctgagatcaagctgtttgggaaaactgggtgcacagggagatactccctggggctcctggctaggaggcctcctagcttctctactagtccttgaattaagaagtggtcactctaaaggagctttgagcgggcaggaagctgggcctagagacaaagtcagcagcaccagataattgtgatggaaagggcttctgactcagcttccctgggtcgggaactccgagtgccggctgtccccagccctgctgttctggccccagatgcgtggtgccccctcctcatccgttagtcctgcccatcccttccttcttgactctgcccaccccactgcccttgcccagaggccaaggtcttggggcccagagaaaagtagggctgtgcggtcaagatcagggtcacttaccagctatgtgaccttgggcaagttccttaatgtctctgagtcctgatcttttcatctctaaacttgggaccacgtccgatcttttgaggaggctttccaaagtggaggctttggttgcccccgtcctaatgctctggcagtggggtgatgttgaggtttgtaggaataaggttgtagatgcctggctctgctgaggttcagcctgtcagatatttaggttacaggctctagacctgcacagtccagtacagccactgacagccacacgtggctactgagcttttaatatgtggctggtcccaattgagacgtgccgtgagtgtaaaatgcaccctggatttcaagacttagtatgaaaagaatgtaaaatacctcgttactaattttatattggttatatgttaaagtgataagattttagatctgttgggttaaataaaatatactattaacatt

SEQ ID NO: 120688 - DNA, 562 bp, Homo sapiens
  Payload ID: 3638
  Gene Symbol: CCDC108
  Gene Name: coiled-coil domain containing 108
  ENST ID: ENST00000458526
  CDS Start-End: 220-562
ggcaatatggaggcgatgtaagttctgagcgttagtcccaaggtcccagggtctcagggagcggcgcgagtggccagggaagcttacatttctttgatttcatctgaacgtccagttcacaattggagaggcaagagtgttcagaagaaacaagcagagagtaaaagccagataaagctccatactcagagtgctccctttggactgtgtcccaaggacatgatgctcacccaggctccaagctccgtcgtgaggtccaggaacagcaggaaccacaccgtgaactctggtggatcctgcctgagtgccagcacagtggccatccctgccatcaacgacagcagtgcagccatgagtgcctgcagcaccatcagcgcccagcccgcaagctccatggacactcagatgcactccccaaagaagcaggagagagtgaacaagagggtcatctggggcattgaggtggctgaggagctgcattggaaaggctgggagctaggaaaggagaccacaaggaatctggttctgaaaaatcgatccttgaaactccagaagatgaagt

SEQ ID NO: 120689 - DNA, 2278 bp, Homo sapiens
  Payload ID: 3639
  Gene Symbol: CCDC109B
  Gene Name: coiled-coil domain containing 109B
  Uniprot ID: Q9NWR8
  ENST ID: ENST00000394650
  CDS Start-End: 134-1144
agccgcggcgcgctgagcgagcaggcggggcgggagcgcccacagctcggagccaccaggcgctgacgaggagcccggctgagggaggatgcgccgctgacgcctgcgggagccgcgcgcctggggcgggaggatgctccagaggggcctctggccgtggcgcacgcggctgctgccgacccctggcacctggcgcccagcgcgcccgtggccgctgccgcctccgccccaggttttgcgtgtgaagctgtgtggaaatgtgaaatactaccagtcacaccattatagtaccgtggtgccacctgatgaaataacagttatttatagacatggccttcccttggtaacacttaccttgccatctagaaaagaacgttgtcaattcgtagtcaaaccaatgttgtcaacagttggttcattccttcaggacctacaaaatgaagataagggtatcaaaactgcagccatcttcacagcagatggcaacatgatttcagcttctaccttgatggatattttgctaatgaatgattttaaacttgtcattaataaaatagcatatgatgtgcagtgtccaaagagagaaaaaccaagtaatgagcacactgctgagatggaacacatgaaatctttggttcacagactatttacaatcttgcatttagaagagtctcagaaaaagagagagcaccatttactggagaaaattgaccacctgaaggaacagctgcagccccttgaacaggtgaaagctggaatagaagctcattcggaagccaaaaccagtggactcctgtgggctggattggcactgctgtccattcagggtggggcactggcctggctcacgtggtgggtgtactcctgggatatcatggagccagttacatacttcatcacatttgcaaattctatggtcttttttgcatactttatagtcactcgacaggattatacttactcagctgttaagagtaggcaatttcttcagttcttccacaagaaatcaaagcaacagcactttgatgtgcagcaatacaacaagttaaaagaagaccttgctaaggctaaagaatccctgaaacaggcgcgtcattctctctgtttgcaaatgcaagtagaagaactcaatgaaaagaattaatcttacagttttaaatgtcgtcagattttccattatgtattgattttgcaacttaggatgtttttgagtcccatggttcattttgattgtttaatctttgttattaaattcttgtaaaacagaagtattgtttgaagttctcaactgagatttttactttttggatttttatgacttgctaatgttagaaagggcttgtatgcgtctatcaaagcaacggtggctgctgttagctaaaaatccttgtcagcttgtcccacgtttattctctatgtggaggtgaaagggtctgtgcttggcattcacttccattcttagacttaatttggaatcatccttttaaaaaaatcagagaccaggtcttgccaaatcaaactcctgggctcaagcaaccctcctgcctcaacctcccacggaatcgtcttgtcattaacttctttttttaatatgcagtagttgggagtaagatctttttatcatttatcaaaaaggcataaatgttccaccaaccataaagtatagttggtactttttgaacttcaactgaaacagtgtatataaacgattgcttttgaacctgcaaatcacaagtttcaggtatcgaagccaaaacagttaactttcttcagcctctggcagattattaacaaaacagtattattcagattctatatcatattaataagaattgaaccttgaaagtaacatctgttattctattaatgtgattgtgtgtgaatgggtctgatgactgttggactgtttgtaggaacttaacatggaagatgctgacagaatcagattttgcaggtgttcaacctatagtggctaagaattatgttttctatttcatcctcagaatgccatacaacaattctggaatgctgattttttttaaagtaggaattaaagtcatacacaaaatgtggtaattcatatgtagatgaaatattaaacatttaaatgaccgagtaaaaaacatctatcaattacacaaatgaacaagaatgtgagttagaaaaatgtaataaaatatgaatttcgaatattttattaagggatgatttaattcctggatttcaaaaacctttaaaaacatcaaacaataaacttttataaaaaagtgacaaaata

SEQ ID NO: 120690 - DNA, 2898 bp, Homo sapiens
  Payload ID: 3640
  Gene Symbol: CCDC110
  Gene Name: coiled-coil domain containing 110
  Uniprot ID: Q8TBZ0
  ENST ID: ENST00000307588
  CDS Start-End: 77-2578
tggcgacaggatgccctgcgcggggcggcggagcgggtgcgtgcggcggcggttgcgagagagatgagccgcggcgatgagcccggaaaagcagcaccgggaagaggatgaagttgactccgttctcctttcagcgtccaagatcctaaattcttcggagggggtgaaggaaagtggctgcagtgacacagaatatggctgcatagcagaatcagaaaatcaaatccaaccacaatcagcattgaaagtccttcagcagcagttggaatcatttcaggctttgcgaatgcagactttgcagaatgtcagcatggtacagtcggaaatcagtgaaatattgaacaaaagtattattgaagtagaaaacccacaatttagctcagaaaaaaatctggtgtttggcacgcgcattgaaaaggatttgcctacagagaatcaagaagaaaacctttctatggagaaaagtcatcattttgaggattccaagacacttcattcagtggaagaaaaattaagtggtgatagtgtgaacagtctccctcaaagtgtaaatgttccatcccagatacattccgaggacacattaactctgagaacttcaacagacaatttatcttcaaacataattatacacccttcagaaaattctgacatcttgaagaattataataacttttatcgttttctacctactgcacctccaaatgtgatgtctcaagctgatacagtaattctggataaatccaaaattactgtgccttttctcaagcatggattttgtgaaaatttagatgacatttgccattctatcaaacaaatgaaagaagagcttcaaaagtcacatgatggggaagtggcacttacaaatgaacttcagactttacaaactgatccagatgttcacaggaatggtaaatatgacatgtcccctattcaccaggataaaatgaactttattaaggaagaaaacttggacggtaacttaaatgaagatataaaatcaaagagaatttcagaattagaggcattagtgaagaaattactccccttcagggaaactgtgtcaaaattccatgtgcatttttgtagaaaatgtaaaaagttatctaagagtgaaatgcacaggggaaagaaaaatgagaaaaacaataaagaaattcccatcactggcaaaaatattacagatttaaaattccattccagagttccaagatacacactgtccttcctcgaccaaacaaaacatgaaatgaaagacaaagaaagacaaccatttctagtaaaacaaggatcaataatatctgaaaatgagaaaacttccaaagttaattccgttactgagcagtgtgttgcaaaaattcagtacttacagaattacctaaaagaatctgtgcagatacagaaaaaagtaatggaactggagagtgaaaatctaaaccttaagtccaaaatgaaacctcttatctttaccacacaatctctcatacagaaagttgaaacatatgaaaagcaacttaagaatctggttgaagaaaagagtactattcagtctaagttaagtaaaacagaagaatacagcaaagagtgtcttaaagaatttaaaaaaataattagtaaatataatgttctgcaaggccaaaataaaactctagaggaaaaaaatatacaactttctttagagaagcaacaaatgatggaagcattagatcaactaaaaagtaaggaacacaaaactcaaagtgatatggccattgtaaataatgaaaataatcgaatgagtatagaaatggaagcaatgaaaaccaatattctgttgatacaagatgaaaaagaaatgttagagaaaaaaacacaccagcttctaaaagaaaaaagctcacttggaaatgaactaaaagaaagccagctagagataatccagctaaaagagaaagaaagattggcaaaaacggaacaagagacacttcttcaaataatagaaacagttaaagatgaaaaactcaaccttgaaacaacattacaagaatctactgctgccagacaaattatggaaagagaaattgagaatattcaaacctaccaatctactgccgaagagaattttctgcaagaaataaaaaatgcaaaatcagaagcaagtatttataagaatagcttgtcagaaattggcaaggaatgtgaaatgttatcaaaaatggtaatggaaaccaaaacagataatcagattctaaaagaagaactaaagaaacatagtcaagaaaatataaaatttgaaaacagcatcagtagacttactgaagacaaaatacttttagaaaattacgtaagaagcatagaaaatgaaagggataccttggaatttgagatgcggcatcttcaacgagaatatttaagtttaagtgataaaatttgtaatcagcataatgacccttcaaaaacaacttacatttcaagaagagagaaattccattttgacaactatactcacgaagatacttctagtcctcagagtaggcctttggcttcggatttgaaaggttatttcaaagttaaagacagaactctcaagcatcattaggattcctcaagattgctaagaaactcccttcgagaaatagccaatgttaattgtactgctaactgaactatgcatatctaactcatctcaaatgactcataatgaggcgctatatatttgctttaaaaattatgcacagaatggtttggtgcagataacttaagctttctcagctgggaatttcagaagatgggggagaacttctacaagggagggcaggtacctgtacatggaaggagctgagatgtctaaagtcacccacatttgtcatttaaaaaagtatatataaataaaagatactattttgaagaagtataaaa

SEQ ID NO: 120691 - DNA, 2722 bp, Homo sapiens
  Payload ID: 3640
  Gene Symbol: CCDC110
  Gene Name: coiled-coil domain containing 110
  Uniprot ID: Q8TBZ0
  ENST ID: ENST00000393540
  CDS Start-End: 12-2402
gagccgcggcgatgagcccggaaaagcagcaccgggaagaggatgaagttgactccgttctcctttcagcgtccaagatcctaaattcttcggagggggtgaaggaaagtggctgcagtgacacagaatatggctgcatagcagaatcagaaaatcaaatccaaccacaatcagcattgaaagtccttcagcagcagttggaatcatttcaggctttgcgaatgcagactttgcagaatgtcagcatgcctacagagaatcaagaagaaaacctttctatggagaaaagtcatcattttgaggattccaagacacttcattcagtggaagaaaaattaagtggtgatagtgtgaacagtctccctcaaagtgtaaatgttccatcccagatacattccgaggacacattaactctgagaacttcaacagacaatttatcttcaaacataattatacacccttcagaaaattctgacatcttgaagaattataataacttttatcgttttctacctactgcacctccaaatgtgatgtctcaagctgatacagtaattctggataaatccaaaattactgtgccttttctcaagcatggattttgtgaaaatttagatgacatttgccattctatcaaacaaatgaaagaagagcttcaaaagtcacatgatggggaagtggcacttacaaatgaacttcagactttacaaactgatccagatgttcacaggaatggtaaatatgacatgtcccctattcaccaggataaaatgaactttattaaggaagaaaacttggacggtaacttaaatgaagatataaaatcaaagagaatttcagaattagaggcattagtgaagaaattactccccttcagggaaactgtgtcaaaattccatgtgcatttttgtagaaaatgtaaaaagttatctaagagtgaaatgcacaggggaaagaaaaatgagaaaaacaataaagaaattcccatcactggcaaaaatattacagatttaaaattccattccagagttccaagatacacactgtccttcctcgaccaaacaaaacatgaaatgaaagacaaagaaagacaaccatttctagtaaaacaaggatcaataatatctgaaaatgagaaaacttccaaagttaattccgttactgagcagtgtgttgcaaaaattcagtacttacagaattacctaaaagaatctgtgcagatacagaaaaaagtaatggaactggagagtgaaaatctaaaccttaagtccaaaatgaaacctcttatctttaccacacaatctctcatacagaaagttgaaacatatgaaaagcaacttaagaatctggttgaagaaaagagtactattcagtctaagttaagtaaaacagaagaatacagcaaagagtgtcttaaagaatttaaaaaaataattagtaaatataatgttctgcaaggccaaaataaaactctagaggaaaaaaatatacaactttctttagagaagcaacaaatgatggaagcattagatcaactaaaaagtaaggaacacaaaactcaaagtgatatggccattgtaaataatgaaaataatcgaatgagtatagaaatggaagcaatgaaaaccaatattctgttgatacaagatgaaaaagaaatgttagagaaaaaaacacaccagcttctaaaagaaaaaagctcacttggaaatgaactaaaagaaagccagctagagataatccagctaaaagagaaagaaagattggcaaaaacggaacaagagacacttcttcaaataatagaaacagttaaagatgaaaaactcaaccttgaaacaacattacaagaatctactgctgccagacaaattatggaaagagaaattgagaatattcaaacctaccaatctactgccgaagagaattttctgcaagaaataaaaaatgcaaaatcagaagcaagtatttataagaatagcttgtcagaaattggcaaggaatgtgaaatgttatcaaaaatggtaatggaaaccaaaacagataatcagattctaaaagaagaactaaagaaacatagtcaagaaaatataaaatttgaaaacagcatcagtagacttactgaagacaaaatacttttagaaaattacgtaagaagcatagaaaatgaaagggataccttggaatttgagatgcggcatcttcaacgagaatatttaagtttaagtgataaaatttgtaatcagcataatgacccttcaaaaacaacttacatttcaagaagagagaaattccattttgacaactatactcacgaagatacttctagtcctcagagtaggcctttggcttcggatttgaaaggttatttcaaagttaaagacagaactctcaagcatcattaggattcctcaagattgctaagaaactcccttcgagaaatagccaatgttaattgtactgctaactgaactatgcatatctaactcatctcaaatgactcataatgaggcgctatatatttgctttaaaaattatgcacagaatggtttggtgcagataacttaagctttctcagctgggaatttcagaagatgggggagaacttctacaagggagggcaggtacctgtacatggaaggagctgagatgtctaaagtcacccacatttgtcatttaaaaaagtatatataaataaaagatactattttgaagaagtataaaa

SEQ ID NO: 120692 - DNA, 788 bp, Homo sapiens
  Payload ID: 3640
  Gene Symbol: CCDC110
  Gene Name: coiled-coil domain containing 110
  ENST ID: ENST00000510481
  CDS Start-End: 70-270
aggatgccctgcgcggggcggcggagcgggtgcgtgcggcggcggttgcgagagagatgagccgcggcgatgagcccggaaaagcagcaccgggaagaggatgaagttgactccgttctcctttcagcgtccaagatcctaaattcttcggagggggtgaaggaaagtggctgcagtgacacaggtccttcagcagcagttggaatcatttcaggctttgcgaatgcagactttgcagaatgtcagcatggtacagtcggaaatcagtgaaatattgaacaaaagtattattgaagtagaaaacccacaatttagctcagaaaaaaatctggtgtttggcacgcgcattgaaaaggatttgcctacagagaatcaagaagaaaacctttctatggagaaaagtcatcattttgaggattccaagacacttcattcagtggaagaaaaattaagtggtgatagtgtgaacagtctccctcaaagtgtaaatgttccatcccagatacattccgaggacacattaactctgagaacttcaacagacaatttatcttcaaacataattatacacccttcagaaaattctgacatcttgaagaattataataacttttatcgttttctacctactgcacctccaaatgtgatgtctcaagctgatacagtaattctggataaatccaaaattactgtgccttttctcaagcatggattttgtgaaaatttagatgacatttgccattctatcaaacaaatgaaagaagagcttcaaaagtcacatgatgggg

SEQ ID NO: 120693 - DNA, 467 bp, Homo sapiens
  Payload ID: 3640
  Gene Symbol: CCDC110
  Gene Name: coiled-coil domain containing 110
  ENST ID: ENST00000508538
  CDS Start-End: 1-375
gaagacaaaatacttttagaaaattacgtaagaagcatagaaaatgaaagggataccttggaatttgagatgcggcatcttcaacgagaatatttaagtttaagtgataaaatttgtaatcagcataatgacccttcaaaaacaacttacatttcaagaagagagaaattccattttgacaactatactcacgaagatacttctagtcctcagagtaggcctttggcttcggatttgaaaggtggaaacaatacacatgcctgccctggctccagaggaaacacaatctctagcttccaaggttgcaagcacacctgttctgtgctccagagacactctgtcttccaagactgctattcaaatattccttgttgaattctgtccaaagctttttctacatttattggaggttatttcaaagttaaagacagaactctcaagcatcattaggattcctcaagattgct

SEQ ID NO: 120694 - DNA, 789 bp, Homo sapiens
  Payload ID: 3640
  Gene Symbol: CCDC110
  Gene Name: coiled-coil domain containing 110
  ENST ID: ENST00000506876
  CDS Start-End: 17-789
gagatgagccgcggcgatgagcccggaaaagcagcaccgggaagaggatgaagttgactccgttctcctttcagcgtccaagatcctaaattcttcggagggggtgaaggaaagtggctgcagtgacacagaatatggctgcatagcagaatcagaaaatcaaatccaaccacaatcagcattgaaagtccttcagcagcagttggaatcatttcaggctttgcgaatgcagactttgcagaatgtcagcatggtacagtcggaaatcagtgaaatattgaacaaaagtattattgaagtagaaaacccacaatttagctcagaaaaaaatctggtgtttggcacgcgcattgaaaaggatttggaaaaatggaccatcagagatgaaaataaggaaactccggtcctgaaaaccttaaaagatcctacagagaatcaagaagaaaacctttctatggagaaaagtcatcattttgaggattccaagacacttcattcagtggaagaaaaattaagtggtgatagtgtgaacagtctccctcaaagtgtaaatgttccatcccagatacattccgaggacacattaactctgagaacttcaacagacaatttatcttcaaacataattatacacccttcagaaaattctgacatcttgaagaattataataacttttatcgttttctacctactgcacctccaaatgtgatgtctcaagctgatacagtaattctggataaatccaaaattactgtgccttttctcaagcatggattttgtgaaaattt

SEQ ID NO: 120695 - DNA, 470 bp, Homo sapiens
  Payload ID: 3640
  Gene Symbol: CCDC110
  Gene Name: coiled-coil domain containing 110
  ENST ID: ENST00000504020
  CDS Start-End: 20-169
agagagatgagccgcggcgatgagcccggaaaagcagcaccgggaagaggatgaagttgactccgttctcctttcagcgtccaagatcctaaattcttcggagggggtgaaggaaagtggctgcagtgacacagataaggaaacgggcacagagaggttaactccctaaggtcacacaggcagcgaggaatggagcgggcattcagcagggcggctccggactgcctgtcttcaccaccacgctacgctccgttgcttctctgaatgctaaaatatggctgcatagcagaatcagaaaatcaaatccaaccacaatcagcattgaaagtccttcagcagcagttggaatcatttcaggctttgcgaatgcagactttgcagaatgtcagcatggtacagtcggaaatcagtgaaatattgaacaaaagtattattgaagtagaaaacccacaatttagctcagaaaaaaa

SEQ ID NO: 120696 - DNA, 2592 bp, Homo sapiens
  Payload ID: 3640
  Gene Symbol: CCDC110
  Gene Name: coiled-coil domain containing 110
  ENST ID: ENST00000510617
  CDS Start-End: 62-2572
ctgcgcggggcggcggagcgggtgcgtgcggcggcggttgcgagagagatgagccgcggcgatgagcccggaaaagcagcaccgggaagaggatgaagttgactccgttctcctttcagcgtccaagatcctaaattcttcggagggggtgaaggaaagtggctgcagtgacacagaatatggctgcatagcagaatcagaaaatcaaatccaaccacaatcagcattgaaagtccttcagcagcagttggaatcatttcaggctttgcgaatgcagactttgcagaatgtcagcatggtacagtcggaaatcagtgaaatattgaacaaaagtattattgaagtagaaaacccacaatttagctcagaaaaaaatctggtgtttggcacgcgcattgaaaaggatttgcctacagagaatcaagaagaaaacctttctatggagaaaagtcatcattttgaggattccaagacacttcattcagtggaagaaaaattaagtggtgatagtgtgaacagtctccctcaaagtgtaaatgttccatcccagatacattccgaggacacattaactctgagaacttcaacagacaatttatcttcaaacataattatacacccttcagaaaattctgacatcttgaagaattataataacttttatcgttttctacctactgcacctccaaatgtgatgtctcaagctgatacagtaattctggataaatccaaaattactgtgccttttctcaagcatggattttgtgaaaatttagatgacatttgccattctatcaaacaaatgaaagaagagcttcaaaagtcacatgatggggaagtggcacttacaaatgaacttcagactttacaaactgatccagatgttcacaggaatggtaaatatgacatgtcccctattcaccaggataaaatgaactttattaaggaagaaaacttggacggtaacttaaatgaagatataaaatcaaagagaatttcagaattagaggcattagtgaagaaattactccccttcagggaaactgtgtcaaaattccatgtgcatttttgtagaaaatgtaaaaagttatctaagagtgaaatgcacaggggaaagaaaaatgagaaaaacaataaagaaattcccatcactggcaaaaatattacagatttaaaattccattccagagttccaagatacacactgtccttcctcgaccaaacaaaacatgaaatgaaagacaaagaaagacaaccatttctagtaaaacaaggatcaataatatctgaaaatgagaaaacttccaaagttaattccgttactgagcagtgtgttgcaaaaattcagtacttacagaattacctaaaagaatctgtgcagatacagaaaaaagtaatggaactggagagtgaaaatctaaaccttaagtccaaaatgaaacctcttatctttaccacacaatctctcatacagaaagttgaaacatatgaaaagcaacttaagaatctggttgaagaaaagagtactattcagtctaagttaagtaaaacagaagaatacagcaaagagtgtcttaaagaatttaaaaaaataattagtaaatataatgttctgcaaggccaaaataaaactctagaggaaaaaaatatacaactttctttagagaagcaacaaatgatggaagcattagatcaactaaaaagtaaggaacacaaaactcaaagtgatatggccattgtaaataatgaaaataatcgaatgagtatagaaatggaagcaatgaaaaccaatattctgttgatacaagatgaaaaagaaatgttagagaaaaaaacacaccagcttctaaaagaaaaaagctcacttggaaatgaactaaaagaaagccagctagagataatccagctaaaagagaaagaaagattggcaaaaacggaacaagagacacttcttcaaataatagaaacagttaaagatgaaaaactcaaccttgaaacaacattacaagaatctactgctgccagacaaattatggaaagagaaattgagaatattcaaacctaccaatctactgccgaagagaattttctgcaagaaataaaaaatgcaaaatcagaagcaagtatttataagaatagcttgtcagaaattggcaaggaatgtgaaatgttatcaaaaatggtaatggaaaccaaaacagataatcagattctaaaagaagaactaaagaaacatagtcaagaaaatataaaatttgaaaacagcatcagtagacttactgaagacaaaatacttttagaaaattacgtaagaagcatagaaaatgaaagggataccttggaatttgagatgcggcatcttcaacgagaatatttaagtttaagtgataaaatttgtaatcagcataatgacccttcaaaaacaacttacatttcaagaagagagaaattccattttgacaactatactcacgaagatacttctagtcctcagagtaggcctttggcttcggatttgaaaggaattccaagtaaactgtatcatttgcttccatccaagatatataaataaactgctaaaatcaatgtttc

SEQ ID NO: 120697 - DNA, 544 bp, Homo sapiens
  Payload ID: 3640
  Gene Symbol: CCDC110
  Gene Name: coiled-coil domain containing 110
  ENST ID: ENST00000506962
  CDS Start-End: 200-544
cagccccgccacgccacgacccgcgacagaacagccccggacggttctgttacagaaaagcagcaccgggaagaggatgaagttgactccgttctcctttcagcgtccaagatcctaaattcttcggagggggtgaaggaaagtggctgcagtgacacaggtccttcagcagcagttggaatcatttcaggctttgcgaatgcagactttgcagaatgtcagcatggtacagtcggaaatcagtgaaatattgaacaaaagtattattgaagtagaaaacccacaatttagctcagaaaaaaatctggtgtttggcacgcgcattgaaaaggatttgcctacagagaatcaagaagaaaacctttctatggagaaaagtcatcattttgaggattccaagacacttcattcagtggaagaaaaattaagtggtgatagtgtgaacagtctccctcaaagtgtaaatgttccatcccagatacattccgaggacacattaactctgagaacttcaacagacaatttatcttcaaacataattata

SEQ ID NO: 120698 - DNA, 705 bp, Homo sapiens
  Payload ID: 3640
  Gene Symbol: CCDC110
  Gene Name: coiled-coil domain containing 110
  ENST ID: ENST00000507501
  CDS Start-End: 255-705
agccccgccacgccacgacccgcgacagaacagccccggacggttctgttacagaaaagcagcaccgggaagaggatgaagttgactccgttctcctttcagcgtccaagatcctaaattcttcggagggggtgaaggaaagtggctgcagtgacacagaatatggctgcatagcagaatcagaaaatcaaatccaaccacaatcagcattgaaagtccttcagcagcagttggaatcatttcaggctttgcgaatgcagactttgcagaatgtcagcatggtacagtcggaaatcagtgaaatattgaacaaaagtattattgaagtagaaaacccacaatttagctcagaaaaaaatctggtgtttggcacgcgcattgaaaaggatttgcctacagagaatcaagaagaaaacctttctatggagaaaagtcatcattttgaggattccaagacacttcattcagtggaagaaaaattaagtggtgatagtgtgaacagtctccctcaaagtgtaaatgttccatcccagatacattccgaggacacattaactctgagaacttcaacagacaatttatcttcaaacataattatacacccttcagaaaattctgacatcttgaagaattataataacttttatcgttttctacctactgcacctccaaatgtgatgtctcaagctgatacagtaattctgg

SEQ ID NO: 120699 - DNA, 2566 bp, Homo sapiens
  Payload ID: 3641
  Gene Symbol: CCDC112
  Gene Name: coiled-coil domain containing 112
  Uniprot ID: Q8NEF3
  ENST ID: ENST00000379611
  CDS Start-End: 289-1878
ggcaccttgcccctccctcgccccgcccctccccgcctgaatcccggcccccgcctcgcatttcggccccgccctgcaccccagtcccgcccctcccgcacccccgcacccctgcacccccgcatctcagccccgccctgcatcccgaccccgccctacatctcggccccgccctgcatcccggccaagcccgcagcgcagggagctgtctgcagaggccagggtgcgcctgccacgaatccccaggcaccggtggccgccgcggcccgagtagctcggcgggtaaacatggccgcactgacgacggttgtggtagcggctgcggccaccgcggtagccggggctgtggcaggggcgggcgcggccaccgggaccggcgtgggagcgacgccagcgcctcaacagagtgatggctgttttagtacttcaggtggaattcgtccttttcatcttcagaactggaagcagaaagttaatcagactaagaaagcagaatttgtacgcacagcagaaaaatttaaaaatcaagtaattaacatggaaaaagataaacacagtcatttctacaaccaaaaaagtgacttcagaattgagcatagtatgctagaagaattggaaaataaattgattcacagcaggaaaacagaaagagcaaaaatccagcaacaattggccaaaatacataataatgtaaagaaacttcagcatcaattaaaagatgtgaagcctacacctgattttgttgagaagctcagagaaatgatggaagaaattgaaaatgcaattaacacttttaaagaagagcagaggttgatatatgaagagctaattaaagaagagaagacaactaataatgagttgagtgccatatcaagaaaaattgacacatgggctttgggtaattcagaaacagagaaagctttcagagcaatctcaagcaaagttcctgtagacaaagtaacaccaagtactcttccagaagaggtactagattttgaaaaattccttcagcaaacaggagggcgacaaggtgcctgggatgattatgatcaccagaactttgtaaaggtgagaaacaaacataaagggaagccaacatttatggaagaagttctagaacaccttcctggaaaaacacaagatgaagttcaacagcatgaaaaatggtatcaaaagtttctggctctagaagaaagaaaaaaagagtcaattcagatttggaaaactaaaaagcagcaaaaaagggaggaaattttcaagttaaaggaaaaggcagacaacacacctgtgctttttcataataaacaagaggataatcaaaagcaaaaagaggaacaaagaaagaaacagaaattggcagttgaagcttggaagaaacagaaaagtatagaaatgtcaatgaaatgtgcttcccagttaaaagaagaagaagagaaagagaaaaaacatcagaaagaacgccagcgccagtttaagttaaaattactactagaaagttatacccagcagaagaaagaacaggaagaatttttgaggcttgaaaaggagataagggaaaaggcagaaaaggcagaaaaaaggaaaaatgctgctgatgaaatttccagatttcaagaaagagatttacataaacttgaactgaaaattctagatagacaggcaaaggaagatgaaaagtcacaaaaacaaagaagactggcaaaattaaaagaaaaggttgaaaacaatgttagtagagatccctctaggctttacaaacccaccaaaggttgggaagaacgaaccaaaaagataggaccaacaggctctgggccacttctacatatcccacatagggctattccaacctggagacaaggaatacagagaagagtatgagataatcaaattgctactcagttgataagaatgttaacatactaagttataccagggagagagtgactaaccacattctttaaatatcaatagcttagtcagattgattattgtgctatattgtgaattgagaggtattaagtttcatgaggctttgtcattagtattcctgcttctaccaagaaggtatttaatatatgtgttggcctattattgatgtaaaagttatttaaataagttaatgttagaaacattattcaatttaaatactgaaaacatttcaaagagattttgtttttgttatagcatagcaaagtaaattggaacaatcatacaatgacattttttaaaccaaaattttgtaacttttataacttggagttaagttagcttgagtaacaaaaaggtaaagtggtttttgtttagagttacgaaatgttagtactttttctatgtttaacaaattggcagtttgtcagttatgacatttttgtgtaataaatattttgtatttgtttgaagcatgctttgttttatatagagaatatttattttaaaaatatgtctctcatataccctattaattgtattattgatataatctttttggtttccttcagcaattccaaattttccttcagcctttctggatttcacagatttataaaatctttgtgtctttcacatc

SEQ ID NO: 120700 - DNA, 2069 bp, Homo sapiens
  Payload ID: 3641
  Gene Symbol: CCDC112
  Gene Name: coiled-coil domain containing 112
  Uniprot ID: Q8NEF3
  ENST ID: ENST00000395557
  CDS Start-End: 492-1832
gtttaacagcttttgcagagccgcctccatgtggtttcggagtcgaggaagacctgggtgggaacccggctctgccgcttcctagccgcgtgataagaacatatgctgtcggcgactcactttcttctctaaaaattgggaatagtaacatgcacctcccgagctttggactaacgttatgtctggggagcccctggcacagtgcttgattggagggggactctgtgctcagtaattggtggcagctctgttactgtaccggcgctgggaacacaaggagaaagacaatatgggatggtcggaggcagaggtgtttccagtgatcggcttaggaccgctttctaggtggtgaggacaagagtgatggctgttttagtacttcaggtggaattcgtccttttcatcttcagaactggaagcagaaagttaatcagactaagaaagcagaatttgtacgcacagcagaaaaatttaaaaatcaagtaattaacatggaaaaagataaacacagtcatttctacaaccaaaaaagtgacttcagaattgagcatagtatgctagaagaattggaaaataaattgattcacagcaggaaaacagaaagagcaaaaatccagcaacaattggccaaaatacataataatgtaaagaaacttcagcatcaattaaaagatgtgaagcctacacctgattttgttgagaagctcagagaaatgatggaagaaattgaaaatgcaattaacacttttaaagaagagcagaggttgatatatgaagagctaattaaagaagagaagacaactaataatgagttgagtgccatatcaagaaaaattgacacatgggctttgggtaattcagaaacagagaaagctttcagagcaatctcaagcaaagttcctgtagacaaagtaacaccaagtactcttccagaagaggtactagattttgaaaaattccttcagcaaacaggagggcgacaaggtgcctgggatgattatgatcaccagaactttgtaaaggtgagaaacaaacataaagggaagccaacatttatggaagaagttctagaacaccttcctggaaaaacacaagatgaagttcaacagcatgaaaaatggtatcaaaagtttctggctctagaagaaagaaaaaaagagtcaattcagatttggaaaactaaaaagcagcaaaaaagggaggaaattttcaagttaaaggaaaaggcagacaacacacctgtgctttttcataataaacaagaggataatcaaaagcaaaaagaggaacaaagaaagaaacagaaattggcagttgaagcttggaagaaacagaaaagtatagaaatgtcaatgaaatgtgcttcccagttaaaagaagaagaagagaaagagaaaaaacatcagaaagaacgccagcgccagtttaagttaaaattactactagaaagttatacccagcagaagaaagaacaggaagaatttttgaggcttgaaaaggagataagggaaaaggcagaaaaggcagaaaaaaggaaaaatgctgctgatgaaatttccagatttcaagaaagagatttacataaacttgaactgaaaattctagatagacaggcaaaggaagatgaaaagtcacaaaaacaaagaagactggcaaaattaaaagaaaaggttgaaaacaatgttagtagagatccctctaggctttacaaacccaccaaaggttgggaagaacgaaccaaaaagataggaccaacaggctctgggccacttctacatatcccacatagggctattccaacctggagacaaggaatacagagaagagtatgagataatcaaattgctactcagttgataagaatgttaacatactaagttataccagggagagagtgactaaccacattctttaaatatcaatagcttagtcagattgattattgtgctatattgtgaattgagaggtattaagtttcatgaggctttgtcattagtattcctgcttctaccaagaaggtatttaatatatgtgttggcctattattgatgtaaaagttatttaaataa

SEQ ID NO: 120701 - DNA, 2279 bp, Homo sapiens
  Payload ID: 3641
  Gene Symbol: CCDC112
  Gene Name: coiled-coil domain containing 112
  Uniprot ID: Q8NEF3
  ENST ID: ENST00000512261
  CDS Start-End: 418-1758
gcttgattggagggggactctgtgctcagtaattggtggcagctctgttactgtaccggcgctgggaacacaaggagaaagacaatatgggatggtcggaggcagaggtgtttccagtgatcggcttaggaccgctttctaggtggtgaggacaagagtgatggctgttttagtacttcaggtggaattcgtccttttcatcttcagaactggaagcagaaagttaatcagactaagaaagcagaatttgtacgcacagcagaaaaatttaaaaatcaggtgcaaactaacaatgagaactccttactgttagactaaattcaaggggcaaagatgtgctgaaagaagcctgaagtaaatgtagacaatagtcattaaatacccgaaatttcctgtctttgtagatgagtaattaacatggaaaaagataaacacagtcatttctacaaccaaaaaagtgacttcagaattgagcatagtatgctagaagaattggaaaataaattgattcacagcaggaaaacagaaagagcaaaaatccagcaacaattggccaaaatacataataatgtaaagaaacttcagcatcaattaaaagatgtgaagcctacacctgattttgttgagaagctcagagaaatgatggaagaaattgaaaatgcaattaacacttttaaagaagagcagaggttgatatatgaagagctaattaaagaagagaagacaactaataatgagttgagtgccatatcaagaaaaattgacacatgggctttgggtaattcagaaacagagaaagctttcagagcaatctcaagcaaagttcctgtagacaaagtaacaccaagtactcttccagaagaggtactagattttgaaaaattccttcagcaaacaggagggcgacaaggtgcctgggatgattatgatcaccagaactttgtaaaggtgagaaacaaacataaagggaagccaacatttatggaagaagttctagaacaccttcctggaaaaacacaagatgaagttcaacagcatgaaaaatggtatcaaaagtttctggctctagaagaaagaaaaaaagagtcaattcagatttggaaaactaaaaagcagcaaaaaagggaggaaattttcaagttaaaggaaaaggcagacaacacacctgtgctttttcataataaacaagaggataatcaaaagcaaaaagaggaacaaagaaagaaacagaaattggcagttgaagcttggaagaaacagaaaagtatagaaatgtcaatgaaatgtgcttcccagttaaaagaagaagaagagaaagagaaaaaacatcagaaagaacgccagcgccagtttaagttaaaattactactagaaagttatacccagcagaagaaagaacaggaagaatttttgaggcttgaaaaggagataagggaaaaggcagaaaaggcagaaaaaaggaaaaatgctgctgatgaaatttccagatttcaagaaagagatttacataaacttgaactgaaaattctagatagacaggcaaaggaagatgaaaagtcacaaaaacaaagaagactggcaaaattaaaagaaaaggttgaaaacaatgttagtagagatccctctaggctttacaaacccaccaaaggttgggaagaacgaaccaaaaagataggaccaacaggctctgggccacttctacatatcccacatagggctattccaacctggagacaaggaatacagagaagagtatgagataatcaaattgctactcagttgataagaatgttaacatactaagttataccagggagagagtgactaaccacattctttaaatatcaatagcttagtcagattgattattgtgctatattgtgaattgagaggtattaagtttcatgaggctttgtcattagtattcctgcttctaccaagaaggtatttaatatatgtgttggcctattattgatgtaaaagttatttaaataagttaatgttagaaacattattcaatttaaatactgaaaacatttcaaagagattttgtttttgttatagcatagcaaagtaaattggaacaatcatacaatgacattttttaaaccaaaattttgtaacttttataacttggagttaagttagcttgagtaacaaaaaggtaaagtggtttttgtttagagttacgaaatgttagtactttttctatgtttaacaaattggcagtttgtcagttatgacatttttgtgtaataaatattttgtatttgtttgaa

SEQ ID NO: 120702 - DNA, 2145 bp, Homo sapiens
  Payload ID: 3641
  Gene Symbol: CCDC112
  Gene Name: coiled-coil domain containing 112
  ENST ID: ENST00000506442
  CDS Start-End: 400-1644
tgcatcccgaccccgccctacatctcggccccgccctgcatcccggccaagcccgcagcgcagggagctgtctgcagaggccagggtgcgcctgccacgaatccccaggcaccggtggccgccgcggcccgagtagctcggcgggtaaacatggccgcactgacgacggttgtggtagcggctgcggccaccgcggtagccggggctgtggcaggggcgggcgcggccaccgggaccggcgtgggagcgacgccagcgcctcaacagagtgatggctgttttagtacttcaggtggaattcgtccttttcatcttcagaactggaagcagaaagttaatcagactaagaaagcagaatttgtacgcacagcagaaaaatttaaaaatcaagtaattaacatggaaaaagataaacacagtcatttctacaaccaaaaaagtgacttcagaattgagcatagtatgctagaagaattggaaaataaattgattcacagcaggaaaacagaaagagcaaaaatccagcaacaattggccaaaatacataataatgtaaagaaacttcagcatcaattaaaagatgtgaagcctacacctgattttgttgagaagctcagagaaatgatggaagaaattgaaaatgcaattaacacttttaaagaagagcagaggttgatatatgaagagctaattaaagaagagaagacaactaataatgagttgagtgccatatcaagaaaaattgacacatgggctttgggtaattcagaaacagagaaagctttcagagcaatctcaagcaaagttcctgtagacaaagtaacaccaagtactcttccagaagaggtactagattttgaaaaattccttcagcaaacaggagggcgacaaggtgcctgggatgattatgatcaccagaactttgtaaaggtgagaaacaaacataaagggaagccaacatttatggaagaagttctagaacaccttcctggaaaaacacaagatgaagttcaacagcatgaaaaatggtatcaaaagtttctggctctagaagaaagaaaaaaagagtcaattcagatttggaaaactaaaaagcagcaaaaaagggaggaaattttcaagttaaaggaaaaggcagacaacacacctgtgctttttcataataaacaagaggataatcaaaagcaaaaagaggaacaaagaaagaaacagaaattggcagttgaagcttggaagaaacagaaaagtatagaaatgtcaatgaaatgtgcttcccagttaaaagaagaagaagagaaagagaaaaaacatcagaaagaacgccagcgccagtttaagttaaaattactactagaaagttatacccagcagaagaaagaacaggaagaatttttgaggcttgaaaaggagataagggaaaaggcagaaaaggcagaaaaaaggaaaaatgctgctgatgaaatttccagatttcaagaaagagttgaaaacaatgttagtagagatccctctaggctttacaaacccaccaaaggttgggaagaacgaaccaaaaagataggaccaacaggctctgggccacttctacatatcccacatagggctattccaacctggagacaaggaatacagagaagagtatgagataatcaaattgctactcagttgataagaatgttaacatactaagttataccagggagagagtgactaaccacattctttaaatatcaatagcttagtcagattgattattgtgctatattgtgaattgagaggtattaagtttcatgaggctttgtcattagtattcctgcttctaccaagaaggtatttaatatatgtgttggcctattattgatgtaaaagttatttaaataagttaatgttagaaacattattcaatttaaatactgaaaacatttcaaagagattttgtttttgttatagcatagcaaagtaaattggaacaatcatacaatgacattttttaaaccaaaattttgtaacttttataacttggagttaagttagcttgagtaacaaaaaggtaaagtggtttttgtttagagttacgaaatgttagtactttttctatgtttaacaaattggcagtttgtcagttatgacatttttgtgtaataa

SEQ ID NO: 120703 - DNA, 5272 bp, Homo sapiens
  Payload ID: 3642
  Gene Symbol: CCDC113
  Gene Name: coiled-coil domain containing 113
  Uniprot ID: Q9H0I3
  ENST ID: ENST00000219299
  CDS Start-End: 80-1213
gcagccggagtgacgcgtggccgccggcacccggagctcctgggcacacggcattggcaggggccgcttcggcagagtgatgactgatgatgagtccgagagcgtcctctccgactcccatgaagggtcggagctggagctgcctgttatccagctgtgcgggctggtggaggagctcagctatgtaaactctgctctcaaaactgagactgagatgtttgagaaatattacgctaaactggagcccagggatcagcgacctccacgattatcagaaattaaaatatcagcagcagattatgcacagtttcgaggcaggcgtagatccaaatcccggacaggtatggaccgtggggtaggcctgactgccgaccaaaaacttgagctggtacaaaaagaggttgcggacatgaaggatgacttacgacacacaagggcaaatgcggaacgcgacctgcagcatcacgaggcgatcattgaggaggctgaaattcgatggagtgaagtttcgagagaagtgcatgagtttgaaaaagatattctaaaagccatatccaagaagaaagggagtattttggccactcagaaagtgatgaaatacattgaggacatgaaccgccggagggataatatgaaggagaaattacgtttgaaaaatgtttctctcaaagttcagaggaaaaaaatgcttttacaattgaggcagaaggaagaggtgagtgaggcccttcacgatgttgattttcagcagttgaagatagagaacgctcaatttcttgagacaattgaagcaaggaatcaagaactgacccagctaaagctgtcatctggaaacactctgcaggttctcaatgcctacaaaagcaagcttcacaaggcaatggaaatatacctcaatctggacaaggagatcttgctgagaaaagagctacttgaaaaaattgaaaaagaaacactacaagtagaggaggaccgggccaaagccgaggcagtgaataagaggctccggaagcagctggccgagttccgggcaccacaggtgatgacttacgtccgggagaagatcttaaatgcggacctggagaagagcatcaggatgtgggaaaggaaagtggagatagcagagatgtccttaaaaggccatcgtaaggcttggaatcgaatgaaaataaccaatgagcagttgcaggcagattaccttgctgggaagtagccagaggcaggccacggcttacagaccactacatgacctataaaagtaatcagctcctttctagtcacgggctcctctcactgttccctgtctgcctggtgttcccaaccccccacccaggctgcgtatcatctcctgggccacatctgcccatggggagtgttttcacagcctggcccctggaactgttaccactgaaagaaccacagggcactctaatggtttgacacttgttagccagcatttagttcacaagcatagtgaaagtgaccttcccacacctgggagagggatagaggagggagagccagcccagtgtatgccatgggcttatccgtggcagccccagtgtgcaactatcaaaaacagacatcaaaacagcatggtgaatgcctggcactcagcattctcagtttactcttcagtttggtggggtagctcctggactagatactgctgcaaaagaaaacaagcacgaaggaaaccaagatgatttcttcgggctgatacaacctgttctgacctgcaaaaatcctaccttcccccacctccccaccgtaatagtcatagtataagggttgtacagacgcctcaggagacctgcctgattcctttacatccttctccctaacatctagactatctctagagctgtttcctagtcgtgaatgcgtgatggtccttctttgtccctgcaagtatgatccaacatggcccagttcagaatcagaatatgtcttctgtgtcatggtggcatttggtccatggtgggagaaagaaatcaacttttcccagtggtggagtgaggacaggggagggccggccctctcagccttggatgtgatccatttgctgtagtcttccaccttggtgtacagaaacaggccagggcacgtctcaccaccgaagttcaggactcctctcagaacccacagatcgaactgctgtagctggcacatcattgggcttcctgggtccccctgtgataaaagacagaaggcttcaagtcttagaaaaactagtttttgttgtaaatctatccttgtgcaatatactgtttgttctagaaatgttttacgctggttctcactggaaatggggcaaattataggatacaatttcaaatctaggcagccaccaccacaaattccaacaagatgacttttccttttattatgcaaattagctgtggacttctgctgattgcctatagcttcctggttcatatttcattttcttgcccctttccagtcctttggccaaaccttccctctcttctggcttctcattcctgaaatgttggtgtttgtttctgttttgtcctgaaatgctcacattttcccttctctgccttgcttcaacccttagtgtaagccacttcctgccacctggcaactgcttaccagcctggctggccgtgctctgggtcttccctactcccaatggagcagtcctctgggacttgggaattctgccacatacactttatctaacttaaagtgacggagtagaagcttggcatcattagctagatatgggaccctggcaagtgaccaaatcctctctgagccaaggtgggaacacagttaatgcctgtaacacgtgctgagcacagcacagtgcctggcacacagcaaacactcaatagaatattagctaccatcatcctgatgtcgctataaaggccagcatttttctgaaaagttggggaaaatgggaaaagcaacaaggcaactagtaggtatcacttaccttacctgcccagaccccacacccctaggtctcctctcaaaggaattcctgcccctcccatggcccatcttggtccgagaagggggtggtcatccccaggctagccagccacttctgacctgtgtggcctgcctggctggaaggcccaggcaatgacatgttgctctcgcagtttggactgagacatggaatggggccgcaattaacaacaggaaacaatctgaacagactgaaccacgagcagcagaaaggcagaagagcagccgcttcagccccttaccatccgagacctgggtgtgtggtctgtcttggtcactctctctgtctctctttctctctttctttctctgtccccaaggctggagtgcagtggtgcaatcttggctcactgcaacctccacctctgggattcaagcaattctcccacctcagcctctcgagtagctggggctacagctatgcgccaccatgcccagctaatttttttttttttttttgagatggagtcttgctctgtcccccatgctggagtgcagtggcatgatctcggctcgctgcaacctcctcctcctgggttcaagcgattctcctacctcagcctccccagtagctgggattacaggcgcccaccaccacacctggctaatttttatttttagtagagatggggtttcaccatgttggccaggctggtctcgaactcctgacctcatgatccacccgcctcggcctccccaagtgttgggattacaggcgtgagccactgcacccggcctaatttctgtatttttagtagagatggggtttcacgatgttggccaggctggtcttaatctaacttcaagtgatctgcccgcctcgccctctcaaagtgctgggattaggcatgaactaccatgcccagtggggtattctctttcaataaagctcctcttttccaaggaagccacaccagaacagagatgaagaccagtgggaaaacatgggagcaactccgtgggcaggccagcggggaggccatgctgcaaagctgccgtgattccctggtgatctctcagcaggccaaggccagacatgtgaggaaggccttgaggacttcattctgtgcctctccttggatggaagggggtgctttagtgtggcactcctgacttttcaattgactggtgaagaggcccttgtgtgcacctcactatgtctgcctaggtcatgggggctccctggccaagaatgacgtggttccccctttcatcagtccgattcgcagtttgtcttaactgtagtggtatagccagagcaagaaaaagaatgtgatttaggacaaatgattggatgagtgattggtagatgtcctcagctatggcgtggttttgcaggtcactgttccacccacctgggcacagcatatacgctttttctcttccccataatcctgtaggggctgcgacttctgaagcacaagaggcagaggcgaacagctccaggtgcccctctggagctaccctacctcatctcccaagggagcggccacagcccagagtggggtctttcattttgtgatcttttcccttgacattcagcaaaagccctgacagtggtagaataaaggcaggatgggtgagtgcagagtgattctgcttttgttgggtttcagggaaacccataggcagattctgaacctggtggttgattctacatgtgggaattgtggctttgaagacctctggacatgagaacatatttccaagacagaggattctatggggacgggtcaccattaaatggtgtgcaagcataattctgttcaaaaatgaaggcatgtttagaggtgtgtcacagttaaaaaccaacctgaactttgcagttagattttaaaagatggtcagttagagtagaaatagcttagaatattccattgagtctaagatacagttagaaatcaacatctttgaaattagggtgtgtcttttaatcagttgatgtcagagtttaacgggcagcatttttttctttcttgggattacaaaaaatgatggtgcattctataattggcagcatcttagatctgaggaagtatgatacttgtttgacggaatggttgacggcagaattttgttaaaaagctatatcttcactgtattttaacacattatctaatttaagaaattgttaagatcccccacctggcagaggacccagtacaaaataggcactcaatagatgttacaccaactttggaagggcaaacatatttcttaatgagaggcagtccttcatgttttgcaataaaatgacttttaaaaaaaa

SEQ ID NO: 120704 - DNA, 5110 bp, Homo sapiens
  Payload ID: 3642
  Gene Symbol: CCDC113
  Gene Name: coiled-coil domain containing 113
  Uniprot ID: Q9H0I3
  ENST ID: ENST00000443128
  CDS Start-End: 80-1051
gcagccggagtgacgcgtggccgccggcacccggagctcctgggcacacggcattggcaggggccgcttcggcagagtgatgactgatgatgagtccgagagcgtcctctccgactcccatgaagggtcggagctggagctgcctgttatccagctgtgcgggctggtggaggagctcagctatgtaaactctgctctcaaaactgagactgagatgtttgagaaatattacgctaaactggagcccagggatcagcgacctccacgattatcagaaattaaaatatcagcagcagattatgcacaggcgatcattgaggaggctgaaattcgatggagtgaagtttcgagagaagtgcatgagtttgaaaaagatattctaaaagccatatccaagaagaaagggagtattttggccactcagaaagtgatgaaatacattgaggacatgaaccgccggagggataatatgaaggagaaattacgtttgaaaaatgtttctctcaaagttcagaggaaaaaaatgcttttacaattgaggcagaaggaagaggtgagtgaggcccttcacgatgttgattttcagcagttgaagatagagaacgctcaatttcttgagacaattgaagcaaggaatcaagaactgacccagctaaagctgtcatctggaaacactctgcaggttctcaatgcctacaaaagcaagcttcacaaggcaatggaaatatacctcaatctggacaaggagatcttgctgagaaaagagctacttgaaaaaattgaaaaagaaacactacaagtagaggaggaccgggccaaagccgaggcagtgaataagaggctccggaagcagctggccgagttccgggcaccacaggtgatgacttacgtccgggagaagatcttaaatgcggacctggagaagagcatcaggatgtgggaaaggaaagtggagatagcagagatgtccttaaaaggccatcgtaaggcttggaatcgaatgaaaataaccaatgagcagttgcaggcagattaccttgctgggaagtagccagaggcaggccacggcttacagaccactacatgacctataaaagtaatcagctcctttctagtcacgggctcctctcactgttccctgtctgcctggtgttcccaaccccccacccaggctgcgtatcatctcctgggccacatctgcccatggggagtgttttcacagcctggcccctggaactgttaccactgaaagaaccacagggcactctaatggtttgacacttgttagccagcatttagttcacaagcatagtgaaagtgaccttcccacacctgggagagggatagaggagggagagccagcccagtgtatgccatgggcttatccgtggcagccccagtgtgcaactatcaaaaacagacatcaaaacagcatggtgaatgcctggcactcagcattctcagtttactcttcagtttggtggggtagctcctggactagatactgctgcaaaagaaaacaagcacgaaggaaaccaagatgatttcttcgggctgatacaacctgttctgacctgcaaaaatcctaccttcccccacctccccaccgtaatagtcatagtataagggttgtacagacgcctcaggagacctgcctgattcctttacatccttctccctaacatctagactatctctagagctgtttcctagtcgtgaatgcgtgatggtccttctttgtccctgcaagtatgatccaacatggcccagttcagaatcagaatatgtcttctgtgtcatggtggcatttggtccatggtgggagaaagaaatcaacttttcccagtggtggagtgaggacaggggagggccggccctctcagccttggatgtgatccatttgctgtagtcttccaccttggtgtacagaaacaggccagggcacgtctcaccaccgaagttcaggactcctctcagaacccacagatcgaactgctgtagctggcacatcattgggcttcctgggtccccctgtgataaaagacagaaggcttcaagtcttagaaaaactagtttttgttgtaaatctatccttgtgcaatatactgtttgttctagaaatgttttacgctggttctcactggaaatggggcaaattataggatacaatttcaaatctaggcagccaccaccacaaattccaacaagatgacttttccttttattatgcaaattagctgtggacttctgctgattgcctatagcttcctggttcatatttcattttcttgcccctttccagtcctttggccaaaccttccctctcttctggcttctcattcctgaaatgttggtgtttgtttctgttttgtcctgaaatgctcacattttcccttctctgccttgcttcaacccttagtgtaagccacttcctgccacctggcaactgcttaccagcctggctggccgtgctctgggtcttccctactcccaatggagcagtcctctgggacttgggaattctgccacatacactttatctaacttaaagtgacggagtagaagcttggcatcattagctagatatgggaccctggcaagtgaccaaatcctctctgagccaaggtgggaacacagttaatgcctgtaacacgtgctgagcacagcacagtgcctggcacacagcaaacactcaatagaatattagctaccatcatcctgatgtcgctataaaggccagcatttttctgaaaagttggggaaaatgggaaaagcaacaaggcaactagtaggtatcacttaccttacctgcccagaccccacacccctaggtctcctctcaaaggaattcctgcccctcccatggcccatcttggtccgagaagggggtggtcatccccaggctagccagccacttctgacctgtgtggcctgcctggctggaaggcccaggcaatgacatgttgctctcgcagtttggactgagacatggaatggggccgcaattaacaacaggaaacaatctgaacagactgaaccacgagcagcagaaaggcagaagagcagccgcttcagccccttaccatccgagacctgggtgtgtggtctgtcttggtcactctctctgtctctctttctctctttctttctctgtccccaaggctggagtgcagtggtgcaatcttggctcactgcaacctccacctctgggattcaagcaattctcccacctcagcctctcgagtagctggggctacagctatgcgccaccatgcccagctaatttttttttttttttttgagatggagtcttgctctgtcccccatgctggagtgcagtggcatgatctcggctcgctgcaacctcctcctcctgggttcaagcgattctcctacctcagcctccccagtagctgggattacaggcgcccaccaccacacctggctaatttttatttttagtagagatggggtttcaccatgttggccaggctggtctcgaactcctgacctcatgatccacccgcctcggcctccccaagtgttgggattacaggcgtgagccactgcacccggcctaatttctgtatttttagtagagatggggtttcacgatgttggccaggctggtcttaatctaacttcaagtgatctgcccgcctcgccctctcaaagtgctgggattaggcatgaactaccatgcccagtggggtattctctttcaataaagctcctcttttccaaggaagccacaccagaacagagatgaagaccagtgggaaaacatgggagcaactccgtgggcaggccagcggggaggccatgctgcaaagctgccgtgattccctggtgatctctcagcaggccaaggccagacatgtgaggaaggccttgaggacttcattctgtgcctctccttggatggaagggggtgctttagtgtggcactcctgacttttcaattgactggtgaagaggcccttgtgtgcacctcactatgtctgcctaggtcatgggggctccctggccaagaatgacgtggttccccctttcatcagtccgattcgcagtttgtcttaactgtagtggtatagccagagcaagaaaaagaatgtgatttaggacaaatgattggatgagtgattggtagatgtcctcagctatggcgtggttttgcaggtcactgttccacccacctgggcacagcatatacgctttttctcttccccataatcctgtaggggctgcgacttctgaagcacaagaggcagaggcgaacagctccaggtgcccctctggagctaccctacctcatctcccaagggagcggccacagcccagagtggggtctttcattttgtgatcttttcccttgacattcagcaaaagccctgacagtggtagaataaaggcaggatgggtgagtgcagagtgattctgcttttgttgggtttcagggaaacccataggcagattctgaacctggtggttgattctacatgtgggaattgtggctttgaagacctctggacatgagaacatatttccaagacagaggattctatggggacgggtcaccattaaatggtgtgcaagcataattctgttcaaaaatgaaggcatgtttagaggtgtgtcacagttaaaaaccaacctgaactttgcagttagattttaaaagatggtcagttagagtagaaatagcttagaatattccattgagtctaagatacagttagaaatcaacatctttgaaattagggtgtgtcttttaatcagttgatgtcagagtttaacgggcagcatttttttctttcttgggattacaaaaaatgatggtgcattctataattggcagcatcttagatctgaggaagtatgatacttgtttgacggaatggttgacggcagaattttgttaaaaagctatatcttcactgtattttaacacattatctaatttaagaaattgttaagatcccccacctggcagaggacccagtacaaaataggcactcaatagatgttacaccaactttggaagggcaaacatatttcttaatgagaggcagtccttcatgttttgcaataaaatgacttttaaaaaaaa

SEQ ID NO: 120705 - DNA, 557 bp, Homo sapiens
  Payload ID: 3642
  Gene Symbol: CCDC113
  Gene Name: coiled-coil domain containing 113
  ENST ID: ENST00000561517
  CDS Start-End: 64-240
gtggccgccggcacccggagctcctgggcacacggcattggcaggggccgcttcggcagagtgatgactgatgatgagtccgagagcgtcctctccgactcccatgaagggtcggagctggagctgcctgttatccagctgtgcgggctggtggaggagctcaggcgatcattgaggaggctgaaattcgatggagtgaagtttcgagagaagtgcatgagtttgaaaaagatattctaaaagccatatccaagaagaaagggagtattttggccactcagaaagtgatgaaatacattgaggacatgaaccgccggagggataatatgaaggagaaattacgtttgaaaaatgtttctctcaaagttcagaggaaaaaaatgcttttacaattgaggcagaaggaagaggtgagtgaggcccttcacgatgttgattttcagcagttgaagatagagaacgctcaatttcttgagacaattgaagcaaggaatcaagaactgacccagctaaagctgtcatctggaaacactctgcaggttctcaatgcctacaaa

SEQ ID NO: 120706 - DNA, 556 bp, Homo sapiens
  Payload ID: 3642
  Gene Symbol: CCDC113
  Gene Name: coiled-coil domain containing 113
  ENST ID: ENST00000569374
  CDS Start-End: 365-556
aacatgatgttgaatgaacgaagccagtcacaaaggagaatgcactgcatgattctagaaaaataaatcttacaactggtgtccttataagaagaggaggggacacacaaagccacagggaagaagtccatgcaaagatggaggcagagattggagtgatgtagctacaatctaaggaatgacaagattgccaggagccaccagaagctgggaagaggcaagaaaagattcctcctagagccttcagagggagagtggctgtgcagacaccttgcctccagacttctggcctccggaactgtgagatgatacatttctgttgttcttatgctatgtaaactctgctctcaaaactgagactgagatgtttgagaaatattacgctaaactggagcccagggatcagcgacctccacgattatcagaaattaaaatatcagcagcagattatgcacagtttcgaggcaggcgtagatccaaatcccggacaggtatggaccgtggggtaggcctgactgccgaccaaaaacttgagctggtacaaaaagaggttgcg

SEQ ID NO: 120707 - DNA, 891 bp, Homo sapiens
  Payload ID: 3642
  Gene Symbol: CCDC113
  Gene Name: coiled-coil domain containing 113
  ENST ID: ENST00000616795
  CDS Start-End: 39-611
gggcacacggcattggcaggggccgcttcggcagagtgatgactgatgatgagtccgagagcgtcctctccgactcccatgaagggtcggagctggagctgcctgttatccagctgtgcgggctggtggaggagctcagctatgtaaactctgctctcaaaactgagactgagatgtttgagaaatattacgctaaactggagcccagggatcagcgacctccacgattatcagaaattaaaatatcagcagcagattatgcacagtttcgaggcaggcgtagatccaaatcccggacaggtatggaccgtggggtaggcctgactgccgaccaaaaacttgagctggtacaaaaagaggttgcggacatgaaggatgacttacgacacacaagggcaaatgcggaacgcgacctgcagcatcacgaggcgatcattgaggaggctgaaattcgatggagtgaagtttcgagagaagtgcatgagtttgaaaaagatattctaaaagccatatccaagaagaaagggagtattttggccactcagaaagtgatgaaatacattgaggacatgaaccgccggagggataatatgaaggagaattacgtttgaaaaatgtttctctcaaagttcagaggaaaaaaatgcttttacaattgaggcagaaggaagaggtgagtgaggcccttcacgatgttgattttcagcagttgaagatagagaacgctcaatttcttgagacaattgaagcaaggaatcaagaactgacccagctaaagctgtcatctggaaacactctgcaggttctcaatgcctacaaaagcaagcttcacaaggcaatggaaatatacctcaatctggacaaggagatcttgctgagaaaagagctact

SEQ ID NO: 120708 - DNA, 3215 bp, Homo sapiens
  Payload ID: 3643
  Gene Symbol: CCDC114
  Gene Name: coiled-coil domain containing 114
  Uniprot ID: Q96M63
  ENST ID: ENST00000315396
  CDS Start-End: 684-2696
cccagaactccctgtaggaattgccaaggggagaaggaaggaagggtgtttctacagagatgacagaatgtggctagagtaggctttctcaaccttggtactgttgactcttggggtgggataattctttgttgtgggggcagtcctgtgtgtcgtaggatgccaagcagtgtccatggcttctactcactggataccagtagccccctcccttctccacaagtcatgacaatgacaaatgtctctaggctgagcatgctggctcatgcctgtaatcccagcactttgggaagctgaggaaggaggatcacttgagcccaggagttcaagaccagcctgagcaacacagtgagacctcatctctacaaaaataaaataaaattagccaggtgtgatggcgtgcacccataatcccagctactcgggaggctgaggtgggcggatcacttgagcctgcgaggtggaggctgcagtgagctgagattgtgccactgcgctagagcctgggggacagagcgagaccctgtctagaaaaaaataagtctccagacattgccaaatgtttttggaaggcagaatcacccgctgattgaaaactactgggcctttggagatggggagcatacgggcaagactggagagtggattgggagctgagtaggctgcagcgacaatgcaaagtgatggaaggggagaggcgggcctacagcaaggaagtccaccagcgcatcaacaagcaacttgaggagatccggcgcttggaggaggtacggggcgatctccaggtgcagatcagcgcagcccagaaccaggtcaagcggcttcgggacagtcagcggctggagaacatggaccgcctgctgaagggccgggcccaggtgcaggcggagatcgaggagctgcaggagcagaccagggccctggacaagcagatccaggagtgggagacgcggatctttacccacagtaagaatgtcaggtccccgggattcatcctggatcagaaggtcaagatcaggcgaaggatcaggatcctagaaaaccagttggacagggtcacctgtcactttgacaaccagctggtacggaatgcggccctgcgggaggagctggatctgctgcggatcgacaggaaccgctatctgaacgtggaccgcaagctgaagaaggagatccaccacctgcatcacctggtcagcacccttatcctctcctccacctctgcctacgccgtcagggaggaggcgaaggccaagatgggcttgctgcgggagcgcgcggagaaagaggaggcccagagcgagatggaggcgcaggtcctgcagcggcagatcttgcacctggagcagctgcaccacttcctcaagctcaagaacaacgaccggcagccggatcccgatgtcctggagaagcgtgaaaagcaggccggggaggtggccgagggcgtctggaagacctcccaggagaggctggtgctttgctacgaggacgccctgaataaactgtcccagctgatgggggagagtgaccctgacctgttggtgcagaagtatctggagatcgaggagcgcaactttgctgagttcaacttcatcaacgagcagaacttggagctggagcatgtgcaggaagagatcaaggagatgcaggaggctttggtgagcgcacgtgccagcaaggatgaccagcatttgctgcaggagcagcagcagaaggtgttgcagcagcgcatggacaaggtgcactcggaggctgagcgccttgaggcccgcttccaggatgtgcggggacagctggagaagctcaaggctgatatccagctcctcttcaccaaggcccattgcgacagcagcatgatcgatgacctccttggggtcaagaccagcatgggagaccgggacatgggcctcttcctgagcctcattgagaagcggctggtggagctcctgacagtgcaggccttcctacatgcccagagcttcacctccctggccgacgctgccctcctagtgctgggccagagcctggaggaccttccgaagaagatggccccacttcagccccctgacactctagaagaccccccgggttttgaggccagcgatgactaccccatgagcagggaggagctgctgagccaagtggagaagctggtggagctccaggagcaggcggaggcgcagcgccagaaggacctggccgccgccgccgcgaagctggacggcaccctgagcgtggacctggccagcacccagagggccggctccagtaccgtcctggtgcccaccaggcacccccatgccatccccgggtccattttgagccacaagactagcagagaccgtggctctcttggccacgtcacttttggcggcctcagctccagcactgggcatttgcccagccacatcacgcacggtgaccccaacactggccacgtgaccttcggctccaccagtgcctcgagtgggggccacgtgaccttcagacccgtcagcgccagcagctacctgggctccactggatacgtggggtccagcaggggcggagaaaacacagagggtggtgtggagagcggaggcacagcgtctgattcgagcggaggcctcgggtccagcagagaccacgtctccagcaccggccctgcctccagcactggcccgggctcctccaccagcaaagactcccggggctaacacgaggggcacgcagcccccaccctgccctggctctctgtggggtctttttttgtgtctctacttcccctgtttgccttgtgggtctctgtctttttctcccagtggcaggcctctgtctttttgccccttcaactgttttcatctgcccttcatcaccgcctcacctgtgtctcccggttcctttctctctgctcctgacactgcttttccctctgactcctgatctcctgttctctgggcttcctggtcagtgtctgtccgtcttgtctccatatctgccccttccctgtctgctgagccctggccccctgtggatcccccacctcctgtttccggctctctctcctcatctccatctcccaggctctccacgcatcctgtgtccctgtctctgtagctccttactccccaagagccccccagtgctgacaggtgtgggaaaagtcagggcgaagacgccaggttcagcatgggaaaatgggactgtggaaataaagtatatgtgtggagagctgg

SEQ ID NO: 120709 - DNA, 1646 bp, Homo sapiens
  Payload ID: 3644
  Gene Symbol: CCDC115
  Gene Name: coiled-coil domain containing 115
  Uniprot ID: Q96NT0
  ENST ID: ENST00000259229
  CDS Start-End: 225-767
acttgggggctaattggagaaaccagttgattggttgcttccgtgctgcttctctaagggcgcttgcccttaaagaagctgacccagaggccttggtgctgccggcgtggggatccccagatgggaacgccccttgatggaggatctcgtgtgcctattggctgtcctgccaaactgcggagggtgacaaggaagaaggtggctccagatctggaggtgtgtccatggcggcgcttgacctgcgagcggagctggattcgctggtcctgcagctgcttggggacctggaggagctggaggggaaacgaacggtgttgaacgcccgggtggaggagggctggctctcgctcgccaaggctcgctacgcgatgggcgccaagtcggtagggcccctgcagtatgcttcccacatggagccccaggtctgcctccacgccagcgaggcccaggagggactccagaagttcaaggtggtgagagctggtgtccacgccccagaggaggtggggcctcgcgaagcaggtctgcggaggcgcaagggccccactaagaccccagaaccggagtcctctgaggcccctcaggaccccctgaactggtttggaatcctagttcctcacagtctacgtcaggctcaagcaagcttccgggatggcctgcagctggccgcagacatagccagcctccagaaccgcattgactggggtcgaagccagctccggggactccaagagaaactcaagcagctggagcctggggctgcctgacatgcgcgcaaagaggcagggcagcgagcacagctgttctccgacatggctacgtgatctcaggccttcttccttcacaattagctcttgcccctaccccacgccagctaatgccccttctgtgtccctgctctgcatgtttccattttccttaggtgtgaagtttgaagaggcaaacagtaattttgaaagccactactttgaaaccattctaaggcctgagttcccataggacacactcacataggcaggtacacgttagtcaacaattggaactgcctcttggatcactcagctgtgctttcatggctggatgatggaacactgtgcgaagagagatgggggccaggaagtagcgcttcatgcttagtacatcctccaaattgtctttgctggaggagaaaaccgtactcagccaaaagatcaggacaatatgacttgagtccacaaggacacaaacacctgagtagctgggcagcccttggcagggtctaagccaggaagtaaaaatgatctggcctagatatttaagggaactctaggaagaggcctaggtttttaaaatcctgtctctttgtcttaccataagaggctgagcctctcttcatttttttgaagggccacttgtgttttctgttctgggaacttcattcatttttctactgggttgttgatctttgcagtaatttctaggagctgtttatgtttggaggtaattggtcctttgtccatatatatgagatgtaagtcttattttccagtttatctttttgcttattttttttgactttttattgtaaaataaaacatcaaactgcacagaacagttgaatagcttaatgaataactacagtaaaagctatggtaaccactacccaa

SEQ ID NO: 120710 - DNA, 1247 bp, Homo sapiens
  Payload ID: 3644
  Gene Symbol: CCDC115
  Gene Name: coiled-coil domain containing 115
  ENST ID: ENST00000409127
  CDS Start-End: 96-623
gttgattggttgcttccgtgctgcttctctaagggcgcttgcccttaaagaagctgacccagaggccttggtgctgccggcgtggggatccccagatgggaacgccccttgatggaggatctcgtgtgcctattggctgtcctgccaaactgcggagggtgacaaggaagaaggtggctccagatctggagggctggctctcgctcgccaaggctcgctacgcgatgggcgccaagtcggtagggcccctgcagtatgcttcccacatggagccccaggtctgcctccacgccagcgaggcccaggagggactccagaagttcaaggtggtgagagctggtgtccacgccccagaggaggtggggcctcgcgaagcaggtctgcggaggcgcaagggccccactaagaccccagaaccggagtcctctgaggcccctcaggaccccctgaactggtttggaatcctagttcctcacagtctacgtcaggctcaagcaagcttccgggatggcctgcagctggccgcagacatagccagcctccagaaccgcattgactggggtcgaagccagctccggggactccaagagaaactcaagcagctggagcctggggctgcctgacatgcgcgcaaagaggcagggcagcgagcacagctgttctccgacatggctacgtgatctcaggccttcttccttcacaattagctcttgcccctaccccacgccagctaatgccccttctgtgtccctgctctgcatgtttccattttccttaggtgtgaagtttgaagaggcaaacagtaattttgaaagccactactttgaaaccattctaaggcctgagttcccataggacacactcacataggcaggtacacgttagtcaacaattggaactgcctcttggatcactcagctgtgctttcatggctggatgatggaacactgtgcgaagagagatgggggccaggaagtagcgcttcatgcttagtacatcctccaaattgtctttgctggaggagaaaaccgtactcagccaaaagatcaggacaatatgacttgagtccacaaggacacaaacacctgagtagctgggcagcccttggcagggtctaagccaggaagtaaaaatgatctggcctagatatttaagggaactctaggaagaggcctaggtttttaaaatcctgtctctttgtcttaccataagaggctgagcctctcttcatttttttgaagggccac

SEQ ID NO: 120711 - DNA, 1847 bp, Homo sapiens
  Payload ID: 3644
  Gene Symbol: CCDC115
  Gene Name: coiled-coil domain containing 115
  ENST ID: ENST00000442217
  CDS Start-End: 225-806
acttgggggctaattggagaaaccagttgattggttgcttccgtgctgcttctctaagggcgcttgcccttaaagaagctgacccagaggccttggtgctgccggcgtggggatccccagatgggaacgccccttgatggaggatctcgtgtgcctattggctgtcctgccaaactgcggagggtgacaaggaagaaggtggctccagatctggaggtgtgtccatggcggcgcttgacctgcgagcggagctggattcgctggtcctgcagctgcttggggacctggaggagctggaggggaaacgaacggtgttgaacgcccgggtggaggagggctggctctcgctcgccaaggctcgctacgcgatgggcgccaagtcggtagggcccctgcagtatgcttcccacatggagccccaggtctgcctccacgccagcgaggcccaggagggactccagaagttcaaggtggtgagagctggtgtccacgccccagaggaggtggggcctcgcgaagcaggtctgcggaggcgcaagggccccactaagaccccagaaccggagtcctctgaggcccctcaggaccccctgaactggtttggaatcctagttcctcacagtctacgtcaggctcaagcaagcttccgggatggtgtcctggaggccaagaagagaaagtgtttcctggagcgagtgatccaatgtgtggtcagccctgctgctgaacaggaggccgaagacgagagctgcccggaggactgggcagcagctgttccagcagagacatcagcaaaagccatctagaggtggatccagagtgtggactaacagagaaaagaagtggagggagagcaggcctgcagctggccgcagacatagccagcctccagaaccgcattgactggggtcgaagccagctccggggactccaagagaaactcaagcagctggagcctggggctgcctgacatgcgcgcaaagaggcagggcagcgagcacagctgttctccgacatggctacgtgatctcaggccttcttccttcacaattagctcttgcccctaccccacgccagctaatgccccttctgtgtccctgctctgcatgtttccattttccttaggtgtgaagtttgaagaggcaaacagtaattttgaaagccactactttgaaaccattctaaggcctgagttcccataggacacactcacataggcaggtacacgttagtcaacaattggaactgcctcttggatcactcagctgtgctttcatggctggatgatggaacactgtgcgaagagagatgggggccaggaagtagcgcttcatgcttagtacatcctccaaattgtctttgctggaggagaaaaccgtactcagccaaaagatcaggacaatatgacttgagtccacaaggacacaaacacctgagtagctgggcagcccttggcagggtctaagccaggaagtaaaaatgatctggcctagatatttaagggaactctaggaagaggcctaggtttttaaaatcctgtctctttgtcttaccataagaggctgagcctctcttcatttttttgaagggccacttgtgttttctgttctgggaacttcattcatttttctactgggttgttgatctttgcagtaatttctaggagctgtttatgtttggaggtaattggtcctttgtccatatatatgagatgtaagtcttattttccagtttatctttttgcttattttttttgactttttattgtaaaataaaacatcaaactgcacagaacagttgaatagcttaatgaataactacagtaaaagctatggtaaccactaccc

SEQ ID NO: 120712 - DNA, 2260 bp, Homo sapiens
  Payload ID: 3645
  Gene Symbol: CCDC116
  Gene Name: coiled-coil domain containing 116
  Uniprot ID: Q8IYX3
  ENST ID: ENST00000292779
  CDS Start-End: 162-2003
aagcaagtggaggccgccagccgacttcctcgcactgtgcagctgctccagtgagggcgcagactgtactggcctgtgcggagcaaggcggtgtttctgagaggaatgcgcagctgaagagagaggtgggcagcaggcccggtcacctgccaggtgaccacatggccaggtgccgccaccactcgggttacctggccgatgacgaggccagccactccatgtgcagtgcacgggtgcagctgcccaagaagccactggtcccagaaatgcggccagcctgcaagccgggccgtgtgccacacccaccatccacatgtggcagctcagcactccagggccaacgccgaaacaagaggcaccctcagccctttggccactttctggatttcctaactgagagccaggtcctggacagcctggagacagtggtggagaaggcgactgagcgcatggctgccatgaagacggaggctggggtgccgcttgtggaggtgcaggacccagtggaggtgccaagtggtggacggcgggcacatgcccggcccagcctcagcaccgtacaccggcaccgtgtacggccgaccctctgcactggacaccccaacaactacccatccagctccagctccatgtccaactgccatagcagcctcatggccggctgtctgggctcccacagccgggacagtgacctaggtgcccaaggctcattgccacctgtgagggacaaactcctgctggagaagaacctcaagcggctgctacagctggagagggaagggaaaggcctcagtcagtcctgctcccagagggactccctgctgtgggattcgctgggtagccagaccagctttcagtggacacaggagcagcccttgtcctggttctcagggctgctgggctcaagctctggcgtgcctgaagcatcagagccgaggcctggagaacaggagccaatcttccgcaagcgagagttcaataaggagatcaagtcattactgagccagctggagtccctcgacctgcctggctactgtccgctccgtgagccccatcgcacgctgaacttcctggctgaccaccgcctcttccctgccctgcaaagcgtggtcagccaggctgtggataagctccgtggcgcccactgccgcgacggccgtcctctgttccccaccagcttggagcccacctcagatctgccgcctctgggctctgagccagctaaacccaccaatggcgggcagccctatgcttccccccgccccacagtctccagccccaagatgcttcagagaaaacgcaaggacagaggaggctccccctccatgtctagtgcccaggtggccaccagattcaaactcaagagcccctgcagcagcagcaggttcacgaagaagaagccgctgccctccatctcgtcgaagtccagcatgtctcacttctccaaccgcctttatgaggagctcgccgacttcctgacccagcaggcagcctccttggtcatccgcaagtacgagttcgaaaaggacctcagtaagcagctgggcttcttctccttccccatcacccacgtgctcagggacctttccctgggcttaaagaaggtaaaaggctcccgcatccacctgtcctcggagacccaccggagctgcctgctgcgtaaactggaggagtccaaaagggcccggcaggcctcccggctcagcacctcccactgcagcacagagacaccctctgtgcagcaggaaccagccacccacactgcccaggaccaggccacagagccctgccgctccctctacaccaacttgccagccagccggcagctcagccctttggagcccaagctctacatgtctgcctgcaccggcatgggttccagtccccccaagtccaaggacatggacaatgagggccgtgataaagccgagattgaagatgaagatgaggatgagttcaaggatgaagaccaggatgaggacaaggatgaggatggagtctagagcctcccagagcctggagaggaggcctcggtcagccactccgtggacgtgggccacggtgacccaccatgaagtccccactagccactcgattccctgctctgtcagagttgctgcacatcacaccagcccctgccaagagcaggagtcaccacaggctgaatgcccacgaggagctctgctgagactctcaagggagccagtgaaagaaatagaaataaagcctgtgttgctgggacacaggtttgctgtcctga

SEQ ID NO: 120713 - DNA, 572 bp, Homo sapiens
  Payload ID: 3645
  Gene Symbol: CCDC116
  Gene Name: coiled-coil domain containing 116
  ENST ID: ENST00000425975
  CDS Start-End: 115-572
ggtatgcaaataagcaagtggaggccgccagccgacttcctcgcactgtgcagctgctccagtgagggcgcagactgtactggcctgtgcggagcaaggcggtgtttctgacgcatgggggccatggagcagaggaagggctggatgcatgaaggaggcggggtgcggggagcgagggacccgcagactccagggccacagatgcgtggacctattggagaccctcaggttgtctccccaccccacgcagagaggaatgcgcagctgaagagagaggtgggcagcaggcccggtcacctgccaggtgaccacatggccaggtgccgccaccactcgggttacctggccgatgacgaggccagccactccatgtgcagtgcacgggtgcagctgcccaagaagccactggtcccagaaatgcggccagcctgcaagccgggccgtgtgccacacccaccatccacatgtggcagctcagcactccagggccaacgccgaaacaagaggcaccctcagccctttggccactttctggatttcctaactgagagccaggtcctggacagcctgga

SEQ ID NO: 120714 - DNA, 1913 bp, Homo sapiens
  Payload ID: 3645
  Gene Symbol: CCDC116
  Gene Name: coiled-coil domain containing 116
  Uniprot ID: Q8IYX3
  ENST ID: ENST00000607942
  CDS Start-End: 175-1755
gtggtatgcaaataagcaagtggaggccgccagccgacttcctcgcactgtgcagctgctccagtgagggcgcagactgtactggcctgtgcggagcaaggcggtgtttctgagaggaatgcgcagctgaagagagaggtgggcagcaggcccggtcacctgccaggtgaccacatggccaggtgccgccaccactcgggttacctggccgatgacgaggccagccactccatgtgcagtgcacgggtgcagctgcccaagaagccactggtcccagaaatgcggccagcctgcaagccgggccgtgtgccacacccaccatccacatgtggcagctcagcactccagggccaacgccgaaacaagaggcaccctcagccctttggccactttctggatttcctaactgagagccaggtcctggacagcctggagacagtggtggagaaggcgactgagcgcatggctgccatgaagacggaggctggggtgccgcttgtggaggtgcaggacccagtggaggtgccaagtggtggacggcgggcacatgcccggcccagcctcagcaccgtacaccggcaccgtgtacggccgaccctctgcactggacaccccaacaactacccatccagctccagctccatgtccaactgccatagcagcctcatggccggctgtctgggctcccacagccgggacagtgacctaggtgcccaaggctcattgccacctgtgagggacaaactcctgctggagaagaacctcaagcggctgctacagctggagagggaagggaaaggcctcagtcagtcctgctcccagagggactccctgctgtgggattcgctgggtagccagaccagctttcagtggacacaggagcagcccttgtcctggttctcagggctgctgggctcaagctctggcgtgcctgaagcatcagagccgaggcctggagaacaggagccaatcttccgcaagcgagagttcaataaggagatcaagtcattactgagccagctggagtccctcgacctgcctggctactgtccgctccgtgagccccatcgcacgctgaacttcctggctgaccaccgcctcttccctgccctgcaaagcgtggtcagccaggctgtggataagctccgtggcgcccactgccgcgacggccgtcctctgttccccaccagcttggagcccacctcagatctgccgcctctgggctctgagccagctaaacccaccaatggcgggcagccctatgcttccccccgccccacagtctccagccccaagatgcttcagagaaaacgcaaggacagaggaggctccccctccatgtctagtgcccaggtggccaccagattcaaactcaaggtgacacccacggagaagcccaatgtccccagcccctcactccactccagggaggaggcacctgactcagatcccaaattacaaaacccacctgtttccctgagctccagccagagggcccagccctggcagggcctgcacctcaccctgcccacgccagggattgtggtggaggtggcctgcagccagggccacctcaggggccctgtcacacctccactttcctccccctacccccgctcttcctgctaccttctccctgagctctctccagttgcctcttcatctcccgcctcactgtgtccagaggtgacctcctcaaaagtaggaccgggcatgagtttgcaggagaagggctccttgacccaccactcctagcagccactgtcactaacaggtgctcaaggtcaaggtctcttgccctgcactgtggaaacctcctgggcaggggtcaagctgatgggggcccatgaatcctggcctagctattaccaggtgttgtcacagataaataaaggctattttttatgctgggt

SEQ ID NO: 120715 - DNA, 3985 bp, Homo sapiens
  Payload ID: 3646
  Gene Symbol: CCDC117
  Gene Name: coiled-coil domain containing 117
  Uniprot ID: Q8IWD4
  ENST ID: ENST00000249064
  CDS Start-End: 177-1016
aacaaatcccggcatgcccccgagcggcctgaggtggagggttctagaaggcgtgacgtggggtcgagagcgggatccgaggctggcgggttttggcagtagctgtggctgcggctgccgggcctggggacgcgggcggccgaggccgccgtcgcagcctcctcgtctcgccggctatggctgcgctcggccggcccttcagcggcctccctctgagcggcggctcggacttcctgcagccgccgcagccggccttccccggccgggccttcccgccgggggctgacggcgccgagttggccccgcggccgggacctcgcgcagtccctagcagtcccgctgggagtgcggcgcgcggacgtgtttctgttcactgtaaaaagaaacacaagcgagaggaggaggaggatgatgattgtccagtaagaaagaaaaggataactgaagcagagctctgtgctggtcctaatgactggattctttgtgcacatcaggatgtagaggggcatggagtaaatcccagtgttagtggcctttccatacctgggatattagatgttatttgtgaagaaatggatcagacaactggagaaccacagtgtgaagttgcccgaaggaagcttcaggagattgaggacaggataattgatgaagatgaagaagttgaagctgacagaaatgttaaccatctccccagtcttgtcctttctgataccatgaaaacaggtttgaagagggaatttgatgaagtttttacaaagaaaatgattgagtctatgagccgtccttccatggagcttgttctctggaaacccctccctgaactcctttctgataagccaaagccatcctctaatactaagaactatacaggagagagccaagctaagcatgtagctgctggcactgccttccctcagagaactgaactgttttcggaacctcggccaacagggatgtctctttataatagtttggagacagctactagcacagaagaagagatggaactctagaaaccaatttctacactaaagttgtcaaatgttagaagaatcctgtgttcagttatgagactctttgcatagtatagggacttgaaagttttatgagacgggtgtaataatatctccacctgtgatttgggggtgggactcttattttgggtagccatttattgacttcacctttttgccaaggacgtttgtctcaagggaaaagcagttttctgtggggcttattaaaggaatgttggtttacattgtcttcaaagacaagtatagaagctgtatgtgtaagggtgacttaaatcatatgtcacattgtctaaactattcagacacttggagaatattctccttgaattaaaaaagatgattaagaaggatgctcctacaactgtatcctgacagttaagtcacagcttaatgtgtagatatgagctgtttacagtggtgactatatataattggggagaagaagggaagagagcagcagtagcttaagcctgttgctaagaaatttaatttcttagcaacttgtaatttagttatcaattcaatatagctctgttgattaaatagccgatagtattgtggctctcctctttgactatgaaaatatagagaaagttttttctttaaggcttttttgccttgtgccactgttgctccttggtttcccttgcgtaattgataagcccagttattcagtaatgtttacaaattaattgactttgatagttaaaagattatgaggtaacccatctgcaatttgcctgtgggagaagcatcctttagttcatcttaaggaagtgctttatcagctaaacccaacattgataactttggtaatttttttaaaaagttatacttgtattagcaagtttttttttttttcccccaccgcaacctccatctcccgggttcaagcaattctcctgcctcaccctcccaagtagctgggattacaggtgcccacctccacgcccagctaatttttgtatttttaatagagaccggttttgccatgttggccaggctggtctcgaactcctgacctcaggtgatctgcccaccccagcctcccaaaatgctgggattacaggcgtgagccacggcacgcagccagcaagttgtttttaaatgttaatatagaaaacagtgaaggattagctgaaaatatatgagcaggtgacattgaggtttactgaaatagccaatttgactggtgcttagactattgtgcagtaaacctaaaaggtagtggagaattgcttcctgctagcaggaagccttcatcttcttgagtacccaaaccaggcttcaggtgtcctttgaggatagccaggtttgaaatttttagtttctcaggaagagctcttctatgtggcaggggctgatagggcaaaataaaatgacaatttctttattgctacagagtatcctctataagttattaaacgagtgtaatggtataatgcccttccatcacacaacaggacaccaccccagttttgttttctgggtttcttccccctttgtaggaatcagataccttttgtagaaaaaaatggcttatgccacgtaaaggtgaatttttagaaaccaccttctaggcgtttttggaacccttactgaaatccctccccttgttacagatggcgtagaagtcacaagtctgttaattggactgttgcttctttgcctgttcctgctttctctttctgtctggatagtcaggaaaagatttaatgtttaatatttaaacaaaatatttaatgtctatacagtaaaattattcaaacttcaaaccagtattgaaagcagttggaaaccagctaatagtttcttaatctcagatttcgagatgaatgtaaactgtattcttttgaaatgtgcaagtgtttgattcatgccatttgataaacttctgccttgtagtcattgtttgatgggaccaacttgtaaagtatgagccttaaataaatctccatgctgaaaaatgtgttctaatgcaacacaaaaacatgaagtgactgcccagaggtagagttagtgtttaggtggaaagggagatgacagctttccaaagaaggacctaaaacacaccaagattgtcttctacaggaattgctgggcaggtctccgactaaaggtcttatgatgaaaaggaagaaacaagcccccaacacaaggctctgatactactggtaaatgtaggagagaattaagaatctgttaattaaaatccaaacagagcttatttcagtagtcaagttacctgacatgataattatttctgcaggataattgatgttttatgttcttttttggactttatcttcttgcaaaaatttctacaaaaattgttttcttcatccttgtggtgcttattcatctgagccgtctccacagtcccaatgcctctgctttttgttttacttttgtagcataaggtttttgcttttgctttgccttaagagttccctagggagttaccagggcttttcgttttgtgtagcttttgcagcatggatcaaacattggcttactgtgctaatgtgtgaagagaaaaaattctctaaagcaggtgagctttaatgaacaaatgtgtattttatctgagtttgagtagggtgcgttgtggattttgttttttgggttttttttttttttttgtaattatatgaagaaagtccagttctcataaatattgatcacttaaaaaacttactctttcttgaaaaggtacacatgtaaaatttaggaaaataactaaagtaggggctggaaccataagaagaatgtttatcagcacgttcatttattattttggatttggaacttggctttgtttttcaatagtgacaagaatggttcagttctaggaatgttctggaagatgctgttaattttactttaaaatgagaatctggtgttactgtattttatcgttttcaataaaacttcttaagtgttttgga

SEQ ID NO: 120716 - DNA, 3766 bp, Homo sapiens
  Payload ID: 3646
  Gene Symbol: CCDC117
  Gene Name: coiled-coil domain containing 117
  Uniprot ID: Q8IWD4
  ENST ID: ENST00000421503
  CDS Start-End: 177-791
aacaaatcccggcatgcccccgagcggcctgaggtggagggttctagaaggcgtgacgtggggtcgagagcgggatccgaggctggcgggttttggcagtagctgtggctgcggctgccgggcctggggacgcgggcggccgaggccgccgtcgcagcctcctcgtctcgccggctatggctgcgctcggccggcccttcagcggcctccctctgagcggcggctcggacttcctgcagccgccgcagccggccttccccggccgggccttcccgccgggggctgacggcgccgagttggccccgcggccgggacctcgcgcagtccctagcagtcccgctgggagtgcggcgcgcggacgtgtttctgttcactgtaaaaagaaacacaagcgagaggaggaggaggatgatgagataattgatgaagatgaagaagttgaagctgacagaaatgttaaccatctccccagtcttgtcctttctgataccatgaaaacaggtttgaagagggaatttgatgaagtttttacaaagaaaatgattgagtctatgagccgtccttccatggagcttgttctctggaaacccctccctgaactcctttctgataagccaaagccatcctctaatactaagaactatacaggagagagccaagctaagcatgtagctgctggcactgccttccctcagagaactgaactgttttcggaacctcggccaacagggatgtctctttataatagtttggagacagctactagcacagaagaagagatggaactctagaaaccaatttctacactaaagttgtcaaatgttagaagaatcctgtgttcagttatgagactctttgcatagtatagggacttgaaagttttatgagacgggtgtaataatatctccacctgtgatttgggggtgggactcttattttgggtagccatttattgacttcacctttttgccaaggacgtttgtctcaagggaaaagcagttttctgtggggcttattaaaggaatgttggtttacattgtcttcaaagacaagtatagaagctgtatgtgtaagggtgacttaaatcatatgtcacattgtctaaactattcagacacttggagaatattctccttgaattaaaaaagatgattaagaaggatgctcctacaactgtatcctgacagttaagtcacagcttaatgtgtagatatgagctgtttacagtggtgactatatataattggggagaagaagggaagagagcagcagtagcttaagcctgttgctaagaaatttaatttcttagcaacttgtaatttagttatcaattcaatatagctctgttgattaaatagccgatagtattgtggctctcctctttgactatgaaaatatagagaaagttttttctttaaggcttttttgccttgtgccactgttgctccttggtttcccttgcgtaattgataagcccagttattcagtaatgtttacaaattaattgactttgatagttaaaagattatgaggtaacccatctgcaatttgcctgtgggagaagcatcctttagttcatcttaaggaagtgctttatcagctaaacccaacattgataactttggtaatttttttaaaaagttatacttgtattagcaagtttttttttttttcccccaccgcaacctccatctcccgggttcaagcaattctcctgcctcaccctcccaagtagctgggattacaggtgcccacctccacgcccagctaatttttgtatttttaatagagaccggttttgccatgttggccaggctggtctcgaactcctgacctcaggtgatctgcccaccccagcctcccaaaatgctgggattacaggcgtgagccacggcacgcagccagcaagttgtttttaaatgttaatatagaaaacagtgaaggattagctgaaaatatatgagcaggtgacattgaggtttactgaaatagccaatttgactggtgcttagactattgtgcagtaaacctaaaaggtagtggagaattgcttcctgctagcaggaagccttcatcttcttgagtacccaaaccaggcttcaggtgtcctttgaggatagccaggtttgaaatttttagtttctcaggaagagctcttctatgtggcaggggctgatagggcaaaataaaatgacaatttctttattgctacagagtatcctctataagttattaaacgagtgtaatggtataatgcccttccatcacacaacaggacaccaccccagttttgttttctgggtttcttccccctttgtaggaatcagataccttttgtagaaaaaaatggcttatgccacgtaaaggtgaatttttagaaaccaccttctaggcgtttttggaacccttactgaaatccctccccttgttacagatggcgtagaagtcacaagtctgttaattggactgttgcttctttgcctgttcctgctttctctttctgtctggatagtcaggaaaagatttaatgtttaatatttaaacaaaatatttaatgtctatacagtaaaattattcaaacttcaaaccagtattgaaagcagttggaaaccagctaatagtttcttaatctcagatttcgagatgaatgtaaactgtattcttttgaaatgtgcaagtgtttgattcatgccatttgataaacttctgccttgtagtcattgtttgatgggaccaacttgtaaagtatgagccttaaataaatctccatgctgaaaaatgtgttctaatgcaacacaaaaacatgaagtgactgcccagaggtagagttagtgtttaggtggaaagggagatgacagctttccaaagaaggacctaaaacacaccaagattgtcttctacaggaattgctgggcaggtctccgactaaaggtcttatgatgaaaaggaagaaacaagcccccaacacaaggctctgatactactggtaaatgtaggagagaattaagaatctgttaattaaaatccaaacagagcttatttcagtagtcaagttacctgacatgataattatttctgcaggataattgatgttttatgttcttttttggactttatcttcttgcaaaaatttctacaaaaattgttttcttcatccttgtggtgcttattcatctgagccgtctccacagtcccaatgcctctgctttttgttttacttttgtagcataaggtttttgcttttgctttgccttaagagttccctagggagttaccagggcttttcgttttgtgtagcttttgcagcatggatcaaacattggcttactgtgctaatgtgtgaagagaaaaaattctctaaagcaggtgagctttaatgaacaaatgtgtattttatctgagtttgagtagggtgcgttgtggattttgttttttgggttttttttttttttttgtaattatatgaagaaagtccagttctcataaatattgatcacttaaaaaacttactctttcttgaaaaggtacacatgtaaaatttaggaaaataactaaagtaggggctggaaccataagaagaatgtttatcagcacgttcatttattattttggatttggaacttggctttgtttttcaatagtgacaagaatggttcagttctaggaatgttctggaagatgctgttaattttactttaaaatgagaatctggtgttactgtattttatcgttttcaataaaacttcttaagtgttttggacttttg

SEQ ID NO: 120717 - DNA, 3937 bp, Homo sapiens
  Payload ID: 3646
  Gene Symbol: CCDC117
  Gene Name: coiled-coil domain containing 117
  Uniprot ID: Q8IWD4
  ENST ID: ENST00000448492
  CDS Start-End: 177-962
aacaaatcccggcatgcccccgagcggcctgaggtggagggttctagaaggcgtgacgtggggtcgagagcgggatccgaggctggcgggttttggcagtagctgtggctgcggctgccgggcctggggacgcgggcggccgaggccgccgtcgcagcctcctcgtctcgccggctatggctgcgctcggccggcccttcagcggcctccctctgagcggcggctcggacttcctgcagccgccgcagccggccttccccggccgggccttcccgccgggggctgacggcgccgagttggccccgcggccgggacctcgcgcagtccctagcagtcccgctgggagtgcggcgcgcggacgttgtccagtaagaaagaaaaggataactgaagcagagctctgtgctggtcctaatgactggattctttgtgcacatcaggatgtagaggggcatggagtaaatcccagtgttagtggcctttccatacctgggatattagatgttatttgtgaagaaatggatcagacaactggagaaccacagtgtgaagttgcccgaaggaagcttcaggagattgaggacaggataattgatgaagatgaagaagttgaagctgacagaaatgttaaccatctccccagtcttgtcctttctgataccatgaaaacaggtttgaagagggaatttgatgaagtttttacaaagaaaatgattgagtctatgagccgtccttccatggagcttgttctctggaaacccctccctgaactcctttctgataagccaaagccatcctctaatactaagaactatacaggagagagccaagctaagcatgtagctgctggcactgccttccctcagagaactgaactgttttcggaacctcggccaacagggatgtctctttataatagtttggagacagctactagcacagaagaagagatggaactctagaaaccaatttctacactaaagttgtcaaatgttagaagaatcctgtgttcagttatgagactctttgcatagtatagggacttgaaagttttatgagacgggtgtaataatatctccacctgtgatttgggggtgggactcttattttgggtagccatttattgacttcacctttttgccaaggacgtttgtctcaagggaaaagcagttttctgtggggcttattaaaggaatgttggtttacattgtcttcaaagacaagtatagaagctgtatgtgtaagggtgacttaaatcatatgtcacattgtctaaactattcagacacttggagaatattctccttgaattaaaaaagatgattaagaaggatgctcctacaactgtatcctgacagttaagtcacagcttaatgtgtagatatgagctgtttacagtggtgactatatataattggggagaagaagggaagagagcagcagtagcttaagcctgttgctaagaaatttaatttcttagcaacttgtaatttagttatcaattcaatatagctctgttgattaaatagccgatagtattgtggctctcctctttgactatgaaaatatagagaaagttttttctttaaggcttttttgccttgtgccactgttgctccttggtttcccttgcgtaattgataagcccagttattcagtaatgtttacaaattaattgactttgatagttaaaagattatgaggtaacccatctgcaatttgcctgtgggagaagcatcctttagttcatcttaaggaagtgctttatcagctaaacccaacattgataactttggtaatttttttaaaaagttatacttgtattagcaagtttttttttttttcccccaccgcaacctccatctcccgggttcaagcaattctcctgcctcaccctcccaagtagctgggattacaggtgcccacctccacgcccagctaatttttgtatttttaatagagaccggttttgccatgttggccaggctggtctcgaactcctgacctcaggtgatctgcccaccccagcctcccaaaatgctgggattacaggcgtgagccacggcacgcagccagcaagttgtttttaaatgttaatatagaaaacagtgaaggattagctgaaaatatatgagcaggtgacattgaggtttactgaaatagccaatttgactggtgcttagactattgtgcagtaaacctaaaaggtagtggagaattgcttcctgctagcaggaagccttcatcttcttgagtacccaaaccaggcttcaggtgtcctttgaggatagccaggtttgaaatttttagtttctcaggaagagctcttctatgtggcaggggctgatagggcaaaataaaatgacaatttctttattgctacagagtatcctctataagttattaaacgagtgtaatggtataatgcccttccatcacacaacaggacaccaccccagttttgttttctgggtttcttccccctttgtaggaatcagataccttttgtagaaaaaaatggcttatgccacgtaaaggtgaatttttagaaaccaccttctaggcgtttttggaacccttactgaaatccctccccttgttacagatggcgtagaagtcacaagtctgttaattggactgttgcttctttgcctgttcctgctttctctttctgtctggatagtcaggaaaagatttaatgtttaatatttaaacaaaatatttaatgtctatacagtaaaattattcaaacttcaaaccagtattgaaagcagttggaaaccagctaatagtttcttaatctcagatttcgagatgaatgtaaactgtattcttttgaaatgtgcaagtgtttgattcatgccatttgataaacttctgccttgtagtcattgtttgatgggaccaacttgtaaagtatgagccttaaataaatctccatgctgaaaaatgtgttctaatgcaacacaaaaacatgaagtgactgcccagaggtagagttagtgtttaggtggaaagggagatgacagctttccaaagaaggacctaaaacacaccaagattgtcttctacaggaattgctgggcaggtctccgactaaaggtcttatgatgaaaaggaagaaacaagcccccaacacaaggctctgatactactggtaaatgtaggagagaattaagaatctgttaattaaaatccaaacagagcttatttcagtagtcaagttacctgacatgataattatttctgcaggataattgatgttttatgttcttttttggactttatcttcttgcaaaaatttctacaaaaattgttttcttcatccttgtggtgcttattcatctgagccgtctccacagtcccaatgcctctgctttttgttttacttttgtagcataaggtttttgcttttgctttgccttaagagttccctagggagttaccagggcttttcgttttgtgtagcttttgcagcatggatcaaacattggcttactgtgctaatgtgtgaagagaaaaaattctctaaagcaggtgagctttaatgaacaaatgtgtattttatctgagtttgagtagggtgcgttgtggattttgttttttgggttttttttttttttttgtaattatatgaagaaagtccagttctcataaatattgatcacttaaaaaacttactctttcttgaaaaggtacacatgtaaaatttaggaaaataactaaagtaggggctggaaccataagaagaatgtttatcagcacgttcatttattattttggatttggaacttggctttgtttttcaatagtgacaagaatggttcagttctaggaatgttctggaagatgctgttaattttactttaaaatgagaatctggtgttactgtattttatcgttttcaataaaacttcttaagtgttttggacttttg

SEQ ID NO: 120718 - DNA, 463 bp, Homo sapiens
  Payload ID: 3646
  Gene Symbol: CCDC117
  Gene Name: coiled-coil domain containing 117
  ENST ID: ENST00000444523
  CDS Start-End: 123-463
gacgtggggtcgagagcgggatccgaggctggcgggttttggcagtagctgtggctgcggctgccgggcctggggacgcgggcggccgaggccgccgtcgcagcctcctcgtctcgccggctatggctgcgctcggccggcccttcagcggcctccctctgagcggcggctcggacttcctgcagccgccgcagccggccttccccggccgggccttcccgccgggggctgacggcgccgagttggccccgcggccgggacctcgcgcagtccctagcagtcccgctgggagtgcggcgcgcggacgttgtccagtaagaaagaaaaggataactgaagcagagctctgtgctggtcctaatgactggattctttgtgcacatcaggatgtagaggggcatggagtaaatcccagtgttagtggcctttccatacctgggatattagatgttatttgtgaaga

SEQ ID NO: 120719 - DNA, 1026 bp, Homo sapiens
  Payload ID: 3646
  Gene Symbol: CCDC117
  Gene Name: coiled-coil domain containing 117
  ENST ID: ENST00000453543
  CDS Start-End: 147-335
gaggtggagggttctagaaggcgtgacgtggggtcgagagcgggatccgaggctggcgggttttggcagtagctgtggctgcggctgccgggcctggggacgcgggcggccgaggccgccgtcgcagcctcctcgtctcgccggctatggctgcgctcggccggcccttcagcggcctccctctgagcggcggctcggacttcctgcagccgccgcagccggccttccccggccgggccttcccgccgggggctgacggcgccgagttggccccgcggccgggacctcgcgcagtccctagcagtcccgctgggagtgcggcgcgcggacggtgaggagcccgtcgggcgcagggcgcagggcgggcgggcgggcgggcaggctgggcgcccctcgcggcgggcgcgggcaggggcgcgggctccgcgccggggctttttgactccctccccacggccctccgcgggagcttcgcagcccagtttacagatgaagaaactgatccccggagacgttaacttgtttctgttcactgtaaaaagaaacacaagcgagaggaggaggaggatgatgattgtccagtaagaaagaaaaggataactgaagcagagctctgtgctggtcctaatgactggattctttgtgcacatcaggatgtagaggggcatggagtaaatcccagtgttagtggcctttccatacctgggatattagatgttatttgtgaagaaatggatcagacaactggagaaccacagtgtgaagttgcccgaaggaagcttcaggagattgaggacaggataattgatgaagatgaagaagttgaagctgacagaaatgttaaccatctccccagtcttgtcctttctgataccatgaaaacaggtttgaagagggaatttgatgaagtttttacaaagaaaatgattgagtctatgagccgtccttccatggagcttgttctctggaaacccctccctgaactcctttctgataagccaaagccatcctctaatactaagaact

SEQ ID NO: 120720 - DNA, 568 bp, Homo sapiens
  Payload ID: 3646
  Gene Symbol: CCDC117
  Gene Name: coiled-coil domain containing 117
  ENST ID: ENST00000432510
  CDS Start-End: 358-568
acatagcccaggagtccggtccgaacctcagctcgactgcggcccggagaagtgagactttcccagttggaacctgggcgactcggtctgggtgccccctcggcgcggccgctgttagtgacaactttcagtgtctcatctgcaaatgtttctgttcactgtaaaaagaaacacaagcgagaggaggaggaggatgatgattgtccagtaagaaagaaaaggataactgaagcagagctctgtgctggtcctaatgactggattctttgtgcacatcaggatgtagaggggcatggagtaaatcccagtgttagtggcctttccatacctgggatattagatgttatttgtgaagaaatggatcagacaactggagaaccacagtgtgaagttgcccgaaggaagcttcaggagattgaggacaggataattgatgaagatgaagaagttgaagctgacagaaatgttaaccatctccccagtcttgtcctttctgataccatgaaaacaggtttgaagagggaatttgatgaagtttttacaaagaaaatgattgagtctatgagcc

SEQ ID NO: 120721 - DNA, 1017 bp, Homo sapiens
  Payload ID: 3647
  Gene Symbol: CCDC12
  Gene Name: coiled-coil domain containing 12
  ENST ID: ENST00000292314
  CDS Start-End: 152-691
tggccccaggctgcccactgtctgctcaggcttccaaagctacaacctgccagcctatgctccatacctgccctgcgaggacctcccagtctctcattctcgtccttggattggccgcgagacatttatccactctccttaggcctgcgcgatgcaagacgggagaaaaggaggggcgtacgcgggcaagatggaggcaactacggctggtgtgggccggctagaggaagaggcgttgcggcgaaaggaacggctgaaggccctacgggagaaaaccgggcgcaaggacaaggaagatggggagccaaagaccaagcatctcagagaagaggaggaagaaggcgagaagcacagggaacttaggctgcggaactatgtcccggaggatgaggacctgaagaagaggagggtgccccaggccaaaccggttgcagtggaggagaaggtgaaggagcagctggaggccgccaagcccgagcccgtcatcgaggaggtggacctggccaacctcgctcctcggaagcctgactgggacctcaagagagatgtggccaagaagctggagaaactaaaaaagcggactcagagggccattgccgagctgatccgtgaaaggctgaaaggccaggaagacagcctagcctctgcagtggatgctgccaccgaacaaaagacctgtgactccgactgaggcatgccctgccccaccactcgcccatcaggcctgtcctgcagaggatggtcttgggcagggatgggggctaggcttgccatcacctccagtttggcttctgagcagagactccctgcccatcaagtctgaaacccccatggatgaggtcagctccttgtctgctgggtggcccctgccattctgaatggaggcagaaccagcaacaactctgggcgtgcctgtgtctgcacatgtggatgtacatatgtctgtatatatgtatatattttgaactttctaaaaaaaaatctggaaatagaaacaagtaaacccctgtgtgtggc

SEQ ID NO: 120722 - DNA, 412 bp, Homo sapiens
  Payload ID: 3647
  Gene Symbol: CCDC12
  Gene Name: coiled-coil domain containing 12
  ENST ID: ENST00000446836
  CDS Start-End: 146-412
cctgccagcctatgctccatacctgccctgcgaggacctcccagtctctcattctcgtccttggattggccgcgagacatttatccactctccttaggcctgcgcgatgcaagacgggagaaaaggaggggcgtacgcgggcaagatggaggcaactacggctggtgtgggccggctagaggaagaggcgttgcggcgaaaggaacggctgaaggccctacgggagaaaaccgggcgcaaggacaaggaagatggggagccaaagaccaagcatctcagagaagaggaggaagaaggcgagaagcacagggaacttaggctgcggaactatgtcccggaggatgaggacctgaagaagaggagggtgccccaggccaaaccggttgcagtggaggagaaggtgaaggagcag

SEQ ID NO: 120723 - DNA, 1097 bp, Homo sapiens
  Payload ID: 3647
  Gene Symbol: CCDC12
  Gene Name: coiled-coil domain containing 12
  Uniprot ID: Q8WUD4
  ENST ID: ENST00000425441
  CDS Start-End: 266-766
ggcttccaaagctacaacctgccagcctatgctccatacctgccctgcgaggtctgaattccacttgctgctctttcactgatcagcgttggataaatcgagccttagcttttttttttttcttttttttttttgctggctccccacccactaggacctcccagtctctcattctcgtccttggattggccgcgagacatttatccactctccttaggcctgcgcgatgcaagacgggagaaaaggaggggcgtacgcgggcaagatggaggcaactacggctggtgtgggccggctagaggaagaggcgttgcggcgaaaggaacggctgaaggccctacgggagaaaaccgggcgcaaggacaaggaagatggggagccaaagaccaagcatctcagagaagaggaggaagaaggcgagaagcacagggaacttaggctgcggaactatgtcccggaggatgaggacctgaagaagaggagggtgccccaggccaaaccggttgcagtggaggagaaggtgaaggagcagctggaggccgccaagcccgagcccgtcatcgaggaggtggacctggccaacctcgctcctcggaagcctgactgggacctcaagagagatgtggccaagaagctggagaaactaaaaaagcggactcagagggccattgccgagctgatccgtgaaaggctgaaaggccaggaagacagcctagcctctgcagtggatgctgccaccgaacaaaagacctgtgactccgactgaggcatgccctgccccaccactcgcccatcaggcctgtcctgcagaggatggtcttgggcagggatgggggctaggcttgccatcacctccagtttggcttctgagcagagactccctgcccatcaagtctgaaacccccatggatgaggtcagctccttgtctgctgggtggcccctgccattctgaatggaggcagaaccagcaacaactctgggcgtgcctgtgtctgcacatgtggatgtacatatgtctgtatatatgtatatattttgaactttctaaaaaaaaatctggaaatagaaacaagtaaacccctgtgtgtggcagaaa

SEQ ID NO: 120724 - DNA, 380 bp, Homo sapiens
  Payload ID: 3647
  Gene Symbol: CCDC12
  Gene Name: coiled-coil domain containing 12
  ENST ID: ENST00000605875
  CDS Start-End: 137-380
ggccgggcggcccgggagggtgccccgctgccctgccccaccagtgccattggaagggccagcctgagcctccgggacgagggtcggggcctgcgcgatgcaagacgggagaaaaggaggggcgtacgcgggcaagatggaggcaactacggctggtgtgggccggctagaggaagaggcgttgcggcgaaaggaacggctgaaggccctacgggagaaaaccgggcgcaaggacaaggaagatggggagccaaagaccaagcatctcagagaagaggaggaagaaggcgagaagcacagggaacttaggctgcggaactatgtcccggaggatgaggacctgaagaagaggagggtgccccaggccaaaccggttgcag

SEQ ID NO: 120725 - DNA, 2381 bp, Homo sapiens
  Payload ID: 3648
  Gene Symbol: CCDC120
  Gene Name: coiled-coil domain containing 120
  Uniprot ID: Q96HB5
  ENST ID: ENST00000536628
  CDS Start-End: 283-2139
actaccagccggagccagggcctggtcgagacaactatttttgaggtatctgaggctaccccacagcactctctggcattggcaagactcgtggctgtgacccatgggcctctgaggaggcgttgtaagtccgcccagctccccacttgctgtgctctcactcaatgcgaagggaaccaaggtaccagggccaagtgggtccagacatccacacggattctgaaagggcaggtcaagcagactttgtccagccatcagccacggcctctcgacagcaccaagatggaagtcaaagctgccctgttcggagaggctgccccccaggtgaagtcagagcgtctgcgggggctgcttgaccggcagcggaccctgcaggaggccctgagcctgaaacttcaggagctccgcaaagtgtgtctccaggaggcggagctgactggccagctgccccctgagtgcccactagagcctggtgaacggccccagttggtccgccggcggccccccacagcccgcgcctaccctccaccgcaccccaaccaagcacaccactccttgtgccctgctgaggagctggctcttgaggccctggaacgcgaggtgtcagtgcaacagcagatcgcggcggccgcccgccgcctggccttggcccctgatctgagcaccgagcagcgccggcgccggcgccaggtccaggcagatgcactgaggaggctgcatgagctagaggagcagctcagggatgtccgggcccgccttggcctcccagtgctcccgctgccccagccactgccactgtccacggggtcagtgatcaccacccagggagtctgcctgggcatgcgtcttgctcagctcagccaagaggacgtagttctgcactcagagagcagctccctctcagagtctggggccagccatgacaacgaggagccccatggctgcttctctctggccgagcgcccctcaccacccaaggcttgggaccagctgcgggcagtatctggggggagccctgagcggcgaaccccatggaaaccacctccatcagatctttatggggatctgaagagccggcggaactctgtggccagccccaccagccccacacgctcgctgcccaggagtgcctccagttttgaggggcgaagtgtgcctgccacccctgtcctcacccggggcgctggcccccagctctgcaaacctgaaggccttcattctcgtcagtggtccggcagccaggactcccagatgggcttcccccgggcggaccctgcctccgatcgcgcctccctcttcgtagctcgcacccgccgcagcaacagttctgaggccctgctggtggaccgggccgctggtgggggagctggctccccgcctgcccctctggctccctctgcctctggccccccagtctgcaagagcagtgaggtgctgtatgagcgcccccaaccaacccctgccttctcctcccgcacagcaggccccccagaccctccccgggccgcccggcctagctcagctgcccctgcctcccgaggtgccccccggctcccacctgtgtgtggagacttcctcttggactattccttggaccggggcctgccccgcagtggcggtggaacaggctggggggagctgccgcctgcagctgaggtcccaggacccctctcccgccgggatgggctcctcaccatgctccccggcccaccacctgtgtatgcagctgacagcaacagccccctcctccgcaccaaggacccccacacccgtgccacccgcactaagccctgtggcctgcccccagaggctgccgaaggccctgaggtgcatccaaaccctctgctgtggatgcccccacccacccgtatcccctcggctggtgaacgcagtggccacaagaacctggctctggaggggctgcgggactggtacatccggaactcgggactggctgcggggccccagcgccggcctgtgctcccttccgtgggcccgccacacccacccttcctccatgcccgctgctatgaggtgggccaggcgctgtacggggcccccagccaggcgccactcccacactcgaggagtttcacggcgccccctgtctctggcaggtatggggggtgcttttactgatgggtaggggtctcgtaaggcagatggcgaagatatccaggccagggagtggctagtcatgatagctaatgaattggaccatgaggaaactagctgctgtgatggcacagggtcactctactgcacatgacctgcattagtccatggggtcctggtggaggggatcttgggcactggtagcagcaattctttatcaagttataggctgaagatgagccttgaagccagggtgccgggaggaa

SEQ ID NO: 120726 - DNA, 2752 bp, Homo sapiens
  Payload ID: 3648
  Gene Symbol: CCDC120
  Gene Name: coiled-coil domain containing 120
  Uniprot ID: Q96HB5
  ENST ID: ENST00000597275
  CDS Start-End: 508-2400
accctctaggctaggctgagcggcggaggtggccgtgccgctggaagcggacagacccgagttagaggtgggggcgggggtccatcgcccgcggccgggccggcgctcccctcctaccctccccgcgacccccgtctggcccccacggctaacggtagcgcagccgaacacggcccacgggcagggcgccgaagaggagcaggcgcgcgcccggggacgagcagggcgcagtgagggaggggcgcgtccactgccccggccggccgaccgacaccgaccccgcctactgcggcgcggggacccttggcaagactcgtggctgtgacccatgggcctctgaggaggcgttgtaagtccgcccagctccccacttgctgtgctctcactcaatgcgaagggaaccaaggtaccagggccaagtgggtccagacatccacacggattctgaaagggcaggtcaagcagactttgtccagccatcagccacggcctctcgacagcaccaagatggaagtcaaaggtcagctgatcagctctcctaccttcaatgccccagctgccctgttcggagaggctgccccccaggtgaagtcagagcgtctgcgggggctgcttgaccggcagcggaccctgcaggaggccctgagcctgaaacttcaggagctccgcaaagtgtgtctccaggaggcggagctgactggccagctgccccctgagtgcccactagagcctggtgaacggccccagttggtccgccggcggccccccacagcccgcgcctaccctccaccgcaccccaaccaagcacaccactccttgtgccctgctgaggagctggctcttgaggccctggaacgcgaggtgtcagtgcaacagcagatcgcggcggccgcccgccgcctggccttggcccctgatctgagcaccgagcagcgccggcgccggcgccaggtccaggcagatgcactgaggaggctgcatgagctagaggagcagctcagggatgtccgggcccgccttggcctcccagtgctcccgctgccccagccactgccactgtccacggggtcagtgatcaccacccagggagtctgcctgggcatgcgtcttgctcagctcagccaagaggacgtagttctgcactcagagagcagctccctctcagagtctggggccagccatgacaacgaggagccccatggctgcttctctctggccgagcgcccctcaccacccaaggcttgggaccagctgcgggcagtatctggggggagccctgagcggcgaaccccatggaaaccacctccatcagatctttatggggatctgaagagccggcggaactctgtggccagccccaccagccccacacgctcgctgcccaggagtgcctccagttttgaggggcgaagtgtgcctgccacccctgtcctcacccggggcgctggcccccagctctgcaaacctgaaggccttcattctcgtcagtggtccggcagccaggactcccagatgggcttcccccgggcggaccctgcctccgatcgcgcctccctcttcgtagctcgcacccgccgcagcaacagttctgaggccctgctggtggaccgggccgctggtgggggagctggctccccgcctgcccctctggctccctctgcctctggccccccagtctgcaagagcagtgaggtgctgtatgagcgcccccaaccaacccctgccttctcctcccgcacagcaggccccccagaccctccccgggccgcccggcctagctcagctgcccctgcctcccgaggtgccccccggctcccacctgtgtgtggagacttcctcttggactattccttggaccggggcctgccccgcagtggcggtggaacaggctggggggagctgccgcctgcagctgaggtcccaggacccctctcccgccgggatgggctcctcaccatgctccccggcccaccacctgtgtatgcagctgacagcaacagccccctcctccgcaccaaggacccccacacccgtgccacccgcactaagccctgtggcctgcccccagaggctgccgaaggccctgaggtgcatccaaaccctctgctgtggatgcccccacccacccgtatcccctcggctggtgaacgcagtggccacaagaacctggctctggaggggctgcgggactggtacatccggaactcgggactggctgcggggccccagcgccggcctgtgctcccttccgtgggcccgccacacccacccttcctccatgcccgctgctatgaggtgggccaggcgctgtacggggcccccagccaggcgccactcccacactcgaggagtttcacggcgccccctgtctctggcaggtatggggggtgcttttactgatgggtaggggtctcgtaaggcagatggcgaagatatccaggccagggagtggctagtcatgatagctaatgaattggaccatgaggaaactagctgctgtgatggcacagggtcactctactgcacatgacctgcattagtccatggggtcctggtggaggggatcttgggcactggtagcagcaattctttatcaagttataggctgaagatgagccttgaagccagggtgccgggaggaagggacatctcatgccccttgctgttttcttccttttttctccatgccccagagcctgaaagtgctgtcctgtgcctgcctccacctctttaacgagcctcttttcctttc

SEQ ID NO: 120727 - DNA, 2379 bp, Homo sapiens
  Payload ID: 3648
  Gene Symbol: CCDC120
  Gene Name: coiled-coil domain containing 120
  Uniprot ID: Q96HB5
  ENST ID: ENST00000603986
  CDS Start-End: 178-2268
gctgctgactgccactaccagccggagccagggcctggtcgagacaactatttttgaggtatctgaggctaccccacagcactctctggcattggcaagactcgtggctgtgacccatgggcctctgaggaggcgttgtaagtccgcccagctccccacttgctgtgctctcactcaatgcgaagggaaccaaggtaccagggccaagtgggtccagacatccacacggattctgaaaggactttgtccagccatcagccacggcctctcgacagcaccaagatggaagtcaaaggtcagctgatcagctctcctaccttcaatgccccagctgccctgttcggagaggctgccccccaggtgaagtcagagcgtctgcgggggctgcttgaccggcagcggaccctgcaggaggccctgagcctgaaacttcaggagctccgcaaagtgtgtctccaggaggcggagctgactggccagctgccccctgagtgcccactagagcctggtgaacggccccagttggtccgccggcggccccccacagcccgcgcctaccctccaccgcaccccaaccaagcacaccactccttgtgccctgctgaggagctggctcttgaggccctggaacgcgaggtgtcagtgcaacagcagatcgcggcggccgcccgccgcctggccttggcccctgatctgagcaccgagcagcgccggcgccggcgccaggtccaggcagatgcactgaggaggctgcatgagctagaggagcagctcagggatgtccgggcccgccttggcctcccagtgctcccgctgccccagccactgccactgtccacggggtcagtgatcaccacccagggagtctgcctgggcatgcgtcttgctcagctcagccaagaggacgtagttctgcactcagagagcagctccctctcagagtctggggccagccatgacaacgaggagccccatggctgcttctctctggccgagcgcccctcaccacccaaggcttgggaccagctgcgggcagtatctggggggagccctgagcggcgaaccccatggaaaccacctccatcagatctttatggggatctgaagagccggcggaactctgtggccagccccaccagccccacacgctcgctgcccaggagtgcctccagttttgaggggcgaagtgtgcctgccacccctgtcctcacccggggcgctggcccccagctctgcaaacctgaaggccttcattctcgtcagtggtccggcagccaggactcccagatgggcttcccccgggcggaccctgcctccgatcgcgcctccctcttcgtagctcgcacccgccgcagcaacagttctgaggccctgctggtggaccgggccgctggtgggggagctggctccccgcctgcccctctggctccctctgcctctggccccccagtctgcaagagcagtgaggtgctgtatgagcgcccccaaccaacccctgccttctcctcccgcacagcaggccccccagaccctccccgggccgcccggcctagctcagctgcccctgcctcccgaggtgccccccggctcccacctgtgtgtggagacttcctcttggactattccttggaccggggcctgccccgcagtggcggtggaacaggctggggggagctgccgcctgcagctgaggtcccaggacccctctcccgccgggatgggctcctcaccatgctccccggcccaccacctgtgtatgcagctgacagcaacagccccctcctccgcaccaaggacccccacacccgtgccacccgcactaagccctgtggcctgcccccagaggctgccgaaggccctgaggtgcatccaaaccctctgctgtggatgcccccacccacccgtatcccctcggctggtgaacgcagtggccacaagaacctggctctggaggggctgcgggactggtacatccggaactcgggactggctgcggggccccagcgccggcctgtgctcccttccgtgggcccgccacacccacccttcctccatgcccgctgctatgaggtgggccaggcgctgtacggggcccccagccaggcgccactcccacactcgaggagtttcacggcgccccctgtctctggcagatactacgcggacttcctgtatcccccggagctgagcgctcgtttaagtgacctgacgctagagggggagcagtcctccagttctgacacccagaccccggggacactggtctgaccccttctgatatgtcccttgttggcctgggcacgattccaatctggggagcacacagctgacctcgctgggccctggggtgtggttgctctcagtcctgagcagagtgcg

SEQ ID NO: 120728 - DNA, 2478 bp, Homo sapiens
  Payload ID: 3648
  Gene Symbol: CCDC120
  Gene Name: coiled-coil domain containing 120
  ENST ID: ENST00000603906
  CDS Start-End: 123-314
agccggagccagggcctggtcgagacaactatttttgaggcaagactcgtggctgtgacccatgggcctctgaggaggcgttgtaagtccgcccagctccccacttgctgtgctctcactcaatgcgaagggaaccaaggtaccagggccaagtgggtccagacatccacacggattctgaaagggcaggtcaagcagactttgtccagccatcagccacggcctctcgacagcaccaagatggaagtcaaagctgccctgttcggagaggctgccccccaggtgaagtcagagcgtctgcgggggctgcttgaccggcagcggaccctgcaggaggccctgagcctgaaacttcaggagctccgcaaagtgtgtctccaggaggcggagctgactggccagctgccccctgagtgcccactagagcctggtgaacggccccagttggtccgccggcggccccccacagcccgcgcctaccctccaccgcaccccaaccaagcacaccactccttgtgccctgctgaggagctggctcttgaggccctggaacgcgaggtgtcagtgcaacagcagatcgcggcggccgcccgccgcctggccttggcccctgatctgagcaccgagcagcgccggcgccggcgccaggtccaggcagatgcactgaggaggctgcatgagctagaggagcagctcagggatgtccgggcccgccttggcctcccagtgctcccgctgccccagccactgccactgtccacggggtcagtgatcaccacccagggagtctgcctgggcatgcgtcttgctcagctcagccaagaggacgtagttctgcactcagagagcagctccctctcagagtctggggccagccatgacaacgaggagccccatggctgcttctctctggccgagcgcccctcaccacccaaggcttgggaccagctgcgggcagtatctggggggagccctgagcggcgaaccccatggaaaccacctccatcagatctttatggggatctgaagagccggcggaactctgtggccagccccaccagccccacacgctcgctgcccaggagtgcctccagttttgaggggcgaagtgtgcctgccacccctgtcctcacccggggcgctggcccccagctctgcaaacctgaaggccttcattctcgtcagtggtccggcagccaggactcccagatgggcttcccccgggcggaccctgcctccgatcgcgcctccctcttcgtagctcgcacccgccgcagcaacagttctgaggccctgctggtggaccgggccgctggtgggggagctggctccccgcctgcccctctggctccctctgcctctggccccccagtctgcaagagcagtgaggtgctgtatgagcgcccccaaccaacccctgccttctcctcccgcacagcaggccccccagaccctccccgggccgcccggcctagctcagctgcccctgcctcccgaggtgccccccggctcccacctgtgtgtggagacttcctcttggactattccttggaccggggcctgccccgcagtggcggtggaacaggctggggggagctgccgcctgcagctgaggtcccaggacccctctcccgccgggatgggctcctcaccatgctccccggcccaccacctgtgtatgcagctgacagcaacagccccctcctccgcaccaaggacccccacacccgtgccacccgcactaagccctgtggcctgcccccagaggctgccgaaggccctgaggtgcatccaaaccctctgctgtggatgcccccacccacccgtatcccctcggctggtgaacgcagtggccacaagaacctggctctggaggggctgcgggactggtacatccggaactcgggactggctgcggggccccagcgccggcctgtgctcccttccgtgggcccgccacacccacccttcctccatgcccgctgctatgaggtgggccaggcgctgtacggggcccccagccaggcgccactcccacactcgaggagtttcacggcgccccctgtctctggcagatactacgcggacttcctgtatcccccggagctgagcgctcgtttaagtgacctgacgctagagggggagcagtcctccagttctgacacccagaccccggggacactggtctgaccccttctgatatgtcccttgttggcctgggcacgattccaatctggggagcacacagctgacctcgctgggccctggggtgtggttgctctcagtcctgagcagagtgcgccaacctaatcttccaaggcccctggctccccgtaggcccaggaaggtgtctgacaccctgcttcttctctcacactgtgctggggactgggggccctcagctagcttaaaagaggggggatgatgtcatggggaccccaagccccttcctccatttatgtttacagttgtgactta

SEQ ID NO: 120729 - DNA, 2415 bp, Homo sapiens
  Payload ID: 3648
  Gene Symbol: CCDC120
  Gene Name: coiled-coil domain containing 120
  Uniprot ID: Q96HB5
  ENST ID: ENST00000496529
  CDS Start-End: 296-2188
attacctagtgggaggtggccaaggcatctgccactgctgctgactgccactaccagccggagccagggcctggtcgagacaactatttttgaggcaagactcgtggctgtgacccatgggcctctgaggaggcgttgtaagtccgcccagctccccacttgctgtgctctcactcaatgcgaagggaaccaaggtaccagggccaagtgggtccagacatccacacggattctgaaagggcaggtcaagcagactttgtccagccatcagccacggcctctcgacagcaccaagatggaagtcaaaggtcagctgatcagctctcctaccttcaatgccccagctgccctgttcggagaggctgccccccaggtgaagtcagagcgtctgcgggggctgcttgaccggcagcggaccctgcaggaggccctgagcctgaaacttcaggagctccgcaaagtgtgtctccaggaggcggagctgactggccagctgccccctgagtgcccactagagcctggtgaacggccccagttggtccgccggcggccccccacagcccgcgcctaccctccaccgcaccccaaccaagcacaccactccttgtgccctgctgaggagctggctcttgaggccctggaacgcgaggtgtcagtgcaacagcagatcgcggcggccgcccgccgcctggccttggcccctgatctgagcaccgagcagcgccggcgccggcgccaggtccaggcagatgcactgaggaggctgcatgagctagaggagcagctcagggatgtccgggcccgccttggcctcccagtgctcccgctgccccagccactgccactgtccacggggtcagtgatcaccacccagggagtctgcctgggcatgcgtcttgctcagctcagccaagaggacgtagttctgcactcagagagcagctccctctcagagtctggggccagccatgacaacgaggagccccatggctgcttctctctggccgagcgcccctcaccacccaaggcttgggaccagctgcgggcagtatctggggggagccctgagcggcgaaccccatggaaaccacctccatcagatctttatggggatctgaagagccggcggaactctgtggccagccccaccagccccacacgctcgctgcccaggagtgcctccagttttgaggggcgaagtgtgcctgccacccctgtcctcacccggggcgctggcccccagctctgcaaacctgaaggccttcattctcgtcagtggtccggcagccaggactcccagatgggcttcccccgggcggaccctgcctccgatcgcgcctccctcttcgtagctcgcacccgccgcagcaacagttctgaggccctgctggtggaccgggccgctggtgggggagctggctccccgcctgcccctctggctccctctgcctctggccccccagtctgcaagagcagtgaggtgctgtatgagcgcccccaaccaacccctgccttctcctcccgcacagcaggccccccagaccctccccgggccgcccggcctagctcagctgcccctgcctcccgaggtgccccccggctcccacctgtgtgtggagacttcctcttggactattccttggaccggggcctgccccgcagtggcggtggaacaggctggggggagctgccgcctgcagctgaggtcccaggacccctctcccgccgggatgggctcctcaccatgctccccggcccaccacctgtgtatgcagctgacagcaacagccccctcctccgcaccaaggacccccacacccgtgccacccgcactaagccctgtggcctgcccccagaggctgccgaaggccctgaggtgcatccaaaccctctgctgtggatgcccccacccacccgtatcccctcggctggtgaacgcagtggccacaagaacctggctctggaggggctgcgggactggtacatccggaactcgggactggctgcggggccccagcgccggcctgtgctcccttccgtgggcccgccacacccacccttcctccatgcccgctgctatgaggtgggccaggcgctgtacggggcccccagccaggcgccactcccacactcgaggagtttcacggcgccccctgtctctggcaggtatggggggtgcttttactgatgggtaggggtctcgtaaggcagatggcgaagatatccaggccagggagtggctagtcatgatagctaatgaattggaccatgaggaaactagctgctgtgatggcacagggtcactctactgcacatgacctgcattagtccatggggtcctggtggaggggatcttgggcactggtagcagcaattctttatcaagttataggctgaagatgagccttgaagcca

SEQ ID NO: 120730 - DNA, 3857 bp, Homo sapiens
  Payload ID: 3648
  Gene Symbol: CCDC120
  Gene Name: coiled-coil domain containing 120
  Uniprot ID: Q96HB5
  ENST ID: ENST00000606812
  CDS Start-End: 220-2112
ggccaaggcatctgccactgctgctgactgccactaccagccggagccagggcctggtcgagacaactatttttgaggcaagactcgtggctgtgacccatgggcctctgaggaggcgttgtaagtccgcccagctccccacttgctgtgctctcactcaatgcgaagggaaccaagactttgtccagccatcagccacggcctctcgacagcaccaagatggaagtcaaaggtcagctgatcagctctcctaccttcaatgccccagctgccctgttcggagaggctgccccccaggtgaagtcagagcgtctgcgggggctgcttgaccggcagcggaccctgcaggaggccctgagcctgaaacttcaggagctccgcaaagtgtgtctccaggaggcggagctgactggccagctgccccctgagtgcccactagagcctggtgaacggccccagttggtccgccggcggccccccacagcccgcgcctaccctccaccgcaccccaaccaagcacaccactccttgtgccctgctgaggagctggctcttgaggccctggaacgcgaggtgtcagtgcaacagcagatcgcggcggccgcccgccgcctggccttggcccctgatctgagcaccgagcagcgccggcgccggcgccaggtccaggcagatgcactgaggaggctgcatgagctagaggagcagctcagggatgtccgggcccgccttggcctcccagtgctcccgctgccccagccactgccactgtccacggggtcagtgatcaccacccagggagtctgcctgggcatgcgtcttgctcagctcagccaagaggacgtagttctgcactcagagagcagctccctctcagagtctggggccagccatgacaacgaggagccccatggctgcttctctctggccgagcgcccctcaccacccaaggcttgggaccagctgcgggcagtatctggggggagccctgagcggcgaaccccatggaaaccacctccatcagatctttatggggatctgaagagccggcggaactctgtggccagccccaccagccccacacgctcgctgcccaggagtgcctccagttttgaggggcgaagtgtgcctgccacccctgtcctcacccggggcgctggcccccagctctgcaaacctgaaggccttcattctcgtcagtggtccggcagccaggactcccagatgggcttcccccgggcggaccctgcctccgatcgcgcctccctcttcgtagctcgcacccgccgcagcaacagttctgaggccctgctggtggaccgggccgctggtgggggagctggctccccgcctgcccctctggctccctctgcctctggccccccagtctgcaagagcagtgaggtgctgtatgagcgcccccaaccaacccctgccttctcctcccgcacagcaggccccccagaccctccccgggccgcccggcctagctcagctgcccctgcctcccgaggtgccccccggctcccacctgtgtgtggagacttcctcttggactattccttggaccggggcctgccccgcagtggcggtggaacaggctggggggagctgccgcctgcagctgaggtcccaggacccctctcccgccgggatgggctcctcaccatgctccccggcccaccacctgtgtatgcagctgacagcaacagccccctcctccgcaccaaggacccccacacccgtgccacccgcactaagccctgtggcctgcccccagaggctgccgaaggccctgaggtgcatccaaaccctctgctgtggatgcccccacccacccgtatcccctcggctggtgaacgcagtggccacaagaacctggctctggaggggctgcgggactggtacatccggaactcgggactggctgcggggccccagcgccggcctgtgctcccttccgtgggcccgccacacccacccttcctccatgcccgctgctatgaggtgggccaggcgctgtacggggcccccagccaggcgccactcccacactcgaggagtttcacggcgccccctgtctctggcaggtatggggggtgcttttactgatgggtaggggtctcgtaaggcagatggcgaagatatccaggccagggagtggctagtcatgatagctaatgaattggaccatgaggaaactagctgctgtgatggcacagggtcactctactgcacatgacctgcattagtccatggggtcctggtggaggggatcttgggcactggtagcagcaattctttatcaagttataggctgaagatgagccttgaagccagggtgccgggaggaagggacatctcatgccccttgctgttttcttccttttttctccatgccccagagcctgaaagtgctgtcctgtgcctgcctccacctctttaacgagcctcttttcctttctttttctgtgtcttgtctgtcttttcttcttcttgtcttccccgccctgtcctccggattcctgctaccccttctaaagatactacgcggacttcctgtatcccccggagctgagcgctcgtttaagtgacctgacgctagagggggagcagtcctccagttctgacacccagaccccggggacactggtctgaccccttctgatatgtcccttgttggcctgggcacgattccaatctggggagcacacagctgacctcgctgggccctggggtgtggttgctctcagtcctgagcagagtgcgccaacctaatcttccaaggcccctggctccccgtaggcccaggaaggtgtctgacaccctgcttcttctctcacactgtgctggggactgggggccctcagctagcttaaaagaggggggatgatgtcatggggaccccaagccccttcctccatttatgtttacagttgtgacttaggtattcactgtcttcctccaacactaggcgttttacaaaagggaaactgtgatctcatctggttgggttcattcctgttcccatgcccaaccaggttccattcaggaaccccctccataaaatggaccatatcgggtctcagggccatttagggcagccaggagactccggtgtgaacagaaatccctgccacgcatcgccagggcagttggggcagtgggctctctgcccacacttggaaggactgcagtctgggtgggatgcctgaaagagcccaaccccctctgtgcccatggcctctgccctgaccacccccagtcaggaggccccacaggaggggcacccggtagatgccagtgaaatcctcaggtgaggtctgcctacgggccacgggccactcaccactcacaccttccttggctttccttccacccttttttttttctcgagacggagtcttgctctgtcaccaggctggagtgcagcggcgcaatctcagctcactgcaacctctgcctcctgggttctcctgcctcaccctcccgagtagctgggattacaggcacacgccaccatgcccggctaatttttgtattcttagtagagacaaggtttcaccatattggccaggctggtcttgaactcttgacctcgtgatctgcccgccttggcctcccaaagtgctgggattacagccgtgagccactgcacccagccccaatccaccactttttaagcaaacccacacaagttgtgttttctatgatacctgtctgtgattttcggagctgggggttcccctacccccttttcctggcgttaagcttttctttttataccagtggatctggacccaagacattacccacactggaaggggatttgtataataaatgtgtaaactgaaccc

SEQ ID NO: 120731 - DNA, 2342 bp, Homo sapiens
  Payload ID: 3649
  Gene Symbol: CCDC121
  Gene Name: coiled-coil domain containing 121
  Uniprot ID: Q6ZUS5
  ENST ID: ENST00000324364
  CDS Start-End: 182-1018
agagaaacttccgcaatgttctgggctgcgaacgaaaaccaccacagcgtcagaaaggagcgggtttgctgagggccccagaaggctccttccaccgtatcatagtctaataaataattttgtcaagccagagaagctaacaaaggtagagacaaggcttaaagaaaagatagtggcggaaatgacggatctgaacaagcatataaaacaagctcaaacccagcggaaacagctactggaggaatccagggagctacaccgagaaaagttacttgtccaggctgaaaacagattctttctggaatacctgactaacaaaactgaagagtacacagagcaacctgagaaggtatggaacagctatttacaaaaaagtggagagattgaacgaagaagacaagaatcagcctccagatatgcagaacaaatttcagtgcttaaaacagcgctcttgcaaaaggaaaatatccaatccagtttgaagcggaagttgcaggcaatgagggacattgctatattaaaggaaaagcaggagaaagaaatacagacattacaggaggagacaaagaaagtccaagctgagacagcttcaaagacacgggaagtacaggcccagctcctccaggagaaaagattactggagaaacaactgagcgagccagacaggaggctactgggaaagagaaaaagaagagagcttaatatgaaggcccaggccttgaagttggcagcaaagcggtttatttttgaatactcctgtggcatcaacagagagaaccagcagttcaagaaggaattactgcagctaattgagcaagcccagaaactaacggctactcaaagccacttagaaaacaggaagcagcagctgcagcaggaacagtggtatctggagtccttaatccaggcgaggcagagactgcaaggaagtcataatcagtgcctaaatagacaggatgttccaaagaccacacccagtcttccccaaggcaccaaatcaaggattaatccaaagtaacttctaaaataacactgattaaataagaactggagcaagtactcttaagtgctacattaacctggttagaaaggctgttggattccagattgctattgtaaaatctccatcatgatgtgttggagtgaaggattagatggttttatccaacagtcctactagatatttggtaaccagcttcccttaactagctttttctttaaatactcgttaataagctattccacaaacctccagttaacctaacacatgaccctaacctagccatttaccatacatcaaactagctaaaggaaaccaacctaaggaagtgaaaacagttgtgatttatttcatctagctaaattgtatttctttatagagaaagtacctttaaggatagcattccaaatagactttgaatagcgttctgccagtttatcctcattccttttgaccaacttagcagacaaaagcagtttttacaagctctttgtgagtttgtgccagtgaccaggtagctccttctagttttctcatgagtgaaaaagcattctgataacagcaagtccagtaagtgctaggcagagtgacctttcatctgatgctaagcccctacaagtttgagaaggtaagaaaagatgaaggagacatatattaggtcagctcttacttttgaaaatgttttatttgaagaaacacctgtagcattgaggtgactgaatgcctccacttatttcaggaaaacgtatccaaaaaaagttgaaatatttggacaactttttttttaagtgccatcgatttccctagcagcattctaaaagatagcaagtaaaatgatgtttgttatcctaaatgctttagttttaggtcatttattaattttcttacaggtgcactttctagtacatgaagtatcctttgtaattaatgtgtgccatatgtttattcccatttagtataactataaattatattttaaattatatatttttaggatagttatattttttttgggttctacgacattgaagttggactagtgatttatttgaatgctgaatcctagtataggggaatataatcttatattttaacaggggtcctctatgggaaaataggatgaactttgtttcccagaaattgttaagtgatgaaaaacttcaaaataattttcctgcattttctgctttatttacatgtaaagtgaattccctgaaaattggatttaaaaagcattctccttcaatgtgcctttaccttgtagctttaacaacttttctgttaaatatgtagttttttattaaacaatgttattaaataaaaacatttatccactgatttt

SEQ ID NO: 120732 - DNA, 1472 bp, Homo sapiens
  Payload ID: 3649
  Gene Symbol: CCDC121
  Gene Name: coiled-coil domain containing 121
  Uniprot ID: Q6ZUS5
  ENST ID: ENST00000394775
  CDS Start-End: 116-1438
ggcgaggaagtgggggcgctgagcaagcgagaggaaggctgaagggagctaggaaaagggcgctgatctctgcagcctgggagggcttttgtctcccggaggaaggccagaagagatggggtcccgagggcagggctcacacagcaagaaaacgaggagcatgcctgtcattttgagcccacagagaacggggagcggagccactggaggaccggctgctcgggcttattcggtagccgaggcggttaaacagttcagggctggaccagccgggactggagcagggtgcagtctccagggttgctgggcagcaccgagaccctttgagcaccgaacgaataaactacgggagctttccacacttgcacattgttcccgcgagttgcagacgcaggttcctgatgctagcgctcattccttggcagtcaccctcagtgaactacacagttgccgtgaccttcaggatgaatgcttggattccaggtttgctgagggccccagaaggctccttccaccgtatcatagtctaataaataattttgtcaagccagagaagctaacaaaggtagagacaaggcttaaagaaaagatagtggcggaaatgacggatctgaacaagcatataaaacaagctcaaacccagcggaaacagctactggaggaatccagggagctacaccgagaaaagttacttgtccaggctgaaaacagattctttctggaatacctgactaacaaaactgaagagtacacagagcaacctgagaaggtatggaacagctatttacaaaaaagtggagagattgaacgaagaagacaagaatcagcctccagatatgcagaacaaatttcagtgcttaaaacagcgctcttgcaaaaggaaaatatccaatccagtttgaagcggaagttgcaggcaatgagggacattgctatattaaaggaaaagcaggagaaagaaatacagacattacaggaggagacaaagaaagtccaagctgagacagcttcaaagacacgggaagtacaggcccagctcctccaggagaaaagattactggagaaacaactgagcgagccagacaggaggctactgggaaagagaaaaagaagagagcttaatatgaaggcccaggccttgaagttggcagcaaagcggtttatttttgaatactcctgtggcatcaacagagagaaccagcagttcaagaaggaattactgcagctaattgagcaagcccagaaactaacggctactcaaagccacttagaaaacaggaagcagcagctgcagcaggaacagtggtatctggagtccttaatccaggcgaggcagagactgcaaggaagtcataatcagtgcctaaatagacaggatgttccaaagaccacacccagtcttccccaaggcaccaaatcaaggattaatccaaagtaacttctaaaataacactgattaaataagaactgga

SEQ ID NO: 120733 - DNA, 560 bp, Homo sapiens
  Payload ID: 3649
  Gene Symbol: CCDC121
  Gene Name: coiled-coil domain containing 121
  ENST ID: ENST00000522876
  CDS Start-End: 129-560
aactagtgacagtggcgaggaagtgggggcgctgagcaagcgagaggaaggctgaagggagctaggaaaagggcgctgatctctgcagcctgggagggcttttgtctcccggaggaaggccagaagagatggggtcccgagggcagggctcacacagcaagaaaacgaggagcatgcctgtcattttgagcccacagagaacggggagcggagccactggaggaccggctgctcgggcttattcggtagccgaggcggttaaacagttcagggctggaccagccgggactggagcagggtgcagtctccagggttgctgggcagcaccgagaccctttgagcaccgaacgaataaactacgggagctttccacacttgcacattgttcccgcgagttgcagacgcaggttcctgatgctagcgctcattccttggcagtcaccctcagtgaactacacagttgccgtgaccttcaggatgaatgcttggattccaggtgcaagtttgctgagggccccagaaggctccttccaccgtatcatagtctaataaataatttt

SEQ ID NO: 120734 - DNA, 2009 bp, Homo sapiens
  Payload ID: 3650
  Gene Symbol: CCDC122
  Gene Name: coiled-coil domain containing 122
  Uniprot ID: Q5T0U0
  ENST ID: ENST00000444614
  CDS Start-End: 260-1081
tcccaggggaaacctgacggccaggttccctcgtgccagctgccgggaggcgggagggagtgccctgaaactctaatctcattgcctggccagaaaaggaagtaatccctagtgtcagcagattcagcggtactggtgtataataggatcaccaatatacaacaggaaaaaacaaaagtgaaagattatcaatatagattattgagtaggagtaaagaaggtaaatcaaaaaggggaaaagagattacagacacagaaaatgtcagacaacaaagaaaggaagagtcaaggatttcctaaagaagataaccaagacacaagttcattagctgatgctgtagagaaagttgcaaagcaacaacaatcacaagcatcagagatagaaaaaaacaaaaaggttctgttcaatttgaagaatgaacttcatgagcttgaaaaagaaatagcagctatctctgcagaaactaaagaaacagaaagacaaatttatcaacaagattctgccatagagaataccaaacttcattgtgatagcctggaaactcaaatcaaatccttacattcagaaaatgtaaagcttaaatttgacatagaaacagcccaagaagattttgaggaacacatgataaaatataatgcatattatgcaaaaataaaagcacataaaaatagtttgggggaagtagagagcaaatggtcatttatgactgaactccatgaaaagcgagattttgttaaaaaattaaagacaatgaaagaagaacttatgcaagatcttcaaaatccaggagggaaccgaataacacaagtacaggaagacattacaaacttaaaggataaaattataactgtaaaagaatctatcattgaaaaaacttgttttcttgaggaagaaaaaaagacacatgaaaaattaagaaaagaaatagaggtacaacataagaggtatgatgcaattcttaagcgtttgcattgtcaggtgaacaagcttcagtcaaatagacgacagtggcaatggaacattcaacaattggaaaaaactgcagccgaattaagaaaatgcattggaatgcaagagtaacattgccatagggcaatgtggaacacagaccatgacaacaaaaattactggacagaacattaagaaaatcttttggattcttaataacaagcatccactattagagacctgtcttaatgacagatgtcttcggttgttgttttttttaaatcagtcatcgatttgttaaaatgccttctaaccctacacttgatagcagtagacagacaataggaatgtctacgggaaaataatgcaagagtctctgtgactatttggagtgtgtaaaatgtattatactcatgaatacctgtttatgttgcattcactaccctatgaagtaaaaatttagaagggaaaaaacactcgaattttcactgatttaaattgttaagatttttaaaatgtttgtctgtttcgaactttttttttttttttttttttgagacggagtctcgctctgtcgcccaggccggactgcggactgcagtggcgcagtctcggctcactgcaagctccgcttcctgggttcacgccattctcctgcctcagcctcccgagtagctgggaccacaggcgcccgccaccgcgcccggctaattttttgtatttttagtagagacggggtttcaccttgttagccaggatggtctcgatctcctgacctcatgatccacccgcctcggcctcccaaagtgctgggattacaggcgtgagccaccgcgcccggcctgtttcgaactttttattggaacttgtttttttacagctgccttcacagtagcccataaatattgatatttataataatgtttttgtatgttcaatgcttcaaatattttactccattttctcttttatccagaaggtaacaatcatttttctttgttataaaataacatattttgagtgatacgatgaataaaatattttgttcactttctataaa

SEQ ID NO: 120735 - DNA, 651 bp, Homo sapiens
  Payload ID: 3650
  Gene Symbol: CCDC122
  Gene Name: coiled-coil domain containing 122
  ENST ID: ENST00000614023
  CDS Start-End: 1-69
aaattaagaaaagaaatagaggtaagtcttaattatctagatttcaatgttttatgggaccatttttaaaacttaacactatattcatatttccatagtttactctcaatactcaaaacagttgaagaacaagaaagaactataaaatttagtaaatacaaatcattaatagataactagagataaccccctcattcaaagatgttcaaatatgtgaatgtgttcaaacaatgcaagcattcactcctatttaaatctgggcgagggttcttccaggtttttctcattccactaagaacatgatacccaattaatggctagaaagcagctatgtagtcaaagaggatgcccattcttagatatcaaagactcctcaaaatagaataaaacacaatggaaagcatcgtctttccaaacctctctgacttcatattcgcaattatcaagagtcaagttaaaaaaacaaactgaaaatatgcaaaattgaaagtcagagtaaattcataatgtgttgtggtgctgcctgtggacttctattgtcattattgtttggatgaatggtgaacagaaatgtaaaataatatgctattaagggcaaataatttttgcctgaatacattaatttggaaaataaaaatatgcatgtttcaa

SEQ ID NO: 120736 - DNA, 938 bp, Homo sapiens
  Payload ID: 3651
  Gene Symbol: CCDC124
  Gene Name: coiled-coil domain containing 124
  Uniprot ID: Q96CT7
  ENST ID: ENST00000445755
  CDS Start-End: 45-716
gaggcgcgaccgggccggcgctggggtaagaagcctgctgagggatgcccaagaagttccagggtgagaacaccaagtcggcagcggcccgggcacgtagggcagaggccaaggcggccgctgatgccaagaagcagaaggagctggaggatgcctactggaaggacgacgacaaacacgtcatgaggaaggagcagcgcaaggaggagaaggagaagcggcgcctcgaccagctggaacgtaagaaggagacgcagcgcctactggaggaggaggactccaagctcaagggcggcaaggcgccgcgggtggccacgtccagcaaggtcacccgggcccagatcgaggacacgctgcgccgagaccatcagctcagggaggccccggacacagccgagaaagccaagagccatctggaggtgccgctggaggagaacgtgaaccgccgcgtgctggaggagggcagcgtggaggcgcgcaccatcgaggacgccattgcagtgctcagcgtggcggaggaggcggccgaccggcacccagaaagacgcatgcgggcagccttcacagcctttgaggaagcccagctgccgcggctcaaacaagagaaccccaacatgcggctgtcgcagctgaaacagctgctcaagaaggagtggctccgctctcctgacaaccccatgaaccagcgggccgtgcccttcaatgcccccaagtgagcccagaacttggggagccagttcacccacgggtggtccaggtcacgactctgcacgcccttaggccaggtcagctgcgagggtcacagagcgttccgggggccaaggcgccgggccccggggccatgctcttatcaccagccacccgtcctcccgccagagggtccctgccccgagtgacaccccatcccctcccatcccccggcgcgtgtgtgtagagcc

SEQ ID NO: 120737 - DNA, 1055 bp, Homo sapiens
  Payload ID: 3651
  Gene Symbol: CCDC124
  Gene Name: coiled-coil domain containing 124
  Uniprot ID: Q96CT7
  ENST ID: ENST00000597436
  CDS Start-End: 108-779
gagacggactcttgctatgttgcccaggctggtcttgaactcctggcctcaagcaatcctcctgcctcagcctcccaaagcacggggattacaaaccctgctgagggatgcccaagaagttccagggtgagaacaccaagtcggcagcggcccgggcacgtagggcagaggccaaggcggccgctgatgccaagaagcagaaggagctggaggatgcctactggaaggacgacgacaaacacgtcatgaggaaggagcagcgcaaggaggagaaggagaagcggcgcctcgaccagctggaacgtaagaaggagacgcagcgcctactggaggaggaggactccaagctcaagggcggcaaggcgccgcgggtggccacgtccagcaaggtcacccgggcccagatcgaggacacgctgcgccgagaccatcagctcagggaggccccggacacagccgagaaagccaagagccatctggaggtgccgctggaggagaacgtgaaccgccgcgtgctggaggagggcagcgtggaggcgcgcaccatcgaggacgccattgcagtgctcagcgtggcggaggaggcggccgaccggcacccagaaagacgcatgcgggcagccttcacagcctttgaggaagcccagctgccgcggctcaaacaagagaaccccaacatgcggctgtcgcagctgaaacagctgctcaagaaggagtggctccgctctcctgacaaccccatgaaccagcgggccgtgcccttcaatgcccccaagtgagcccagaacttggggagccagttcacccacgggtggtccaggtcacgactctgcacgcccttaggccaggtcagctgcgagggtcacagagcgttccgggggccaaggcgccgggccccggggccatgctcttatcaccagccacccgtcctcccgccagagggtccctgccccgagtgacaccccatcccctcccatcccccggcgcgtgtgtgtagagcctcagggctgagtgcccaataaaggtggcggcaaggctgcggtgaggcacttgaa

SEQ ID NO: 120738 - DNA, 580 bp, Homo sapiens
  Payload ID: 3651
  Gene Symbol: CCDC124
  Gene Name: coiled-coil domain containing 124
  ENST ID: ENST00000596123
  CDS Start-End: 171-580
cttttacaaggagagcgctaagtccaaagcccttgttttatacagagaaggccacagaggccccaagagggtcatggctgcccaagtgtgattctgggggtgctgagtgccgatgtcccctccggcccctgctcccccatccccatcctcttcccgcagcctgctgagggatgcccaagaagttccagggtgagaacaccaagtcggcagcggcccgggcacgtagggcagaggccaaggcggccgctgatgccaagaagcagaaggagctggaggatgcctactggaaggacgacgacaaacacgtcatgaggaaggagcagcgcaaggaggagaaggagaagcggcgcctcgaccagctggaacgtaagaaggagacgcagcgcctactggaggaggaggactccaagctcaagggcggcaaggcgccgcgggtggccacgtccagcaaggtcacccgggcccagatcgaggacacgctgcgccgagaccatcagctcagggaggccccggacacagccgagaaagccaagagccatctggaggtgccgctggaggagaacgtgaaccgccgcgtgct

SEQ ID NO: 120739 - DNA, 2006 bp, Homo sapiens
  Payload ID: 3652
  Gene Symbol: CCDC125
  Gene Name: coiled-coil domain containing 125
  ENST ID: ENST00000383374
  CDS Start-End: 86-1024
gcggcggcagcggcgcacgcgcacggagaggaggctacttgccagacagcccattttttcttatgataaagacggcatttggctcatgagcaaggtggcaagatcatcaagtgagtcagacgtgcagctctgggaaacagaagaggatgacatgacagaaggtgatttagggtatggcctcggaaggaaacctggtgggatttatgaaatagaattttcacataggtctagaaaaagatcagatggaaagaactttagccctcctccatttccgagaaagggagaagaaagaaatgaagcgagttttcagtattccaagcataagagccagcaagatacattccctcaagtgtccagaatttccaattacagacgacaaagtagcactgattcgaattcagaattgtcaaatgaagaattaaggcaatgtcttaatgaaactttagaggaggtagaaatgttaaaaactgaacttgaggcatctcaaagacaactcagaggtaaagaggaagcattgaaaattcttcaaagcatggcaatactgggcaaagccacaagtcatacgcaggcagtgcttcaaaaaactatggaacaaaacagatccttggagaaggaaataaatgccttgcagtgggaaatagaatttgatcataatagatttaaaaatatagaggaatcttggatccaaaaatatgacaggctaaactgtgaaaatgcagtcctcaaagagaatttgaaagtgaaaacagaagaaattaaaatgctgaagtctgacaatgcagttttgaatcaacggtatttggaggccctcgccatgcttgatatcaaacagcagaagatggctcaggaaaacatgtgctgtgataaaagtggctttgcagaggcttcaggtcttgaggatttccatcaccaaggagtaagaagaccttcgggcagagactgttgggtatgctcccttcagaaaacagttctaagaggatggaagaccaggacagtcctcaagaggtccttaagatgctcatagatttgcttaatgataaagaagaagctttggctcatcaaagaaaagttagctacatgcttgctcgggcattggaagacaaagacactgcttcaaacgagaataaagaaaaaaatcctataaaagagaatttccctttcaacaacccctggcgtaagacttcagaattctctgttttgggtgatcctatacattcaagtgtctgcattttaaattctgtgggctgcatttgttcaatccagcactctcaaatagatccaaactatagaactcttaaaagatcccattctttgccatcaagtatcatattttaaagacaagccagttgaaattggaactgagagttgtttatatcgagatactttgaaaaatgattttgtaaattttgctgcatcttgagaagttgtatgtttcctaggtatttctaaattttaggaggtcacttaaatcaaatattttctacattttctttttcttcttttgagatggagtcttgctctgtcacccaggttggagtgcagtggtgtgatctcggttcactgcaacctccgcctcccggttcaagcaattctcctgcctcagcctcccgagtaactcggattacaggcatgtgccaccacgcccagctaatttttgtatttttagtagagacggggttttaccatgttagccaggctgatcttgaactcctgacctcaagtgatccgcctgccttggcctccgaaagtgctgggattacaggcgtgagccaccacacccagcctattttctacattttctacaagaaattagtattctgtgttgacattttatttataaattacattactgtatttataaattacattacaggctgggcatggtggctcatgcttataaatcccagcactttgggaggccaaggtgggtgggtcacctgaggctggagttcaagaccagtctgaccaacatggagaaaccccatctctactaaaaatacaaaaaa

SEQ ID NO: 120740 - DNA, 4198 bp, Homo sapiens
  Payload ID: 3652
  Gene Symbol: CCDC125
  Gene Name: coiled-coil domain containing 125
  Uniprot ID: Q86Z20
  ENST ID: ENST00000396496
  CDS Start-End: 109-1644
tgagctggagtccgggctccggtccccgccacggaccttgagagggtacccggggtcagacctggcagacagcccattttttcttatgataaagacggcatttggctcatgagcaaggtggcaagatcatcaagtgagtcagacgtgcagctctgggaaacagaagaggatgacatgacagaaggtgatttagggtatggcctcggaaggaaacctggtgggatttatgaaatagaattttcacataggtctagaaaaagatcagatggaaagaactttagccctcctccatttccgagaaagggagaagaaagaaatgaagcgagttttcagtattccaagcataagagccagcaagatacattccctcaagtgtccagaatttccaattacagacgacaaagtagcactgtagattcgaattcagaattgtcaaatgaagaattaaggcaatgtcttaatgaaactttagaggaggtagaaatgttaaaaactgaacttgaggcatctcaaagacaactcagaggtaaagaggaagcattgaaaattcttcaaagcatggcaatactgggcaaagccacaagtcatacgcaggcagtgcttcaaaaaactatggaacaaaacagatccttggagaaggaaataaatgccttgcagtgggaaatagaatttgatcataatagatttaaaaatatagaggaatcttggatccaaaaatatgacaggctaaactgtgaaaatgcagtcctcaaagagaatttgaaagtgaaaacagaagaaattaaaatgctgaagtctgacaatgcagttttgaatcaacggtatttggaggccctcgccatgcttgatatcaaacagcagaagatggctcaggaaaacatgtgctgtgataaaagtggctttgcagaggcttcaggtcttgagcttgcggtcctcggagcctgcctttgtcatgggcccggagggaacccctgttcttgtgccagaatggcagcatccactcggaaactgcttcttcagctcaaacaagagttggaaattttgcagaagagtaaagaagaagcttacgtgatggcagatgctttcagaattgcatttgagcaacaattaatgagaaaaaatgaccaggcactacaattgacacaaatggataaaatgcataaaaaagcaacaaaatggatgaattggaagcaccttaaagaggatggatttccatcaccaaggagtaagaagaccttcgggcagagactgttgggtatgctcccttcagaaaacagttctaagaggatggaagaccaggacagtcctcaagaggtccttaagatgctcatagatttgcttaatgataaagaagaagctttggctcatcaaagaaaagttagctacatgcttgctcgggcattggaagacaaagacactgcttcaaacgagaataaagaaaaaaatcctataaaagagaatttccctttcaacaacccctggcgtaagacttcagaattctctgttttgggtgatcctatacattcaagtgtctgcattttaaattctgtgggctgcatttgttcaatccagcactctcaaatagatccaaactatagaactcttaaaagatcccattctttgccatcaagtatcatattttaaagacaagccagttgaaattggaactgagagttgtttatatcgagatactttgaaaaatgattttgtaaattttgctgcatcttgagaagttgtatgtttcctaggtatttctaaattttaggaggtcacttaaatcaaatattttctacattttctttttcttcttttgagatggagtcttgctctgtcacccaggttggagtgcagtggtgtgatctcggttcactgcaacctccgcctcccggttcaagcaattctcctgcctcagcctcccgagtaactcggattacaggcatgtgccaccacgcccagctaatttttgtatttttagtagagacggggttttaccatgttagccaggctgatcttgaactcctgacctcaagtgatccgcctgccttggcctccgaaagtgctgggattacaggcgtgagccaccacacccagcctattttctacattttctacaagaaattagtattctgtgttgacattttatttataaattacattactgtatttataaattacattacaggctgggcatggtggctcatgcttataaatcccagcactttgggaggccaaggtgggtgggtcacctgaggctggagttcaagaccagtctgaccaacatggagaaaccccatctctactaaaaatacaaaaaattagctaggcctagtggcgcatgcctgtaatcccagctacttgggaggctgaggtaggagaatcgcttgaacctgggaggcgggggttgtggtaagccgagactgtgtcattgcactccagcctgggcgacaagagcgaaactctgtctcaaaaaaaaaaaaaaacacattacagtgtttgccaacatcctaaaacaaaaaataatgatttttgggaaaaacaaaaaattatttaactattttgattgactatagggatcttagcttggctaaatcaacaatatagcaatgtatcttaatgctctaaaaagtaacaatacctaggactgactgaatgttaatttctggaattcatttatcttgttttatttgccttgttcagtatttttcatttaccatatgaagtttagaaataacaatttccttaagttaacttcaataagacagttttgatggtgggaccttggcagaagtatattgagtcagtgccggctgcgttcatggcttcttgtcagggtagtaacattttgcaaccaaatctgcacagatttgtagccaagtctacaaagtgcttaacagctcttttcattgcatcctgtgagatggttgtgatgatccaggaaatggggtctcaggaatctgaagaagctgcctgagccaaggtgatttctaggagtttttttgtttgtggtatgtgaattggggtgtgtgggggtggggtgtgtgtgtagacagggtcccactgtgttgctcaggctggtgccaaactcctggcctcaagggatcctcctgcctcagcctctcaaagtgctgggattacaggcataaaccacaactcaataaaaaagtttttaaaaatttacaaagctcatatttgatccagctaggattttaccctgtacatttgtatttcttgtaggctggcgcacagatatcttaaatggctactaattgctgctgtgtatgaaaacaaatggctatcaaggccgggtgcagtggcttacagatctggtctgaatctcaagtccagaccagtccagagttcaagaccagcctgggcaacatggtgaaaccccatctatacaaaaactcggcaaggcatggtggcatgcacctgttgtcccagctactcaggggctgaggcaggaggatggcatgagcccaggagcttgaggctgcagtgagctgtgattgtgccactgcactccagcctgagtgacagagtgagacccccatctccaaaagaaaaggctatcaatacaaaagtttatctaaattactgtacagctatacaatggaatactctacaaaatggagagatccataagataaagcaaatgaataaagcaaaatgcatgtgttgacagctgttgtgatacctcagttcttgtcttcttggtttaaaagaatttaaatgagacagcaaaggagatgcagcataatttattgcaaaagaaaaggagtattttgaaagttaggtgcagaacagacagtacacctgagagagagaattcagggccggctgctcgtaagggtgagacagcattgattattgctggagaaactccctttatgggagttttgcattattattcataaggaggtgaggtgttgcagtaatcatgtcctgggtggtcctctgcacaggtgcagtagctgttaatgcttgttcatacaccacatgtctcagtagcatcttaaatttccacctagaggtgtgttttttattattatcatgtgcaaaggatcagtttgaggacaggtaaaatcaaaatgtgtatgctctctagaagggaaagtccctactgaagatagctttgcttaaatgagctcaattacaatgtgaatgctgaggtttattgtgttggctgtatggtcatgag

SEQ ID NO: 120741 - DNA, 3615 bp, Homo sapiens
  Payload ID: 3652
  Gene Symbol: CCDC125
  Gene Name: coiled-coil domain containing 125
  Uniprot ID: Q86Z20
  ENST ID: ENST00000396499
  CDS Start-End: 44-1579
cagacagcccattttttcttatgataaagacggcatttggctcatgagcaaggtggcaagatcatcaagtgagtcagacgtgcagctctgggaaacagaagaggatgacatgacagaaggtgatttagggtatggcctcggaaggaaacctggtgggatttatgaaatagaattttcacataggtctagaaaaagatcagatggaaagaactttagccctcctccatttccgagaaagggagaagaaagaaatgaagcgagttttcagtattccaagcataagagccagcaagatacattccctcaagtgtccagaatttccaattacagacgacaaagtagcactgtagattcgaattcagaattgtcaaatgaagaattaaggcaatgtcttaatgaaactttagaggaggtagaaatgttaaaaactgaacttgaggcatctcaaagacaactcagaggtaaagaggaagcattgaaaattcttcaaagcatggcaatactgggcaaagccacaagtcatacgcaggcagtgcttcaaaaaactatggaacaaaacagatccttggagaaggaaataaatgccttgcagtgggaaatagaatttgatcataatagatttaaaaatatagaggaatcttggatccaaaaatatgacaggctaaactgtgaaaatgcagtcctcaaagagaatttgaaagtgaaaacagaagaaattaaaatgctgaagtctgacaatgcagttttgaatcaacggtatttggaggccctcgccatgcttgatatcaaacagcagaagatggctcaggaaaacatgtgctgtgataaaagtggctttgcagaggcttcaggtcttgagcttgcggtcctcggagcctgcctttgtcatgggcccggagggaacccctgttcttgtgccagaatggcagcatccactcggaaactgcttcttcagctcaaacaagagttggaaattttgcagaagagtaaagaagaagcttacgtgatggcagatgctttcagaattgcatttgagcaacaattaatgagaaaaaatgaccaggcactacaattgacacaaatggataaaatgcataaaaaagcaacaaaatggatgaattggaagcaccttaaagaggatggatttccatcaccaaggagtaagaagaccttcgggcagagactgttgggtatgctcccttcagaaaacagttctaagaggatggaagaccaggacagtcctcaagaggtccttaagatgctcatagatttgcttaatgataaagaagaagctttggctcatcaaagaaaagttagctacatgcttgctcgggcattggaagacaaagacactgcttcaaacgagaataaagaaaaaaatcctataaaagagaatttccctttcaacaacccctggcgtaagacttcagaattctctgttttgggtgatcctatacattcaagtgtctgcattttaaattctgtgggctgcatttgttcaatccagcactctcaaatagatccaaactatagaactcttaaaagatcccattctttgccatcaagtatcatattttaaagacaagccagttgaaattggaactgagagttgtttatatcgagatactttgaaaaatgattttgtaaattttgctgcatcttgagaagttgtatgtttcctaggtatttctaaattttaggaggtcacttaaatcaaatattttctacattttctttttcttcttttgagatggagtcttgctctgtcacccaggttggagtgcagtggtgtgatctcggttcactgcaacctccgcctcccggttcaagcaattctcctgcctcagcctcccgagtaactcggattacaggcatgtgccaccacgcccagctaatttttgtatttttagtagagacggggttttaccatgttagccaggctgatcttgaactcctgacctcaagtgatccgcctgccttggcctccgaaagtgctgggattacaggcgtgagccaccacacccagcctattttctacattttctacaagaaattagtattctgtgttgacattttatttataaattacattactgtatttataaattacattacaggctgggcatggtggctcatgcttataaatcccagcactttgggaggccaaggtgggtgggtcacctgaggctggagttcaagaccagtctgaccaacatggagaaaccccatctctactaaaaatacaaaaaattagctaggcctagtggcgcatgcctgtaatcccagctacttgggaggctgaggtaggagaatcgcttgaacctgggaggcgggggttgtggtaagccgagactgtgtcattgcactccagcctgggcgacaagagcgaaactctgtctcaaaaaaaaaaaaaaacacattacagtgtttgccaacatcctaaaacaaaaaataatgatttttgggaaaaacaaaaaattatttaactattttgattgactatagggatcttagcttggctaaatcaacaatatagcaatgtatcttaatgctctaaaaagtaacaatacctaggactgactgaatgttaatttctggaattcatttatcttgttttatttgccttgttcagtatttttcatttaccatatgaagtttagaaataacaatttccttaagttaacttcaataagacagttttgatggtgggaccttggcagaagtatattgagtcagtgccggctgcgttcatggcttcttgtcagggtagtaacattttgcaaccaaatctgcacagatttgtagccaagtctacaaagtgcttaacagctcttttcattgcatcctgtgagatggttgtgatgatccaggaaatggggtctcaggaatctgaagaagctgcctgagccaaggtgatttctaggagtttttttgtttgtggtatgtgaattggggtgtgtgggggtggggtgtgtgtgtagacagggtcccactgtgttgctcaggctggtgccaaactcctggcctcaagggatcctcctgcctcagcctctcaaagtgctgggattacaggcataaaccacaactcaataaaaaagtttttaaaaatttacaaagctcatatttgatccagctaggattttaccctgtacatttgtatttcttgtaggctggcgcacagatatcttaaatggctactaattgctgctgtgtatgaaaacaaatggctatcaaggccgggtgcagtggcttacagatctggtctgaatctcaagtccagaccagtccagagttcaagaccagcctgggcaacatggtgaaaccccatctatacaaaaactcggcaaggcatggtggcatgcacctgttgtcccagctactcaggggctgaggcaggaggatggcatgagcccaggagcttgaggctgcagtgagctgtgattgtgccactgcactccagcctgagtgacagagtgagacccccatctccaaaagaaaaggctatcaatacaaaagtttatctaaattactgtacagctatacaatggaatactctacaaaatggagagatccataagataaagcaaatgaataaagcaaaatgcatgtgttgac

SEQ ID NO: 120742 - DNA, 1735 bp, Homo sapiens
  Payload ID: 3652
  Gene Symbol: CCDC125
  Gene Name: coiled-coil domain containing 125
  Uniprot ID: Q86Z20
  ENST ID: ENST00000511257
  CDS Start-End: 323-1483
acgcgcacggagaggaggctacttgccagacagcccattttttcttatgataaagacggcatttggctcatgagcaaggtggcaagatcatcaagtgagtcagacgtgcagctctgggaaacagaagaggatgacatgacagaagggagaagaaagaaatgaagcgagttttcagtattccaagcataagagccagcaagatacattccctcaagtgtccagaatttccaattacagacgacaaagtagcactgattcgaattcagaattgtcaaatgaagaattaaggcaatgtcttaatgaaactttagaggaggtagaaatgttaaaaactgaacttgaggcatctcaaagacaactcagaggtaaagaggaagcattgaaaattcttcaaagcatggcaatactgggcaaagccacaagtcatacgcaggcagtgcttcaaaaaactatggaacaaaacagatccttggagaaggaaataaatgccttgcagtgggaaatagaatttgatcataatagatttaaaaatatagaggaatcttggatccaaaaatatgacaggctaaactgtgaaaatgcagtcctcaaagagaatttgaaagtgaaaacagaagaaattaaaatgctgaagtctgacaatgcagttttgaatcaacggtatttggaggccctcgccatgcttgatatcaaacagcagaagatggctcaggaaaacatgtgctgtgataaaagtggctttgcagaggcttcaggtcttgagcttgcggtcctcggagcctgcctttgtcatgggcccggagggaacccctgttcttgtgccagaatggcagcatccactcggaaactgcttcttcagctcaaacaagagttggaaattttgcagaagagtaaagaagaagcttacgtgatggcagatgctttcagaattgcatttgagcaacaattaatgagaaaaaatgaccaggcactacaattgacacaaatggataaaatgcataaaaaagcaacaaaatggatgaattggaagcaccttaaagaggatggatttccatcaccaaggagtaagaagaccttcgggcagagactgttgggtatgctcccttcagaaaacagttctaagaggatggaagaccaggacagtcctcaagaggtccttaagatgctcatagatttgcttaatgataaagaagaagctttggctcatcaaagaaaagttagctacatgcttgctcgggcattggaagacaaagacactgcttcaaacgagaataaagaaaaaaatcctataaaagagaatttccctttcaacaacccctggcgtaagacttcagaattctctgttttgggtgatcctatacattcaagtgtctgcattttaaattctgtgggctgcatttgttcaatccagcactctcaaatagatccaaactatagaactcttaaaagatcccattctttgccatcaagtatcatattttaaagacaagccagttgaaattggaactgagagttgtttatatcgagatactttgaaaaatgattttgtaaattttgctgcatcttgagaagttgtatgtttcctaggtatttctaaattttaggaggtcacttaaatcaaatattttctacattttctttttcttcttttgagatggagtcttgctctgtcacccaggttggagtgcagtggtgtgatctcggttcactgcaacctccgcctcccggttcaagc

SEQ ID NO: 120743 - DNA, 1536 bp, Homo sapiens
  Payload ID: 3652
  Gene Symbol: CCDC125
  Gene Name: coiled-coil domain containing 125
  Uniprot ID: Q86Z20
  ENST ID: ENST00000620431
  CDS Start-End: 1-1536
atgagcaaggtggcaagatcatcaagtgagtcagacgtgcagctctgggaaacagaagaggatgacatgacagaaggtgatttagggtatggcctcggaaggaaacctggtgggatttatgaaatagaattttcacataggtctagaaaaagatcagatggaaagaactttagccctcctccatttccgagaaagggagaagaaagaaatgaagcgagttttcagtattccaagcataagagccagcaagatacattccctcaagtgtccagaatttccaattacagacgacaaagtagcactgtagattcgaattcagaattgtcaaatgaagaattaaggcaatgtcttaatgaaactttagaggaggtagaaatgttaaaaactgaacttgaggcatctcaaagacaactcagaggtaaagaggaagcattgaaaattcttcaaagcatggcaatactgggcaaagccacaagtcatacgcaggcagtgcttcaaaaaactatggaacaaaacagatccttggagaaggaaataaatgccttgcagtgggaaatagaatttgatcataatagatttaaaaatatagaggaatcttggatccaaaaatatgacaggctaaactgtgaaaatgcagtcctcaaagagaatttgaaagtgaaaacagaagaaattaaaatgctgaagtctgacaatgcagttttgaatcaacggtatttggaggccctcgccatgcttgatatcaaacagcagaagatggctcaggaaaacatgtgctgtgataaaagtggctttgcagaggcttcaggtcttgagcttgcggtcctcggagcctgcctttgtcatgggcccggagggaacccctgttcttgtgccagaatggcagcatccactcggaaactgcttcttcagctcaaacaagagttggaaattttgcagaagagtaaagaagaagcttacgtgatggcagatgctttcagaattgcatttgagcaacaattaatgagaaaaaatgaccaggcactacaattgacacaaatggataaaatgcataaaaaagcaacaaaatggatgaattggaagcaccttaaagaggatggatttccatcaccaaggagtaagaagaccttcgggcagagactgttgggtatgctcccttcagaaaacagttctaagaggatggaagaccaggacagtcctcaagaggtccttaagatgctcatagatttgcttaatgataaagaagaagctttggctcatcaaagaaaagttagctacatgcttgctcgggcattggaagacaaagacactgcttcaaacgagaataaagaaaaaaatcctataaaagagaatttccctttcaacaacccctggcgtaagacttcagaattctctgttttgggtgatcctatacattcaagtgtctgcattttaaattctgtgggctgcatttgttcaatccagcactctcaaatagatccaaactatagaactcttaaaagatcccattctttgccatcaagtatcatattttaa

SEQ ID NO: 120744 - DNA, 2006 bp, Homo sapiens
  Payload ID: 3652
  Gene Symbol: CCDC125
  Gene Name: coiled-coil domain containing 125
  ENST ID: ENST00000610685
  CDS Start-End: 86-1024
gcggcggcagcggcgcacgcgcacggagaggaggctacttgccagacagcccattttttcttatgataaagacggcatttggctcatgagcaaggtggcaagatcatcaagtgagtcagacgtgcagctctgggaaacagaagaggatgacatgacagaaggtgatttagggtatggcctcggaaggaaacctggtgggatttatgaaatagaattttcacataggtctagaaaaagatcagatggaaagaactttagccctcctccatttccgagaaagggagaagaaagaaatgaagcgagttttcagtattccaagcataagagccagcaagatacattccctcaagtgtccagaatttccaattacagacgacaaagtagcactgattcgaattcagaattgtcaaatgaagaattaaggcaatgtcttaatgaaactttagaggaggtagaaatgttaaaaactgaacttgaggcatctcaaagacaactcagaggtaaagaggaagcattgaaaattcttcaaagcatggcaatactgggcaaagccacaagtcatacgcaggcagtgcttcaaaaaactatggaacaaaacagatccttggagaaggaaataaatgccttgcagtgggaaatagaatttgatcataatagatttaaaaatatagaggaatcttggatccaaaaatatgacaggctaaactgtgaaaatgcagtcctcaaagagaatttgaaagtgaaaacagaagaaattaaaatgctgaagtctgacaatgcagttttgaatcaacggtatttggaggccctcgccatgcttgatatcaaacagcagaagatggctcaggaaaacatgtgctgtgataaaagtggctttgcagaggcttcaggtcttgaggatttccatcaccaaggagtaagaagaccttcgggcagagactgttgggtatgctcccttcagaaaacagttctaagaggatggaagaccaggacagtcctcaagaggtccttaagatgctcatagatttgcttaatgataaagaagaagctttggctcatcaaagaaaagttagctacatgcttgctcgggcattggaagacaaagacactgcttcaaacgagaataaagaaaaaaatcctataaaagagaatttccctttcaacaacccctggcgtaagacttcagaattctctgttttgggtgatcctatacattcaagtgtctgcattttaaattctgtgggctgcatttgttcaatccagcactctcaaatagatccaaactatagaactcttaaaagatcccattctttgccatcaagtatcatattttaaagacaagccagttgaaattggaactgagagttgtttatatcgagatactttgaaaaatgattttgtaaattttgctgcatcttgagaagttgtatgtttcctaggtatttctaaattttaggaggtcgcttaaatcaaatattttctacattttctttttcttcttttgagatggagtcttgctctgtcacccaggttggagtgcagtggtgtgatctcggttcactgcaacctccgcctcccggttcaagcaattctcctgcctcagcctcccgagtaactcggattacaggcatgtgccaccacgcccagctaatttttgtatttttagtagagacggggttttaccatgttagccaggctgatcttgaactcctgacctcaagtgatccgcctgccttggcctccgaaagtgctgggattacaggcgtgagccaccacacccagcctattttctacattttctacaagaaattagtattctgtgttgacattttatttataaattacattactgtatttataaattacattacaggctgggcatggtggctcatgcttataaatcccagcactttgggaggccaaggtgggtgggtcacctgaggctggagttcaagaccagtctgaccaacatggagaaaccccatctctactaaaaatacaaaaaa

SEQ ID NO: 120745 - DNA, 2630 bp, Homo sapiens
  Payload ID: 3652
  Gene Symbol: CCDC125
  Gene Name: coiled-coil domain containing 125
  Uniprot ID: Q86Z20
  ENST ID: ENST00000619386
  CDS Start-End: 1-1536
atgagcaaggtggcaagatcatcaagtgagtcagacgtgcagctctgggaaacagaagaggatgacatgacagaaggtgatttagggtatggcctcggaaggaaacctggtgggatttatgaaatagaattttcacataggtctagaaaaagatcagatggaaagaactttagccctcctccatttccgagaaagggagaagaaagaaatgaagcgagttttcagtattccaagcataagagccagcaagatacattccctcaagtgtccagaatttccaattacagacgacaaagtagcactgtagattcgaattcagaattgtcaaatgaagaattaaggcaatgtcttaatgaaactttagaggaggtagaaatgttaaaaactgaacttgaggcatctcaaagacaactcagaggtaaagaggaagcattgaaaattcttcaaagcatggcaatactgggcaaagccacaagtcatacgcaggcagtgcttcaaaaaactatggaacaaaacagatccttggagaaggaaataaatgccttgcagtgggaaatagaatttgatcataatagatttaaaaatatagaggaatcttggatccaaaaatatgacaggctaaactgtgaaaatgcagtcctcaaagagaatttgaaagtgaaaacagaagaaattaaaatgctgaagtctgacaatgcagttttgaatcaacggtatttggaggccctcgccatgcttgatatcaaacagcagaagatggctcaggaaaacatgtgctgtgataaaagtggctttgcagaggcttcaggtcttgagcttgcggtcctcggagcctgcctttgtcatgggcccggagggaacccctgttcttgtgccagaatggcagcatccactcggaaactgcttcttcagctcaaacaagagttggaaattttgcagaagagtaaagaagaagcttacgtgatggcagatgctttcagaattgcatttgagcaacaattaatgagaaaaaatgaccaggcactacaattgacacaaatggataaaatgcataaaaaagcaacaaaatggatgaattggaagcaccttaaagaggatggatttccatcaccaaggagtaagaagaccttcgggcagagactgttgggtatgctcccttcagaaaacagttctaagaggatggaagaccaggacagtcctcaagaggtccttaagatgctcatagatttgcttaatgataaagaagaagctttggctcatcaaagaaaagttagctacatgcttgctcgggcattggaagacaaagacactgcttcaaacgagaataaagaaaaaaatcctataaaagagaatttccctttcaacaacccctggcgtaagacttcagaattctctgttttgggtgatcctatacattcaagtgtctgcattttaaattctgtgggctgcatttgttcaatccagcactctcaaatagatccaaactatagaactcttaaaagatcccattctttgccatcaagtatcatattttaaagacaagccagttgaaattggaactgagagttgtttatatcgagatactttgaaaaatgattttgtaaattttgctgcatcttgagaagttgtatgtttcctaggtatttctaaattttaggaggtcgcttaaatcaaatattttctacattttctttttcttcttttgagatggagtcttgctctgtcacccaggttggagtgcagtggtgtgatctcggttcactgcaacctccgcctcccggttcaagcaattctcctgcctcagcctcccgagtaactcggattacaggcatgtgccatctctactaaaaatacaaaaaattagctaggcctagtggcgcatgcctgtaatcccagctacttgggaggctgaggtaggagaatcgcttgaacctgggaggcaggggttgtggtaagccgagactgtgtcattgcactccagcctgggcgacaagagcgaaactctgtctcaaaaaaaaaaacaaaacacattacagtgtttgccaacatcctaaaacaaaaaataatgatttttgggaaaaacaaaaaattatttaactattttgattgactatagggatcttagcttggctaaatcaacaatatagcaatgtatcttaatgctctaaaaagtaacaatacctaggactgactgaatgttaatttctggaattcatttatcttgttttatttgccttgttcagtatttttcatttaccatatgaagtttagaaataacaatttccttaagttaacttcaataagacagttttgatggtgggaccttggcagaagtatattgagtcagtgccggctgcgttcatggcttcttgtcagggtagtaacattttgcaaccaaatctgcacagatttgtagccaagtctacaaagtgcttaacagctcttttcattgcatcctgtgagatggttgtgatgatccaggaaatggggtctcaggaatctgaagaagctgcctgagccaaggtgatttctaggagtttttttgtttgtggtatgtgaattggggtgtgtgggggtggggtgtgtgtgtagacagggtcccactgtgttgctcaggctggtgccaaact

SEQ ID NO: 120746 - DNA, 1735 bp, Homo sapiens
  Payload ID: 3652
  Gene Symbol: CCDC125
  Gene Name: coiled-coil domain containing 125
  Uniprot ID: Q86Z20
  ENST ID: ENST00000612469
  CDS Start-End: 323-1483
acgcgcacggagaggaggctacttgccagacagcccattttttcttatgataaagacggcatttggctcatgagcaaggtggcaagatcatcaagtgagtcagacgtgcagctctgggaaacagaagaggatgacatgacagaagggagaagaaagaaatgaagcgagttttcagtattccaagcataagagccagcaagatacattccctcaagtgtccagaatttccaattacagacgacaaagtagcactgattcgaattcagaattgtcaaatgaagaattaaggcaatgtcttaatgaaactttagaggaggtagaaatgttaaaaactgaacttgaggcatctcaaagacaactcagaggtaaagaggaagcattgaaaattcttcaaagcatggcaatactgggcaaagccacaagtcatacgcaggcagtgcttcaaaaaactatggaacaaaacagatccttggagaaggaaataaatgccttgcagtgggaaatagaatttgatcataatagatttaaaaatatagaggaatcttggatccaaaaatatgacaggctaaactgtgaaaatgcagtcctcaaagagaatttgaaagtgaaaacagaagaaattaaaatgctgaagtctgacaatgcagttttgaatcaacggtatttggaggccctcgccatgcttgatatcaaacagcagaagatggctcaggaaaacatgtgctgtgataaaagtggctttgcagaggcttcaggtcttgagcttgcggtcctcggagcctgcctttgtcatgggcccggagggaacccctgttcttgtgccagaatggcagcatccactcggaaactgcttcttcagctcaaacaagagttggaaattttgcagaagagtaaagaagaagcttacgtgatggcagatgctttcagaattgcatttgagcaacaattaatgagaaaaaatgaccaggcactacaattgacacaaatggataaaatgcataaaaaagcaacaaaatggatgaattggaagcaccttaaagaggatggatttccatcaccaaggagtaagaagaccttcgggcagagactgttgggtatgctcccttcagaaaacagttctaagaggatggaagaccaggacagtcctcaagaggtccttaagatgctcatagatttgcttaatgataaagaagaagctttggctcatcaaagaaaagttagctacatgcttgctcgggcattggaagacaaagacactgcttcaaacgagaataaagaaaaaaatcctataaaagagaatttccctttcaacaacccctggcgtaagacttcagaattctctgttttgggtgatcctatacattcaagtgtctgcattttaaattctgtgggctgcatttgttcaatccagcactctcaaatagatccaaactatagaactcttaaaagatcccattctttgccatcaagtatcatattttaaagacaagccagttgaaattggaactgagagttgtttatatcgagatactttgaaaaatgattttgtaaattttgctgcatcttgagaagttgtatgtttcctaggtatttctaaattttaggaggtcgcttaaatcaaatattttctacattttctttttcttcttttgagatggagtcttgctctgtcacccaggttggagtgcagtggtgtgatctcggttcactgcaacctccgcctcccggttcaagc

SEQ ID NO: 120747 - DNA, 2473 bp, Homo sapiens
  Payload ID: 3653
  Gene Symbol: CCDC126
  Gene Name: coiled-coil domain containing 126
  Uniprot ID: Q96EE4
  ENST ID: ENST00000307471
  CDS Start-End: 458-880
agggaggcggagcggaagccgagtgcgagggacgagcggagtaaaatctccacaagctgggaacaaacctcgtcccaactcccacccaccggcgtttctccagctcgatctggaggctgcttcgccagtgtgggacgcagctgacgcccgcttattagctctcgctgcgtcgccccggctcagaagctccgtggcggcggcgaccgtgacgagaagcccacggccagctcagttctcttctactttgggagagagagaaagtcagatgccccttttaaactccctcttcaaaactcatctcctgggtgactgagttaatagagtggatacaaccttgctgaagatgaagaatatacaatattgaggatatttttttcttttttttttcaagtcttgatttgtggcttacctcaagttaccatttttcagtcaagtctgtttgtttgcttcttcagaaatgttttttacaatctcaagaaaaaatatgtcccagaaattgagtttactgttgcttgtatttggactcatttggggattgatgttactgcactatacttttcaacaaccaagacatcaaagcagtgtcaagttacgtgagcaaatactagacttaagcaaaagatatgttaaagctctagcagaggaaaataagaacacagtggatgtcgagaacggtgcttctatggcaggatatgcggatctgaaaagaacaattgctgtccttctggatgacattttgcaacgattggtgaagctggagaacaaagttgactatattgttgtgaatggctcagcagccaacaccaccaatggtactagtgggaatttggtgccagtaaccacaaataaaagaacgaatgtctcgggcagtatcagatagcagttgaaaatcaccttgtgctgctccatccactgtggattatatcctatggcagaaaagctttataattgctggcttaggacagagcaatactttacaataaaagctctacacattttcaaggagtatgctggattcatggaactctaattctgtacataaaaattttaaagttatttgtttgctttcaggcaagtctgttcaatgctgtactatgtccttaaagagaatttggtaatttggttgatgtggtaagcagataggtgagttttgtataaatcttttgtgtttgagatcaagctgaaatgaaaacactgaaaaacatggattcatttctataacacatttatttaagtatataacacgttttttggacaagtgaagaatgtttaatcattctgtcatttgttctcaatagatgtaactgttagactacggctatttgaaaaaatgtgcttattgtactatattttgttattccaattatgagcagagaaaggaaatataatgttgaaaataatgttttgaaatcatgacccaaagaatgtattgatttgcactatccttcagaataactgaaggttaattattgtatatttttaaaaattacacttataagagtataatcttgaaatgggtagcagccactgtccattacctatcgtaaacattggggcaatttaataacagcattaaaatagttgtaaactctaatcttatacttattgaagaataaaagatatttttatgatgagagtaacaataaagtattcatgatttttcacatacatgaatgttcatttaaaagtttaatcctttgagtgtctatgctatcaggaaagcacattatttccatatttgggttaattttgcttttattatattggtctaggaggaagggactttggagaatggaactcttgaggactttagccaggtgtatataataaaggtacttttgtgctgcattaaattgcttggaaaatgttaacattatattatataagagtatcctttatgaaattttgaatttgtataacagatgcattagatattcattttatataatggccacttaaaataagaacatttaaaatataaactatgaagattgactatcttttcaggaaaaaagctgtatatagcacagggaaccctaatcttgggtaattctagtataaaacaaattatacttttatttaaatttcccttgtagcaaatctaattgccacatggtgccctatatttcatagtatttattctctatagtaactgcttaagtgcagctagcttctagatttagactatatagaatttagatattgtattgttcgtcattataatatgctaccacatgtagcaataattacaatattttattaaaataaatatgtgaaatattgtttcatgaaagacagatttccaaatctctcttctcttctctgtactgtctacctttatgtgaagaaattaattatatgccattgccaggtagaagtttggaataattgtttagtctctcctattagatgtggacatttttgtttttgtttttgttttcagggatgaaataaaatatattatttctaccta

SEQ ID NO: 120748 - DNA, 890 bp, Homo sapiens
  Payload ID: 3653
  Gene Symbol: CCDC126
  Gene Name: coiled-coil domain containing 126
  Uniprot ID: Q96EE4
  ENST ID: ENST00000410069
  CDS Start-End: 346-768
ggtgatcttggttacttaaaggctctaagcttgagttttctcatccatcaaaacacacacctgactaggtaatgctccagtgacttaataccaatgacattttcatgttgtccacaaattctgagtagaaaccttttcaagcctgtagcctctctgagagctgactgttattaactgaatgagaggatgtcagcaaacagagttaatagagtggatacaaccttgctgaagatgaagaatatacaatattgaggatatttttttcttttttttttcaagtcttgatttgtggcttacctcaagttaccatttttcagtcaagtctgtttgtttgcttcttcagaaatgttttttacaatctcaagaaaaaatatgtcccagaaattgagtttactgttgcttgtatttggactcatttggggattgatgttactgcactatacttttcaacaaccaagacatcaaagcagtgtcaagttacgtgagcaaatactagacttaagcaaaagatatgttaaagctctagcagaggaaaataagaacacagtggatgtcgagaacggtgcttctatggcaggatatgcggatctgaaaagaacaattgctgtccttctggatgacattttgcaacgattggtgaagctggagaacaaagttgactatattgttgtgaatggctcagcagccaacaccaccaatggtactagtgggaatttggtgccagtaaccacaaataaaagaacgaatgtctcgggcagtatcagatagcagttgaaaatcaccttgtgctgctccatccactgtggattatatcctatggcagaaaagctttataattgctggcttaggacagagcaatactttacaataaaagctctacacattttcaa

SEQ ID NO: 120749 - DNA, 2324 bp, Homo sapiens
  Payload ID: 3653
  Gene Symbol: CCDC126
  Gene Name: coiled-coil domain containing 126
  Uniprot ID: Q96EE4
  ENST ID: ENST00000409765
  CDS Start-End: 310-732
caaacctcgtcccaactcccacccaccggcgtttctccagctcgatctggaggctgcttcgccagtgtgggacgcagctgacgcccgcttattagctctcgctgcgtcgccccggctcagaagctccgtggcggcggcgaccgtgacgagaagcccacggccagagttaatagagtggatacaaccttgctgaagatgaagaatatacaatattgaggatatttttttcttttttttttcaagtcttgatttgtggcttacctcaagttaccatttttcagtcaagtctgtttgtttgcttcttcagaaatgttttttacaatctcaagaaaaaatatgtcccagaaattgagtttactgttgcttgtatttggactcatttggggattgatgttactgcactatacttttcaacaaccaagacatcaaagcagtgtcaagttacgtgagcaaatactagacttaagcaaaagatatgttaaagctctagcagaggaaaataagaacacagtggatgtcgagaacggtgcttctatggcaggatatgcggatctgaaaagaacaattgctgtccttctggatgacattttgcaacgattggtgaagctggagaacaaagttgactatattgttgtgaatggctcagcagccaacaccaccaatggtactagtgggaatttggtgccagtaaccacaaataaaagaacgaatgtctcgggcagtatcagatagcagttgaaaatcaccttgtgctgctccatccactgtggattatatcctatggcagaaaagctttataattgctggcttaggacagagcaatactttacaataaaagctctacacattttcaaggagtatgctggattcatggaactctaattctgtacataaaaattttaaagttatttgtttgctttcaggcaagtctgttcaatgctgtactatgtccttaaagagaatttggtaatttggttgatgtggtaagcagataggtgagttttgtataaatcttttgtgtttgagatcaagctgaaatgaaaacactgaaaaacatggattcatttctataacacatttatttaagtatataacacgttttttggacaagtgaagaatgtttaatcattctgtcatttgttctcaatagatgtaactgttagactacggctatttgaaaaaatgtgcttattgtactatattttgttattccaattatgagcagagaaaggaaatataatgttgaaaataatgttttgaaatcatgacccaaagaatgtattgatttgcactatccttcagaataactgaaggttaattattgtatatttttaaaaattacacttataagagtataatcttgaaatgggtagcagccactgtccattacctatcgtaaacattggggcaatttaataacagcattaaaatagttgtaaactctaatcttatacttattgaagaataaaagatatttttatgatgagagtaacaataaagtattcatgatttttcacatacatgaatgttcatttaaaagtttaatcctttgagtgtctatgctatcaggaaagcacattatttccatatttgggttaattttgcttttattatattggtctaggaggaagggactttggagaatggaactcttgaggactttagccaggtgtatataataaaggtacttttgtgctgcattaaattgcttggaaaatgttaacattatattatataagagtatcctttatgaaattttgaatttgtataacagatgcattagatattcattttatataatggccacttaaaataagaacatttaaaatataaactatgaagattgactatcttttcaggaaaaaagctgtatatagcacagggaaccctaatcttgggtaattctagtataaaacaaattatacttttatttaaatttcccttgtagcaaatctaattgccacatggtgccctatatttcatagtatttattctctatagtaactgcttaagtgcagctagcttctagatttagactatatagaatttagatattgtattgttcgtcattataatatgctaccacatgtagcaataattacaatattttattaaaataaatatgtgaaatattgtttcatgaaagacagatttccaaatctctcttctcttctctgtactgtctacctttatgtgaagaaattaattatatgccattgccaggtagaagtttggaataattgtttagtctctcctattagatgtggacatttttgtttttgtttttgttttcagggatgaaataaaatatattatttctacct

SEQ ID NO: 120750 - DNA, 847 bp, Homo sapiens
  Payload ID: 3653
  Gene Symbol: CCDC126
  Gene Name: coiled-coil domain containing 126
  ENST ID: ENST00000448353
  CDS Start-End: 516-847
gcagctgacgcccgcttattagctctcgctgcgtcgccccggctcagaagctccgtggcggcggcgaccgtgacgagaagcccacggccagctcagttctcttctactttgggagagagagaaagtcagatgccccttttaaactccctcttcaaaactcatctcctgggtgactgactacttggaagatgaactgttctcatcagcaacatgctattatgtcatcttttaggactaggtaatgctccagtgacttaataccaatgacattttcatgttgtccacaaattctgagtagaaaccttttcaagcctgtagcctctctgagagctgactgttattaactgaatgagaggatgtcagcaaacagagttaatagagtggatacaaccttgctgaagatgaagaatatacaatattgaggatatttttttcttttttttttcaagtcttgatttgtggcttacctcaagttaccatttttcagtcaagtctgtttgtttgcttcttcagaaatgttttttacaatctcaagaaaaaatatgtcccagaaattgagtttactgttgcttgtatttggactcatttggggattgatgttactgcactatacttttcaacaaccaagacatcaaagcagtgtcaagttacgtgagcaaatactagacttaagcaaaagatatgttaaagctctagcagaggaaaataagaacacagtggatgtcgagaacggtgcttctatggcaggatatgcggatctgaaaagaacaattgctgtccttctggatgacattttgcaacgattggtgaagctggagaacaaagttgactatattgttgtgaatgg

SEQ ID NO: 120751 - DNA, 9342 bp, Homo sapiens
  Payload ID: 3654
  Gene Symbol: CCDC127
  Gene Name: coiled-coil domain containing 127
  Uniprot ID: Q96BQ5
  ENST ID: ENST00000296824
  CDS Start-End: 134-916
atcgcgcctgcgcaccatgccacgcccggagcgggtactgagtgggggcgccgcgcctgcgcaaagcggacccgcggacggtggcgttaagggaacgctgaggtcccgcgctccccgaccgaggtatatctccatgaataacctaaatgatcccccaaattggaatatccggcctaattccagggcggatggtggtgatggaagcaggtggaattatgccctgttggttccaatgctgggattggctgcttttcgttggatttggtctagggagtcccagaaagaagtagaaaaagagagagaagcctaccgtcggagaactgctgcttttcaacaggatctggaagccaagtaccacgccatgatctcagaaaatcggcgtgctgtcgctcagttgtccttggaactcgaaaaggaacaaaacagaactgctagttaccgagaagcccttatctctcagggacgcaagttggtagaagaaaagaagcttctggaacaggaacgggcccaggtgatgcaagaaaaaagacaggtgcagcctttgagaagtgcgtatttgagctgcctgcaaagggaagaaaactggcaaaggagagccaggcttttgctgaaagaatttgaagctgttctcacagaaagacagaatatctactgcagtctgtttcttcctcgcagcaagcggctggagatagagaagagcttactggtgcgagcgtccgtcgaccccgtcgccgctgacctagagatggcagccggtctcaccgacatatttcagcatgatacatactgtggtgatgtctggaacaccaacaaacgccagaatggcagactcatgtggctctatctcaaatactgggaactcgttgtcgaactgaagaagtttaagagagtagaggaagccatactagaaaagtaagacaagagtgaaatcaaactgcttttagtgactcgaggccaggcagtcatgcgccttctgggtctccggcgtcttccgttcccgtgctgcccgtgtcatggccacaccgtcacccttcagcagcgacctccactcccgccaccgtctgagcagaagtgcaccgaagcctcagagacagagggtctcctcccgatgctctgccgctgttggggatatggtttcttgaagcatttttaggctgccagtattgtattaagcagaacagtataacctcgtattttagctccagggtaaaaatggttttttaaaaagtcaaatacaatactggtccttaccacaagtaattttctgtctgtttcatcactccctaaatactttctcctcaaattatttttctctgtcaccagattacattaagaatttgtcagataatgtgtagaactgcataacaggtaataggaagtagtaatattatattatcaagggtttatattttaaagatctctctcactccataaaggggaaataccaagtgtttcttgtatccagttgttacttaatgtgtgtttgttgtatgcagttgttacctaatgtgtgtttgttgtatgcagttgttacctaatgtgtgtgtgttgtatgcagttgttacctaatgtgtgtgtgttgtatccagttgttacctaatgtgtgtttggaatttggcttgtgtctgtattcagcaagcagatacttattagcaatgatatatactcaaaatacttgccatttatgagtaataatgccactttttgtgtaattcttcactctttacaaaatatttttatatgtattatctcattgtttaccacagccaacaaggtagacaggcacttatcaccccatgtcacacatagctactgggaattgagcctgtatacctgttcactcatggaatcctcagtcgaatcctgtgaagtgagtattactattacgctttgcggaggtgccccaaggccagcccccaggtgcgtgacctgctgggagatctcacaggactcagcacagggttggactcagcacagagcagaatcagcaaagggagagggtgtgtgggtggcgctcagaggagccacgtgtggacaccccaggatccactccctggagtcatacaggacacacctaactattaagaataagctcactggagactcagcacctggggcttttgctaagggctggtcatgtggtaccccctgcctggcctgtgtgggaattccccacttgtccagaaggagggtgggtttggtgtggtctgtgccgtgagcacaagtactgtggtcacagagccacgcgtaggagttaatggtgctgggaagtctcccagaatccgagttcccagatgtcagtcaagggccagccttgcacacaggccctggtaggacacagccttgggcctgctgtgtgaattcgtcaccacgcacctcactttacggagatgtggaagagctaacctgcctgaggtcacgcaggtagtagtgttggagccagtctgagcccgggcaccttttctccagaaccgcgagtaacctgtgtgcagtgatttgatagtgtgtggccaggcaggagcgggagcaggttgtccatctgctttcaagggccatgttctcccctcctgcccgtctgtacgggagtaggagcaactgttaaaaatcctaagctcatagagcccacgtggcagtatgagagccactattcatggagtgcatgttccaccctgagctgtacacgctttacacgcatgcgttgtttgaaatccgtggaaccccttgagcgcggcggaggcgggctcagagccaacatgcgctgcctgcaacagacacgggccccctgccatgctctgctctcggcacccacgccctgctaagggtgctcagatgcttcacccaggcaggagtgcagtggtgtgatggctaagggtgctcagatgcttctcttcttcagtggctgctagcgtgcctctctgctctaccaccatcgctttatctgagaaaaagtcacttttattttcattttttattttttttgagagggaatctctgtcacccaggcaggagtgcagtggtgtgatctcagctcactacagcctccgcctcctgggttcaagcgattctcctgcctcagcctcctgggtagctgggattacaggcgtgcgctaccacacccagctaatttttgttttgttagtagagacggggtttcaccatgttggccaggctggtctcgaactgctgacctcaggtgatccaccgcccccacctcggcctcccacagcactgggattacaggtgtgggccacggcacccggcccctaaaaagtcattttttcggtaaatctggacaaaactcttcctgttgttgtttgtacttcctgatgcatcaagacccttgcctaaagagcggtgcaggctccattcctgcggcaatccggtctgctgggtgtccctgtgtgaaccactccacgtttgtctttaaatgaagaaaacacagtcagctgctttgtaggtgaatgattttcgaggcaaattgttaatcctcatcctgtttctaatgtccagtgtgctgtcagcctagcttccttctatagtgagatagatatgttcagagccttcaagctggtgtggacactgacccgctgacccggtcctgcagagttaggaagacgagcattttttttttgagacagtctcgttctgttgccaggcgggagtgcagtggcacaatctcgcctcactgcaagctctgcctcccgggttcgagtagtttgcctgcctcagcctcccgagtagctgggactacaggtgcctgccaccatgcctggctaatttttgtatgtttagtagagacagggtttcaccatgttggccaggatggcctcaaacttctgatctcaggtgatccacctgcctcagcctcccaaagtgctgggattaggggcgtgagccaccgtgcctggccggaagatgctctttccacagggttgatattagttcgtgtttgtgtggcgtggctgccttccatcagcaagtttgagtgttgatgtgaggccaccctcttttgaaatggattgtggtcggtttggaatagttacacggtgctgtgccatttggtaactccacacatgtaccgaaaggtgagcccacagtggaacgctcctcaaccaaagtggtttaaagttgcagaaaagggtaattgtgctggttggtgtgtgtgctgaatttgtagcgacatcagagtcaagcattatttgtcctgctgctttcttggaggtcacagtaactataaaaccgtgagccagcaaggcagagaggaccctttggggtaaggagtggagctctgggagatcctaggtttcggaagcaggtccagtttccttggggaggggagggctcgctgcagggcggaggaggggcagccactgtaatccttgtctggagtgaacattgtatatgaggttgcagtggcttaaaaaggaaggacttttgcggggaggggttgagattgtactttctaatttcgcttgcttcagacttgactttggaatgaagttcgaaggcatcacaattgacctggacattccaaaaacaaaactgaagaggcagcatttctcttccgtagtccagtcagctcatttggtagatgcgctttttcctcctttgcgcttattcatccataaggatatataatttgcatatatatttcatatgcgtgcatatgtgtgtgtatgtgtgaactggcaggtgttgatttcataaggacaaaattgttctgcaaaccttgcaccaattatggggtgtttcaacggaaaaacttcaccaaatgatctgtgtgttctttcaaagagaagttatgtctaattaaaatgtgtaacggactatttctgtgttggattgtttaaaaagtgattgcttcatagtgtactaagatcatctctttaagcagaagggagaaaacagctttctagttactttcacatattaggtttgctacataaaagcaagtctgaagactacacctgtgacattgcagagaccaaactgcagtgtgtgcagccatgagtggcagctgcttcctcctcgaggtgtcttgttccagcatgaggacagcccgtgcgatgttgggaggagccagggtgtttgggggggcagctgccctagacactggctggctgtgatggggggcagcctgctgtgtagacactggctggctgtgatggggggcagcctgctgtgtagacactggctggctgtgatgggggcagcctgctgtgtagacgctggctgtgatgggggcagcctgctgtgtagacgctggctggctgtgatgggggcagcctgctgtgtagacgctggctagctgtgatgggggcagcctgctgtgtagacgctggctggctgtgatgggggcagcctgctgtgtagaaagtgctgggcttgctccgtctgccttgacttgtgtgagtaactgcgctgggttttataggttgaggctgaaaaggctcctctttctatgctgggtttgacgaaacagttgctgtatttctctattaatttaggattctgtttgcaagcagcagagatggatttgtgctagcctagaaagttaaagagggatttaaggctgtctcgtgaaacttcaggtcaagaatggagaacacaggttagatgtcagagaagaaccagaaagacaaataagggactctcaggggcctcggagtacttgtcactctgtgtcatatctctgcatagccgcgccaatccccaaaccagcttctctggccacacggtgggacagggcggttcccacagctcctgagcctgccccctgcctggcctgctccagcgggcggccgagttagggaagcgctgggctccaccataccgcggtgttctaaaggagtgggaacaatgaagatcagggttgcagagcctgtggcctttgctagcttcatgggaaatcttgaaaagagaaaacgaagggcttcagtaagccacccatggacagcaggcatgcggtggaaggcggagggcttctgtggcagcttcgcaggtctctcatctgctgcagaccccctgacaggctgagggtcttgctgtcgggtagcgggaccagatgagcctgaatgtggctctgcggctcacaggacaagtgtaccttgagagctgctgccgccgcctggatgtttgctgggtgagctccagattcacgggagccctttgtgccagcatggccgccccaaccccatggggaaagcagatctccctcacctgggaatctggcagagacctcaggcagtgccccatctttcatgacctgcctggtccaggtagaggagtcaagtcctgctccaggagcaggtgcagggcctggcctgggtgccgagagtggggtgaggagggaggagtaacgaagaaaggcagatgggcagaaagtgccacattggggcactcaagtggctctgtttaatattccagcagggacactgagaccgagcccatccctgctgggagagcttctcgaagctggttggtggctgacaggcagggagtggggtgctggggcctcctcgggaggtaggggtgctggggccctgctcttgacagcactgtgccatagctccgaggtggctgctccccatgggccagggctggtggtgccagaaaatgggatctgggctgaggggctctgggctggcagaggtggggcggggggtgactggcaggcatcaagatggggggggacaagcacggtgcccccacccatggggccgtgtggggctgatggatagtgggactccagcatgcagcagatgatggagccttgctcaactcagaagaggaagagcaggagagcgctggtggatgagagcaaccctgatgttccagggcccttggccacgtccaccacacagaggggccacgtccacacagaggggccacgtccaccacacagaggggccacgtccaccacacaggggccactgggcctgcgtatatctccttggcctgcgagggtatcatcatttcctgacctgtggaacaagtcattaagccaggaaggacttgagttggagcccctaaaacggcccccactccttgccaggatggtggacaggaagcagtgccatgttctgaaggagctgcaccagcccatgctgctgtggaagacccaagggaggcaaagacggtggctccagatggcggcccccattgggaccctgctcacatcacccactggccctggaaagccggggtgggcctgggcaggtgaaccctgaggctccgccaggagcagccccagctacagccaccatggatgtttgctgggttggatcagcactctcacctgctgaatggttttgcctgattcccactagcttgtcttgtgtgggaggccgtgttttctgcggtagagaagtgctctccataaaaacccagcaggcgtgctcctgggccctgcagacgccggatgtgtggccacagacgccatgcgacccaggactggagtcacaagattgggcgaggacaaagacccagcgaatggtgaacggccatgcaggatggggccgatcagttcagtaggagcaagtgcgagacctgcacaggacgggcgagggaggcgttggtccccagcctctgctggccttatcagaatgggctgttcttgggaagcccctgggtgtctgtggagctggagatgttgggagcttgtgccctcagcaccgcccactgacaccagtgggctcctgtgtgccctgcccaatcccaggcctcaggacacccagcaccctgggcccttctccactgccacaggccttaaggttggtcatcatgccgcccagcggctgagtcttacaataaaaattcagacacaaagcagtggcagccactctgtgctttagagttagaagtaagtcattaaaaatgttggcccagcaccttccctgcctgtttccaaaagctggccgcaatatcaaattcatgtccctggacaaggctccagtaaggcactgcctgcagtgtgcagagagcacttaggtggttgcagagcaggcagagacgaatgtggggagtggaagtcaccatatctgcccactcggcaggaggccgtccattcctgagacgcccccgggaggcaggctcctgtacggcactcatgctgggtacccaacccctacaacccaggcaaacccctaccctgggcagagaagggcctggacacaccaggggcagaaggagaaaggggatggagacaaacctgggtgggggtgacctgggggcagctggggtggggtgacacggggaccattggggtggggacacactccgggagggggagacacggggcagcaggggtgggggcacacctggagtggggtgacatgggggcccctggggtggggacacactcggggagggggtgacacagggaccactggggtggggacacactccgggagggggtgatacggggcagcggtgtagggaaaagagagatcagactgtcactgtgtctatgtagaaagggaagacatgagactccgttttgaaaaagacctgtactttaaataattgctttgctgagatgatgttaatgtgtagctttgccccagccactttgccccaacctggagctcacaaaaacatgtgttgtatgaaatcaaggtttaagggatctagggctgtgcaggacgtgccttgttaacaaaatgtttacaagcagtatgcttggtaaaagtcatcgctattctctagtctcaataaaccagaggcacaatgcactgcggaaagccgcagggacctctgcccttgaaagccgggtattgtccacggtttctccccatgtgatagtctgaaatatggcctcgtggaatgagaaagacctgaccgtcccccagcccgacacccgtaaagggtctgtgctgacatgggttagtaaaagacgaaagcctcttgcagttgagagagagaagtccactgtctcctgctcgccgctgggaactgaatgtcgcggtgtaaaacccgattgtacatttgttcaactctgagacaggagaaaagccgccttgtggcgggaggcgagacatgtttgcggcaatgctgccttgttattctttactctgctgagatgtttgggtggagagaaacataaatctggcctacgtgcacgtccaggcatagtaccttcccttgaacttaattacgacatagattcttttgctcacacgtttttgctgacctcctccttattatcaccctgctctcctactacattcctttttgctgaaataatgaaaataataataaaaactgagggaactcagaggccggtgccagtgcaggtccttggtatgctgagcgccggtcccctgggcccactgttgtttctct

SEQ ID NO: 120752 - DNA, 576 bp, Homo sapiens
  Payload ID: 3654
  Gene Symbol: CCDC127
  Gene Name: coiled-coil domain containing 127
  ENST ID: ENST00000441693
  CDS Start-End: 370-576
tttctccactttccccaaccagattgtgagtcgctttcatcttaagttcttgttttttttttcctttttctttttctttttttttgggggggacggagtctcgttctgtcaccaggctggagtgcagtggcgcgacctcgactcactgcaacctccacctcccaggttcaagcgattctcctgcctcagcctcccgagtagctgggactacaggtgcccgccaccatgcccggctctggtctagtttttttcttctttgaatcccgtagggcctcagtgctgtgcagcaagcacatagttaaaactgaagaaaaatttcttgaataaaagtagttaacgtttttattctttacttcaaggtatatctccatgaataacctaaatgatcccccaaattggaatatccggcctaattccagggcggatggtggtgatggaagcaggtggaattatgccctgttggttccaatgctgggattggctgcttttcgttggatttggtctagggagtcccagaaagaagtagaaaaagagagagaagcctaccgtcggagaactgctgcttttcaacaggat

SEQ ID NO: 120753 - DNA, 4544 bp, Homo sapiens
  Payload ID: 3655
  Gene Symbol: CCDC129
  Gene Name: coiled-coil domain containing 129
  Uniprot ID: Q6ZRS4
  ENST ID: ENST00000319386
  CDS Start-End: 994-3684
atcctcccagaaacccagccggcttcacctctcaccaacagtggctgcgggactttccagcacctagcctgggcattcccacagcccagagggagctcgtcccagacaaccaagaggaaaagaagggaaacaagaaagagatggagacccatcattgtggccaacgaccccacgaagagggaatagcggtccacgcacgggacccagcctccgatcaagcccagcaggcgccgggtgcgcctgtgctgggaggcagagcccacgcccacccggaaccgcgccggccagcgaggtccgtgcgcagccccggctgccgcctgcgcttctccctccacacctcaccgttagcagagggagccggctccggcctcagccagccccagagacaggcccccacagcacagcggcgggctgaagggctcctcgagcgtggccagagcagacgccgaggctaaggaggtgccgagagacagcgagggctgctagcacattgtcacctctcaatactggaactcagaataagaggtctccactgttctgagttatgggagaaagatgggtgtatggtagacagaatagtgcctccccacaacaaagatgtcaacatgttactgtgtgtgttaaaagggactttgtaggtgtgagtaagttgaagatcttgagaagaaaagattatcctgggttttttgggtggggccaatgtcataaaaaggtccagataagaaagaggcagaagagtcagggtcagaggaggagccatcatgataggagcagagaagcagagtcaggagagttgatgctacactgctaactttgaagatgaagaagccacgagctatggaatggagacagcctctgaaaggcaaggagatggatttcctttagagcttccaggaaggagtgcaggcctgctaacagatacgttttagcccagtgagactaatttttagacttctgacttccaggaccgtaagtttgcagaattactctcctatgatggcacagaaatcacaaggatctgacaaccttcaggaaggccaggaaaagagcaagagagagatcctgaagtgcaccaaaagcgcgtgggctccgctggatgagtggctgccccctgaccctgaggaggaaagccagagtctcaccatccccatgctggaagattccaagcaagaaagtattcagcagtggctggactctggattctttgtctctgcaaatgaaaactttcaacaagtcattgaccgcactgtttctttgtatgaacaagggatggttcaaatgactgtgaaagactacatgagatctttgcatcagttttcagaaactcccatcctatccagagggaccagtttcaactcttgctattctactgcaagtgtaccacaaagcattcctgaatggctggaattttgggagatagatccagtggagattctcttggatctggggtttggtgctgatgagccagacatctgcatgcaaatcccagccagattccttggttgtggctcagcagccagaggaatcaacatccgtgtttttcttgaagctcaaaagcagcgaatggacattgagaaccccaacttgtacggtcgtttccgacagctggaaatcctggaccatgtgaccaatgccttctcatctctgctgagtgatgtcagcatcctgccaaacagagctgaagagaaagctggaggagagagtgtgcaaagaacctcagtccaaagctttgaagaagagactggtaatcctcttgacatgacttcaggaactgtaggtgccagggtggacagagcaaatagctgccagtctgacagcagcgggttcctggaggagccgctggaaccgctgcccctccagatgccttccttgccaaacagccagagtcctgctgagaatggaggtagaaagccaagagatcagagccacagcttagtatcatcccaggactgtcagctagagtcggatgggccagattccaaaagtagggcgagcatgtctttttcaagccaagaagcgaatgccttggaacaaagggcctcagtatctgtgatggaggaagagtttctgcttgaggccatggaggggccaccagagctgtatatcccagacatggcctgtgccaagaccaccacgaggggagaatgcccaaggaaagacagccatctgtggcagcttctgccaatgccccatgctgagtatgaggtcaccagacccacagccacttccaaatatgatcatcctctggggtttatggtaacccacgtcacagaaatgcaggacagttttgtgaggcctgagggagctggcaaagtgcaaagccaccacaatgagtctcaaaggtcacctggaaatgatcatactcaagacaagttccttcatgttgactctgaggccccacgagaagaggaaagcagtggattctgtcctcacaccaaccacagcttactcgtaccagaaagctcatcacagtgtatccccaagcacagtgaaatcacaccttatgcaactgaccttgctcaaacatctgaaaagctcattccccacctccataaactgcctggagatcctgcccaggtgaagtcaaggtctggtactttgggtcagatactacctgggacagaagctgagatggaaaaccttcctctaaatactggcagctccaggtctgtaatgacccagatgtcctccagcctggtgtcggctgctcagagggctgtggccttggggactggtcccagaggaacatctttagaatgcactgtgtgtgatcctgttaccgcaacagaaacaagactggggacaaaagcaagacagttaaatgatgcttccattcagacttcagctctaagcaacaagaccttgacacatgggccccagcccctcaccaaatccgtctctctagactcaggcttctctagtatctgcccaatgggcacctgccatgctatacctgcccactgctgcatctgctgtcatcaccaccctcactgccacggggagaggcaaagccctggccctgaaccctcagtctgtaggcactgcctgtgttcactaactggtcaccaggaagcccagttcatgacgactttgaaagcccttcaggacactacagtgagggagctatgttcctgcacagtccatgagatggaagccatgaagacgatatgccaaagtttccgggagtatttagaagaaattgaacagcaccttatgggacagcaggccctcttttccagggacatgtcagaggaggaaagggaggaggccgagcaactgcaaacgttacgtgaggccctgaggcagcaggtggcagagttggaatttcagttaggagaccgggctcagcaaatcagagaagggattttactgcagctggaggttctcacagcagagccacctgaacactattcaaatctgcatcaatataactggatagaagaaagcaatgggcagacttcatgttctaaaatccacccaggcatggccccgaggactgtgtttcctcccgatgatggccaggaggctccctgttcaggtgggacccagttggctgccttcactccacccaccttggagaacagcaccaggatgtctccttcatcatcagcttgggcaaagttaggtccaacccctttgtcaaattgtcctgttggagaaaaggatgcagatgtcttcctctagatcagagcaggtttgttaaccttcatacaaaatataaaggcccagaacagatgtagcaaggaaatttcaattttccccaaggagaagggtctgccaacccattgtcagctatatctctcatattctaccctttggttaaacccaagaggagtttagaatactctaatactcattcagtatagaataactgagcacctagtatgtgcctggcacagagtatgcaacagtgactaaatagtatacggtctctgccctgctagaacttacagtgtagtgggggagatagaattgcaaacaaaaagtatctgagacagacctcagtcaatatagaagtttattttgccaaggttaaggatacacacccagaagacaggtctgtgcctttctccaaagatgattttgaggccttcaacatttagtggggaaagggtgctaatggggaaagaggtgtgggtacataggaggcaaacagttgcatttttttgagtctgatcagcttttctcatgagagaaggggtagaggaactgtcacttatgcattcacctagctcagtggatctgcacttttacagaaggtaaaataaacatagggcagaggaagcaatcagatatgcatttgtctcgggggagcagagggatggctttgagttctgttctttgtcctgtacctattaagagaagctatcaatatactttgtcaggataaaattcaacagaactgttttagactaaagattttagggaccacaaggaatttcccagtgggcaaattgtgagggaggtatttagcttttaaaaaaatctttgtagctatctcatttagaaataaaatgggaggcagattgcctgatgcagctcct

SEQ ID NO: 120754 - DNA, 3269 bp, Homo sapiens
  Payload ID: 3655
  Gene Symbol: CCDC129
  Gene Name: coiled-coil domain containing 129
  Uniprot ID: Q6ZRS4
  ENST ID: ENST00000407970
  CDS Start-End: 39-3173
tgacttccaggaccgtaagtttgcagaattactctcctatgatggcacagaaatcacaaggatctgacaaccttcaggaaggccaggaaaagagcaagagagagatcctgaagtgcaccaaaagcgcgtgggctccgctggatgagtggctgccccctgaccctgaggaggaaagccagagtctcaccatccccatgctggaagattccaagcaagaaagtattcagcagtggctggactctggattctttgtctctgcaaatgaaaactttcaacaagtcattgaccgcactgtttctttgtatgaacaagggatggttcaaatgactgtgaaagactacatgagatctttgcatcagttttcagaaactcccatcctatccagagggaccagtttcaactcttgctattctactgcaagtgtaccacaaagcattcctgaatggctggaattttgggagatagatccagtggagattctcttggatctggggtttggtgctgatgagccagacatctgcatgcaaatcccagccagattccttggttgtggctcagcagccagaggaatcaacatccgtgtttttcttgaagctcaaaagcagcgaatggacattgagaaccccaacttgtacggtcgtttccgacagctggaaatcctggaccatgtgaccaatgccttctcatctctgctgagtgatgtcagcatcctgccaaacagagctgaagagaaagctggaggagagagtgtgcaaagaacctcagtgagtgccgccaaagagcatcgaagaagaatgggtaaactcttaaggagagcttccaaacagaacatcaggcgggattgtaacccagaggtatcagagtccttcaaggtgaaggatgaagtttttgttccctttacaaaaccatgggattgtggagcagagctagcagcaacctcaatcaaccacaagcaaaatcatttgtctctgtcagtagaacatcagtctctccaagcctgtgatgatttgctaccttatcctcctcatggtcttctgagcaagcagtggccttgctcatctatgccggccaagcaggctcctccttcctgtgtgtctgaggggtcagtcaagggcagaactcagaaggagaacttatttcagactaacaagctcaagagcttgtctcatcttgcaggcaaaggaccagactcatttgaaatggaagaggtccaaagctttgaagaagagactggtaatcctcttgacatgacttcaggaactgtaggtgccagggtggacagagcaaatagctgccagtctgacagcagcgggttcctggaggagccgctggaaccgctgcccctccagatgccttccttgccaaacagccagagtcctgctgagaatggaggtagaaagccaagagatcagagccacagcttagtatcatcccaggactgtcagctagagtcggatgggccagattccaaaagtagggcgagcatgtctttttcaagccaagaagcgaatgccttggaacaaagggcctcagtatctgtgatggaggaagagtttctgcttgaggccatggaggggccaccagagctgtatatcccagacatggcctgtgccaagaccaccacgaggggagaatgcccaaggaaagacagccatctgtggcagcttctgccaatgccccatgctgagtatgaggtcaccagacccacagccacttccaaatatgatcatcctctggggtttatggtaacccacgtcacagaaatgcaggacagttttgtgaggcctgagggagctggcaaagtgcaaagccaccacaatgagtctcaaaggtcacctggaaatgatcatactcaagacaagttccttcatgttgactctgaggccccacgagaagaggaaagcagtggattctgtcctcacaccaaccacagcttactcgtaccagaaagctcatcacagtgtatccccaagcacagtgaaatcacaccttatgcaactgaccttgctcaaacatctgaaaagctcattccccacctccataaactgcctggagatcctgcccaggtgaagtcaaggtctggtactttgggtcagatactacctgggacagaagctgagatggaaaaccttcctctaaatactggcagctccaggtctgtaatgacccagatgtcctccagcctggtgtcggctgctcagagggctgtggccttggggactggtcccagaggaacatctttagaatgcactgtgtgtgatcctgttaccgcaacagaaacaagactggggacaaaagcaagacagttaaatgatgcttccattcagacttcagctctaagcaacaagaccttgacacatgggccccagcccctcaccaaatccgtctctctagactcaggcttctctagtatctgcccaatgggcacctgccatgctatacctgcccactgctgcatctgctgtcatcaccaccctcactgccacggggagaggcaaagccctggccctgaaccctcagtctgtaggcactgcctgtgttcactaactggtcaccaggaagcccagttcatgacgactttgaaagcccttcaggacactacagtgagggagctatgttcctgcacagtccatgagatggaagccatgaagacgatatgccaaagtttccgggagtatttagaagaaattgaacagcaccttatgggacagcaggccctcttttccagggacatgtcagaggaggaaagggaggaggccgagcaactgcaaacgttacgtgaggccctgaggcagcaggtggcagagttggaatttcagttaggagaccgggctcagcaaatcagagaagggattttactgcagctggaggttctcacagcagagccacctgaacactattcaaatctgcatcaatataactggatagaagaaagcaatgggcagacttcatgttctaaaatccacccaggcatggccccgaggactgtgtttcctcccgatgatggccaggaggctccctgttcaggtgggacccagttggctgccttcactccacccaccttggagaacagcaccaggatgtctccttcatcatcagcttgggcaaagttaggtccaacccctttgtcaaattgtcctgttggagaaaaggatgcagatgtcttcctctagatcagagcaggtttgttaaccttcatacaaaatataaaggcccagaacagatgtagcaaggaaatttcaattttccccaaggagaagggtctgcca

SEQ ID NO: 120755 - DNA, 3773 bp, Homo sapiens
  Payload ID: 3655
  Gene Symbol: CCDC129
  Gene Name: coiled-coil domain containing 129
  Uniprot ID: Q6ZRS4
  ENST ID: ENST00000409210
  CDS Start-End: 185-3043
tgagtaaacagggtagcatccttttagctggttgtgctttgactaactgatctgttctttcttacttgtagaagattccaagcaagaaagtattcagcagtggctggactctggattctttgtctctgcaaatgaaaactttcaacaagtcattgaccgcactgtttctttgtatgaacaagggatggttcaaatgactgtgaaagactacatgagatctttgcatcagttttcagaaactcccatcctatccagagggaccagtttcaactcttgctattctactgcaagtgtaccacaaagcattcctgaatggctggaattttgggagatagatccagtggagattctcttggatctggggtttggtgctgatgagccagacatctgcatgcaaatcccagccagattccttggttgtggctcagcagccagaggaatcaacatccgtgtttttcttgaagctcaaaagcagcgaatggacattgagaaccccaacttgtacggtcgtttccgacagctggaaatcctggaccatgtgaccaatgccttctcatctctgctgagtgatgtcagcatcctgccaaacagagctgaagagaaagctggaggagagagtgtgcaaagaacctcagtgagtgccgccaaagagcatcgaagaagaatgggtaaactcttaaggagagcttccaaacagaacatcaggcgggattgtaacccagaggtatcagagtccttcaaggtgaaggatgaagtttttgttccctttacaaaaccatgggattgtggagcagagctagcagcaacctcaatcaaccacaagcaaaatcatttgtctctgtcagtagaacatcagtctctccaagcctgtgatgatttgctaccttatcctcctcatggtcttctgagcaagcagtggccttgctcatctatgccggccaagcaggctcctccttcctgtgtgtctgaggggtcagtcaagggcagaactcagaaggagaacttatttcagactaacaagctcaagagcttgtctcatcttgcaggcaaaggaccagactcatttgaaatggaagaggtccaaagctttgaagaagagactggtaatcctcttgacatgacttcaggaactgtaggtgccagggtggacagagcaaatagctgccagtctgacagcagcgggttcctggaggagccgctggaaccgctgcccctccagatgccttccttgccaaacagccagagtcctgctgagaatggaggtagaaagccaagagatcagagccacagcttagtatcatcccaggactgtcagctagagtcggatgggccagattccaaaagtagggcgagcatgtctttttcaagccaagaagcgaatgccttggaacaaagggcctcagtatctgtgatggaggaagagtttctgcttgaggccatggaggggccaccagagctgtatatcccagacatggcctgtgccaagaccaccacgaggggagaatgcccaaggaaagacagccatctgtggcagcttctgccaatgccccatgctgagtatgaggtcaccagacccacagccacttccaaatatgatcatcctctggggtttatggtaacccacgtcacagaaatgcaggacagttttgtgaggcctgagggagctggcaaagtgcaaagccaccacaatgagtctcaaaggtcacctggaaatgatcatactcaagacaagttccttcatgttgactctgaggccccacgagaagaggaaagcagtggattctgtcctcacaccaaccacagcttactcgtaccagaaagctcatcacagtgtatccccaagcacagtgaaatcacaccttatgcaactgaccttgctcaaacatctgaaaagctcattccccacctccataaactgcctggagatcctgcccaggtgaagtcaaggtctggtactttgggtcagatactacctgggacagaagctgagatggaaaaccttcctctaaatactggcagctccaggtctgtaatgacccagatgtcctccagcctggtgtcggctgctcagagggctgtggccttggggactggtcccagaggaacatctttagaatgcactgtgtgtgatcctgttaccgcaacagaaacaagactggggacaaaagcaagacagttaaatgatgcttccattcagacttcagctctaagcaacaagaccttgacacatgggccccagcccctcaccaaatccgtctctctagactcaggcttctctagtatctgcccaatgggcacctgccatgctatacctgcccactgctgcatctgctgtcatcaccaccctcactgccacggggagaggcaaagccctggccctgaaccctcagtctgtaggcactgcctgtgttcactaactggtcaccaggaagcccagttcatgacgactttgaaagcccttcaggacactacagtgagggagctatgttcctgcacagtccatgagatggaagccatgaagacgatatgccaaagtttccgggagtatttagaagaaattgaacagcaccttatgggacagcaggccctcttttccagggacatgtcagaggaggaaagggaggaggccgagcaactgcaaacgttacgtgaggccctgaggcagcaggtggcagagttggaatttcagttaggagaccgggctcagcaaatcagagaagggattttactgcagctggaggttctcacagcagagccacctgaacactattcaaatctgcatcaatataactggatagaagaaagcaatgggcagacttcatgttctaaaatccacccaggcatggccccgaggactgtgtttcctcccgatgatggccaggaggctccctgttcaggtgggacccagttggctgccttcactccacccaccttggagaacagcaccaggatgtctccttcatcatcagcttgggcaaagttaggtccaacccctttgtcaaattgtcctgttggagaaaaggatgcagatgtcttcctctagatcagagcaggttgggcttttgacctccccttctccatgtagactccgagctctcctgcagtttcttccttgctccttccctgtaacgcctacggaatgaagaggaacacctggctctaggatgtccctcacctggcagccatctgctttaccagtctcatttcctgctcatccctcagatgaatctccaattctattcccctaaaccacctcctgtgttcctgcttcctctcctttgctgaaacaaatgaagtatctcaccagtaagtcctagggcagaccccatctcctacacaggctttccttgatgatctgtggcagaagtgatccttattttttgaaactcctatatcactttgcttttttgttaaaacactgaaaacctcctgtcttgtgttaccattatctgtgtaggtcatatcttctctagtaaacttaaagctatttgaggactgtgtagtacctactaccctgtgtttaagagagactatctggaggaaagtacagactcctttctttatcatgtgtgacctcgggcacttgctctctttaccctagtttcttcctctgtaaaatagggagaagaaaaacaacatagagttgttggacagaataaataccatgaatcctgtgcagtgtttaatccaatgtccatcacgtagtaagtgttcaatgcatgttggctattattacaagtgcacataccaagaactcaataaatgctaactgt

SEQ ID NO: 120756 - DNA, 566 bp, Homo sapiens
  Payload ID: 3655
  Gene Symbol: CCDC129
  Gene Name: coiled-coil domain containing 129
  ENST ID: ENST00000409717
  CDS Start-End: 140-566
agatggctcaggagtggagcttttgtggcaggtgggtagaggctgctggagggggctttcatgatcatctgctttgagggataaacattgcttgtcccctcctccaactaaggaagttagtttgcagaattactctcctatgatggcacagaaatcacaaggatctgacaaccttcaggaaggccaggaaaagagcaagagagagatcctgaagtgcaccaaaagcgcgtgggctccgctggatgagtggctgccccctgaccctgaggaggaaagccagagtctcaccatccccatgctggaagattccaagcaagaaagtattcagcagtggctggactctggattctttgtctctgcaaatgaaaactttcaacaagtcattgaccgcactgtttctttgtatgaacaagggatggttcaaatgactgtgaaagactacatgagatctttgcatcagttttcagaaactcccatcctatccagagggaccagtttcaactcttgctattctactgcaagtgtaccacaaagcattcctgaatggctggaattttgggagatag

SEQ ID NO: 120757 - DNA, 558 bp, Homo sapiens
  Payload ID: 3655
  Gene Symbol: CCDC129
  Gene Name: coiled-coil domain containing 129
  ENST ID: ENST00000456011
  CDS Start-End: 55-558
agatggctcaggagtggagcttttgtggcagttagtttgcagaattactctcctatgatggcacagaaatcacaaggatctgacaaccttcaggaaggccaggaaaagagcaagagagagatcctgaagtgcaccaaaagcgcgtgggctccgctggatgagtggctgccccctgaccctgaggaggaaagccagagtctcaccatccccatgctggaagattccaagcaagaaagtattcagcagtggctggactctggattctttgtctctgcaaatgaaaactttcaacaagtcattgaccgcactgtttctttgtatgaacaagggatggttcaaatgactgtgaaagactacatgagatctttgcatcagttttcagaaactcccatcctatccagagggaccagtttcaactcttgctattctactgcaagtgtaccacaaagcattcctgaatggctggaattttgggagatagatccagtggagattctcttggatctggggtttggtgctgatgagccagacatctgcatgcaaatcccagccagattc

SEQ ID NO: 120758 - DNA, 3611 bp, Homo sapiens
  Payload ID: 3655
  Gene Symbol: CCDC129
  Gene Name: coiled-coil domain containing 129
  Uniprot ID: Q6ZRS4
  ENST ID: ENST00000451887
  CDS Start-End: 95-3283
atagttctgcagtcacaagggctttgtagtcagtcttagctgctggaacattcaaggagacaaaaaggcacagaagatctccacacatactttgatgccaactacagcaagttgcaagaccatttctctgctgaaactcctttattctgttagtttgcagaattactctcctatgatggcacagaaatcacaaggatctgacaaccttcaggaaggccaggaaaagagcaagagagagatcctgaagtgcaccaaaagcgcgtgggctccgctggatgagtggctgccccctgaccctgaggaggaaagccagagtctcaccatccccatgctggaagattccaagcaagaaagtattcagcagtggctggactctggattctttgtctctgcaaatgaaaactttcaacaagtcattgaccgcactgtttctttgtatgaacaagggatggttcaaatgactgtgaaagactacatgagatctttgcatcagttttcagaaactcccatcctatccagagggaccagtttcaactcttgctattctactgcaagtgtaccacaaagcattcctgaatggctggaattttgggagatagatccagtggagattctcttggatctggggtttggtgctgatgagccagacatctgcatgcaaatcccagccagattccttggttgtggctcagcagccagaggaatcaacatccgtgtttttcttgaagctcaaaagcagcgaatggacattgagaaccccaacttgtacggtcgtttccgacagctggaaatcctggaccatgtgaccaatgccttctcatctctgctgagtgatgtcagcatcctgccaaacagagctgaagagaaagctggaggagagagtgtgcaaagaacctcagtgagtgccgccaaagagcatcgaagaagaatgggtaaactcttaaggagagcttccaaacagaacatcaggcgggattgtaacccagaggtatcagagtccttcaaggtgaaggatgaagtttttgttccctttacaaaaccatgggattgtggagcagagctagcagcaacctcaatcaaccacaagcaaaatcatttgtctctgtcagtagaacatcagtctctccaagcctgtgatgatttgctaccttatcctcctcatggtcttctgagcaagcagtggccttgctcatctatgccggccaagcaggctcctccttcctgtgtgtctgaggggtcagtcaagggcagaactcagaaggagaacttatttcagactaacaagctcaagagcttgtctcatcttgcaggcaaaggaccagactcatttgaaatggaagaggtccaaagctttgaagaagagactggtaatcctcttgacatgacttcaggaactgtaggtgccagggtggacagagcaaatagctgccagtctgacagcagcgggttcctggaggagccgctggaaccgctgcccctccagatgccttccttgccaaacagccagagtcctgctgagaatggaggtagaaagccaagagatcagagccacagcttagtatcatcccaggactgtcagctagagtcggatgggccagattccaaaagtagggcgagcatgtctttttcaagccaagaagcgaatgccttggaacaaagggcctcagtatctgtgatggaggaagagtttctgcttgaggccatggaggggccaccagagctgtatatcccagacatggcctgtgccaagaccaccacgaggggagaatgcccaaggaaagacagccatctgtggcagcttctgccaatgccccatgctgagtatgaggtcaccagacccacagccacttccaaatatgatcatcctctggggtttatggtaacccacgtcacagaaatgcaggacagttttgtgaggcctgagggagctggcaaagtgcaaagccaccacaatgagtctcaaaggtcacctggaaatgatcatactcaagacaagttccttcatgttgactctgaggccccacgagaagaggaaagcagtggattctgtcctcacaccaaccacagcttactcgtaccagaaagctcatcacagtgtatccccaagcacagtgaaatcacaccttatgcaactgaccttgctcaaacatctgaaaagctcattccccacctccataaactgcctggagatcctgcccaggtgaagtcaaggtctggtactttgggtcagatactacctgggacagaagctgagatggaaaaccttcctctaaatactggcagctccaggtctgtaatgacccagatgtcctccagcctggtgtcggctgctcagagggctgtggccttggggactggtcccagaggaacatctttagaatgcactgtgtgtgatcctgttaccgcaacagaaacaagactggggacaaaagcaagacagttaaatgatgcttccattcagacttcagctctaagcaacaagaccttgacacatgggccccagcccctcaccaaatccgtctctctagactcaggcttctctagtatctgcccaatgggcacctgccatgctatacctgcccactgctgcatctgctgtcatcaccaccctcactgccacggggagaggcaaagccctggccctgaaccctcagtctgtaggcactgcctgtgttcactaactggtcaccaggaagcccagttcatgacgactttgaaagcccttcaggacactacagtgagggagctatgttcctgcacagtccatgagatggaagccatgaagacgatatgccaaagtttccgggagtatttagaagaaattgaacagcaccttatgggacagcaggccctcttttccagggacatgtcagaggaggaaagggaggaggccgagcaactgcaaacgttacgtgaggccctgaggcagcaggtggcagagttggaatttcagttaggagaccgggctcagcaaatcagagaagggattttactgcagctggaggttctcacagcagagccacctgaacactattcaaatctgcatcaatataactggatagaagaaagcaatgggcagacttcatgttctaaaatccacccaggcatggccccgaggactgtgtttcctcccgatgatggccaggaggctccctgttcaggtgaattattgtctgcagagctggatcccttttttttttcttcaaaagcaaataactctgctaaagatgaaaaaataaaatcaaaagactttctgaagacacaagactctggtctgttgtaattgtttttctttgttgagaaaataatcagtttccagagtataacacatgtcgaacaaaatagaacatttgtaaagaggttagagtatcaaagtggtgcccctttgagaagaaaaagttttagagtgttttcatgtggaatggtgggttgcatacgtaatttcaaattgtaatttaaaacaacaaattgttcatgatgtgcgagaattgtaggttattaaaagccttgttaaattgtttttcttgaaaattgagagaacaggaacagaagccaaaatatggacggcacctttctctagcccaaactcagcctctaattgcctgatctta

SEQ ID NO: 120759 - DNA, 582 bp, Homo sapiens
  Payload ID: 3655
  Gene Symbol: CCDC129
  Gene Name: coiled-coil domain containing 129
  ENST ID: ENST00000454513
  CDS Start-End: 92-582
cacacatactttgatgccaactacagcaagttgcaagaccatttctctgctgaaactcctttattctgttagtttgcagaattactctcctatgatggcacagaaatcacaaggatctgacaaccttcaggaaggccaggaaaagagcaagagagagatcctgaagtgcaccaaaagcgcgtgggctccgctggatgagtggctgccccctgaccctgaggaggaaagccagagtctcaccatccccatgctggaagattccaagcaagaaagtattcagcagtggctggactctggattctttgtctctgcaaatgaaaactttcaacaagtcattgaccgcactgtttctttgtatgaacaagggatggttcaaatgactgtgaaagactacatgagatctttgcatcagttttcagaaactcccatcctatccagagggaccagtttcaactcttgctattctactgcaagtgtaccacaaagcattcctgaatggctggaattttgggagatagatccagtggagattctcttggatctggggtttggtgctgatgagccagacatctgcatgcaaat

SEQ ID NO: 120760 - DNA, 4142 bp, Homo sapiens
  Payload ID: 3655
  Gene Symbol: CCDC129
  Gene Name: coiled-coil domain containing 129
  ENST ID: ENST00000615280
  CDS Start-End: 118-3282
gtttccttcaggaactttcagatggctcaggagtggagcttttgtggcagttcctgacaggataaggacaagaagcaacacacagaagagaaggaaaaagaaagaaaactgaccaatatgagtgttagtttgcagaattactctcctatgatggcacagaaatcacaaggatctgacaaccttcaggaaggccaggaaaagagcaagagagagatcctgaagtgcaccaaaagcgcgtgggctccgctggatgagtggctgccccctgaccctgaggaggaaagccagagtctcaccatccccatgctggaagattccaagcaagaaagtattcagcagtggctggactctggattctttgtctctgcaaatgaaaactttcaacaagtcattgaccgcactgtttctttgtatgaacaagggatggttcaaatgactgtgaaagactacatgagatctttgcatcagttttcagaaactcccatcctatccagagggaccagtttcaactcttgctattctactgcaagtgtaccacaaagcattcctgaatggctggaattttgggagatagatccagtggagattctcttggatctggggtttggtgctgatgagccagacatctgcatgcaaatcccagccagattccttggttgtggctcagcagccagaggaatcaacatccgtgtttttcttgaagctcaaaagcagcgaatggacattgagaaccccaacttgtacggtcgtttccgacagctggaaatcctggaccatgtgaccaatgccttctcatctctgctgagtgatgtcagcatcctgccaaacagagctgaagagaaagctggaggagagagtgtgcaaagaacctcagtgagtgccgccaaagagcatcgaagaagaatgggtaaactcttaaggagagcttccaaacagaacatcaggcgggattgtaacccagaggtatcagagtccttcaaggtgaaggatgaagtttttgttccctttacaaaaccatgggattgtggagcagagctagcagcaacctcaatcaaccacaagcaaaatcatttgtctctgtcagtagaacatcagtctctccaagcctgtgatgatttgctaccttatcctcctcatggtcttctgagcaagcagtggccttgctcatctatgccggccaagcaggctcctccttcctgtgtgtctgaggggtcagtcaagggcagaactcagaaggagaacttatttcagactaacaagctcaagagcttgtctcatcttgcaggcaaaggaccagactcatttgaaatggaagaggtccaaagctttgaagaagagactggtaatcctcttgacatgacttcaggaactgtaggtgccagggtggacagagcaaatagctgccagtctgacagcagcgggttcctggaggagccgctggaaccgctgcccctccagatgccttccttgccaaacagccagagtcctgctgagaatggaggtagaaagccaagagatcagagccacagcttagtatcatcccaggactgtcagctagagtcggatgggccagattccaaaagtagggcgagcatgtctttttcaagccaagaagcgaatgccttggaacaaagggcctcagtatctgtgatggaggaagagtttctgcttgaggccatggaggggccaccagagctgtatatcccagacatggcctgtgccaagaccaccacgaggggagaatgcccaaggaaagacagccatctgtggcagcttctgccaatgccccatgctgagtatgaggtcaccagacccacagccacttccaaatatgatcatcctctggggtttatggtaacccacgtcacagaaatgcaggacagttttgtgaggcctgagggagctggcaaagtgcaaagccaccacaatgagtctcaaaggtcacctggaaatgatcatactcaagacaagttccttcatgttgactctgaggccccacgagaagaggaaagcagtggattctgtcctcacaccaaccacagcttactcgtaccagaaagctcatcacagtgtatccccaagcacagtgaaatcacaccttatgcaactgaccttgctcaaacatctgaaaagctcattccccacctccataaactgcctggagatcctgcccaggtgaagtcaaggtctggtactttgggtcagatactacctgggacagaagctgagatggaaaaccttcctctaaatactggcagctccaggtctgtaatgacccagatgtcctccagcctggtgtcggctgctcagagggctgtggccttggggactggtcccagaggaacatctttagaatgcactgtgtgtgatcctgttaccgcaacagaaacaagactggggacaaaagcaagacagttaaatgatgcttccattcagacttcagctctaagcaacaagaccttgacacatgggccccagcccctcaccaaatccgtctctctagactcaggcttctctagtatctgcccaatgggcacctgccatgctatacctgcccactgctgcatctgctgtcatcaccaccctcactgccacggggagaggcaaagccctggccctgaaccctcagtctgtaggcactgcctgtgttcactaactggtcaccaggaagcccagttcatgacgactttgaaagcccttcaggacactacagtgagggagctatgttcctgcacagtccatgagatggaagccatgaagacgatatgccaaagtttccgggagtatttagaagaaattgaacagcaccttatgggacagcaggccctcttttccagggacatgtcagaggaggaaagggaggaggccgagcaactgcaaacgttacgtgaggccctgaggcagcaggtggcagagttggaatttcagttaggagaccgggctcagcaaatcagagaagggattttactgcagctggaggttctcacagcagagccacctgaacactattcaaatctgcatcaatataactggatagaagaaagcaatgggcagacttcatgttctaaaatccacccaggcatggccccgaggactgtgtttcctcccgatgatggccaggaggctccctgttcaggtgggacccagttggctgccttcactccacccaccttggagaacagcaccaggatgtctccttcatcatcagcttgggcaaagttaggtccaacccctttgtcaaattgtcctgttggagaaaaggatgcagatgtcttcctctagatcagagcaggtttgttaaccttcatacaaaatataaaggcccagaacagatgtagcaaggaaatttcaattttccccaaggagaagggtctgccaacccattgtcagctatatctctcatattctaccctttggttaaacccaagaggagtttagaatactctaatactcattcagtatagaataactgagcacctagtatgtgcctggcacagagtatgcaacagtgactaaatagtatacggtctctgccctgctagaacttacagtgtagtgggggagatagaattgcaaacaaaaagtatctgagacagacctcagtcaatatagaagtttattttgccaaggttaaggatacacacccagaagacaggtctgtgcctttctccaaagatgattttgaggccttcaacatttagtggggaaagggtgctaatggggaaagaggtgtgggtacataggaggcaaacagttgcatttttttgagtctgatcagcttttctcatgagagaaggggtagaggaactgtcacttatgcattcacctagctcagtggatctgcacttttacagaaggtaaaataaacatagggcagaggaagcaatcagatatgcatttgtctcgggggagcagagggatggctttgagttctgttctttgtcctgtacctattaagagaagctatcaatatactttgtcaggataaaattcaacagaactgttttagactaaagattttagggaccacaaggaatttcccagtgggcaaattgtgagggaggtatttagcttttaaaaaaatctttgtagctatctcatttagaaataaaatgggaggcagattgcctgatgcagctcct

SEQ ID NO: 120761 - DNA, 2943 bp, Homo sapiens
  Payload ID: 3656
  Gene Symbol: CCDC13
  Gene Name: coiled-coil domain containing 13
  Uniprot ID: Q8IYE1
  ENST ID: ENST00000310232
  CDS Start-End: 85-2232
agggcagcgcgtgtcggcgtccggaggaggtgacctagccgccgcggtcctagaagggagaagtggagagagaccgctggcaggatggcagcagatgaaagctcacagaacactttgcggctccagttcaaggcaatgcaggagatgcagcacaaacggttacagaagcagatggagaaaaagagggaaaaagaactgagcctcaaaagcagagctgacgaccaagaggagcccttggaggtttcagatggcctcagccttctccacgcaggggagccaaactcgaaaaatagctttgagaagagggtgcttgaagatgagattgaacaccttcgaaatgagctcagggaaacggtggacgagaacgggcgattgtataagctgctgaaggaaagggactttgaaatcaaacacctcaaaaagaaaatagaagaggacagatttgccttcacagggacagccggtgtagccggagacgtggtcgccaccaaaattgtggagctatcaaaaaagaaccggctgttgatggcagaatcagagggtgcaaaaaccagggtgaagcagctgaccaatcgcatccaggagctggagcgggaactgcagacagccctgaccaggctgtcagccaagggggccaccgacgcaggagccaagccaccgagggcccagatgggagacagagcattgctggagaccccagaggtgaaggccctgcaggacaggctggtggccaccaacttgaagatgagtgacctccgaaaccagatccagtctgtgaagcaggagctgcggatggcacagaaggttttggccagagaggttggggaagacatcaacgttcagcagctcctatcttcgccagggacctggaggggtcgggctcaacaaattcttgttttgcagagcaaggttcaagagcttgagaagcaattgggccaggcccggagccagtctgcgggaacagccagtgatgagttgtctgtctatccagacccaaggaagctgtcggcacaggagaaaaacctgctgaggatccgcagcctggaaagggaaaaacaggaaggcttggagaaacttgccagtgaacgggatgtcctccagagagagcttgaagagctaaaaaagaagttcgagggcatgaggtctcggaacaagctgctgtcaagtgagatgaagaccctcaagagtcagatgggaaccctggtggagaagggccggcatgatgacgagctcatcgacgccctcatggaccagctgaagcagctacaggagatcctaggcagcctgagtctgcaggaggagaaaacgcgagtgtcccagcaccacctggaccagcaactgaacagcgaggctcagcggagcaacagcctagtcgcccagctgcaggccatggtagctgagcgggaggccaaagtgcgacagctggagatggagatcggacaactcaatgtgcactatcttcggaataaaggagtgggtgaggggtccagtggccgcgaggtcagccctgcctatacccagttcctggaggacccaggcctgaccaagtccccggcctcagcaggcgatcatgttggcaggcttggatcttctcgctctgtgaccagcctgggccacacactggtggaatctgctctcacgaggccttccctgcccagtccccacaggacctcacctaggttctcggactccccagaacaaaaaggctggcaggcacaagtgtcagagatcaaggccctctggcaggctgccgaggtggagcgtgaccggctcaccgagtttgtcactgtcctgcagaaacgggtggaggagagcaacagcaagctcctggagtcagagaggaagctgcaggaggagcgacaccgcaccgtggtgctggagcaacatctggagaagatacgcctggagccagggaaggcatcagcctcccagagagcagctcccaggaccaaaacaggtctgcccacctctaacaacaggcacaacccaaccgggagcgagaagaaggacccatcctttgcccagctctccgatgtgcccgtggaatcccaaatggaagagctgacaaccaggctggccatccaggtggaggagaatgaaatgctaaaggctgccctgggcagtgccctgcggggaaaggaggaggacttccggatgtaccatgagatcctgggccaggtgaaaagtgtcttcctgcaggccctgcggcagcagaagacaggcaagcaataggatgacagcccagtgtcggcctggccgggtgggcagcctcaggtcttgagaggataagactctgtctgaggactccatctgctccgggaagccagcccagggcagccagctcaaccacttctaccagaagaggctccttaaggatgaccaaaaccaatgtctcaggccaggaaggcagaagagaagccctggtgggacactgcaggagaccctgggctggctgggttacagcagcagggaggcccagcagcccactggcagaggcgagagctctgggatggcaaggcggctgtgaatggacagatgcagtccctcgggcaggtgttcatcgccctcatcctaggtactagccctggatgtccccatggcttcacacacagaagagcccttggttaccctaagtgggcatatcccccatgccactcagccctgccctatcccctcacccccatcccggctccatctgtagccgtccacaccctacacagacttggggcactatgctctcaaccagtttgtcagcccactcctcaggacacttcctcaggtgcagacccttggacttgtaataataataagtattttcataatcactgcagctcccagtgagtgagcatctactgtggcaacctgaccccattcagtcctctaatgacccaggggtttgttgtcttatttgacagatgaagaaactgaggttcacagaaagaa

SEQ ID NO: 120762 - DNA, 1792 bp, Homo sapiens
  Payload ID: 3657
  Gene Symbol: CCDC130
  Gene Name: coiled-coil domain containing 130
  Uniprot ID: P13994
  ENST ID: ENST00000221554
  CDS Start-End: 378-1568
ccactccggcgtcgcagaacgcttggcgtatcgtccttcagccaatcagcgtggagctgctgcctcgccccgcctcacgccggcgtcctgggggcgcggagagggcgcccaggttcaccgcgctctcagcgcgcacttccgggcacggtcagggcgtgacgtcgggaggagggcagacacgccgctttttggatgcctcctatgcctggcgggagtcttgtctgagctggcaccaccacacggcccacgacatcttcgcagggaagcctgtggaccctctgccaggctccacaagaggtcaggacagtgcagtgtgttcacaaggccagtttctgatcgtccgccccgaggctgaggaccagtaggcagctcccaagatgggtgaaaggaaaggggtcaacaagtactatcctccagacttcaaccctgagaagcatggctctctcaaccgataccacaacagccacccgcttcgggagcgggctcggaagctgtcacagggcatcctcatcatccgattcgaaatgccatataacatctggtgcgatggctgcaagaaccacatcggcatgggtgttcgttacaatgcagaaaagaagaaggtgggcaattactacacaaccccgatctacaggttccggatgaaatgccacctctgtgtcaactacatcgagatgcagacggaccccgccaactgcgactacgtgatcgtgagtggcgcccagcgcaaggaggagcgctgggacatggcggacaatgagcaggtgctgaccacagagcatgagaagaagcagaagctggagacggacgccatgttccggctggagcatggcgaggccgaccgcagcacactcaagaaggcgctgcccacactgagccacatccaggaggcccagagcgcctggaaggacgacttcgccctcaacagcatgctgcggagaaggttccgggaaaagaaaaaagccatccaggaggaggaggagagagaccaggccttgcaggccaaggcgagcctgaccatcccgctggtgcccgagacggaagatgaccgcaagctggcggctctgctgaagttccacaccctggactcctacgaggacaagcagaaactcaagcggaccgagatcatcagccgctcctggttcccctctgcccccggatccgcctccagcagcaaggtcagcggcgtcctgaagaagctggcacagagccgcagaaccgcgcttgccacctcccccatcaccgtcggggacctgggcatcgtgcggcggaggtctcgggacgtcccggagagcccccagcatgcggccgacacccccaagtctggggaaccgcgggtaccagaggaggctgcccaggaccggcccatgtcccccggagactgtcctccggaaacaactgagacccccaagtgcagcagcccgagggggcaggaagggagccgtcaggacaagcccctgtcgccagcaggctcctcccaggaggcagctgacacccccgacacgcggcacccctgcagtctcggctcctccctcgtggcggactactccgactcggagagtgagtgagcgatccccatcctggagactggacccgctctagaggcccggacacacccaggaggcccctcacagactgcagacccccggctcgcccaccagccctgggagagctcagatgccgcatcctccccagaccgcgccttcctgcaaccgtggagttatttatttggtcctggtgagggtgtttgtgccttgtgagactccgtacattaaagacctgtctcttcttc

SEQ ID NO: 120763 - DNA, 694 bp, Homo sapiens
  Payload ID: 3657
  Gene Symbol: CCDC130
  Gene Name: coiled-coil domain containing 130
  ENST ID: ENST00000588809
  CDS Start-End: 1-571
caaccgataccacaacagccacccgcttcgggagcgggctcggaagctgtcacagggcatcctcatcatccgattcgaaatgccatataacatctggtgcgatggctgcaagaaccacatcggcatgggtgttcgttacaatgcagaaaagaagaaggtgggcaattactacacaaccccgatctacaggttccggatgaaatgccacctctgtgtcaactacatcgagatgcagacggaccccgccaactgcgactacgtgatcgtgagtggcgcccagcgcaaggaggagcgctgggacatggcggacaatgagcaggtgctgaccacagaagctggagacggacgccatgttccggctggagcatggcgaggccgaccgcagcacactcaagaaggcgctgcccacactgagccacatccaggaggcccagagcgcctggaaggacgacttcgccctcaacagcatgctgcggagaaggttccgggtgaggggggctccagcccggggtcagagaggatgcatggtggaccaaggcccgggtccagccctccccccaccacatcctagctttgagcaggccactgtaccctctgagcctcagtttccccatctgctacatggtgaccatgccctgtcttaatccattctggctactataataaaaaataccatagacagaaacagtagaaa

SEQ ID NO: 120764 - DNA, 1922 bp, Homo sapiens
  Payload ID: 3657
  Gene Symbol: CCDC130
  Gene Name: coiled-coil domain containing 130
  Uniprot ID: P13994
  ENST ID: ENST00000586600
  CDS Start-End: 504-1694
atgcgcctcggagctggcttcaaccagcgaaggctgaacccgcttccagggtcctcgccgagctgggagttaggatccgagggggccaagagggataagaaaacttctctgggtgcccacgtggtactgagcgcccttgggagggctctggagaagaccatcgccttccagggtagctccctccctcaaagggaaggaaactgaggtccagaaaagttatgactcgccccaaggggattgcctggcaggacgtgaaggggaagaggcccaccctggagtaaccctcactggagaatccagagacacgccgctttttggatgcctcctatgcctggcgggagtcttgtctgagctggcaccaccacacggcccacgacatcttcgcagggaagcctgtggaccctctgccaggctccacaagaggtcaggacagtgcagtgtgttcacaaggccagtttctgatcgtccgccccgaggctgaggaccagtaggcagctcccaagatgggtgaaaggaaaggggtcaacaagtactatcctccagacttcaaccctgagaagcatggctctctcaaccgataccacaacagccacccgcttcgggagcgggctcggaagctgtcacagggcatcctcatcatccgattcgaaatgccatataacatctggtgcgatggctgcaagaaccacatcggcatgggtgttcgttacaatgcagaaaagaagaaggtgggcaattactacacaaccccgatctacaggttccggatgaaatgccacctctgtgtcaactacatcgagatgcagacggaccccgccaactgcgactacgtgatcgtgagtggcgcccagcgcaaggaggagcgctgggacatggcggacaatgagcaggtgctgaccacagagcatgagaagaagcagaagctggagacggacgccatgttccggctggagcatggcgaggccgaccgcagcacactcaagaaggcgctgcccacactgagccacatccaggaggcccagagcgcctggaaggacgacttcgccctcaacagcatgctgcggagaaggttccgggaaaagaaaaaagccatccaggaggaggaggagagagaccaggccttgcaggccaaggcgagcctgaccatcccgctggtgcccgagacggaagatgaccgcaagctggcggctctgctgaagttccacaccctggactcctacgaggacaagcagaaactcaagcggaccgagatcatcagccgctcctggttcccctctgcccccggatccgcctccagcagcaaggtcagcggcgtcctgaagaagctggcacagagccgcagaaccgcgcttgccacctcccccatcaccgtcggggacctgggcatcgtgcggcggaggtctcgggacgtcccggagagcccccagcatgcggccgacacccccaagtctggggaaccgcgggtaccagaggaggctgcccaggaccggcccatgtcccccggagactgtcctccggaaacaactgagacccccaagtgcagcagcccgagggggcaggaagggagccgtcaggacaagcccctgtcgccagcaggctcctcccaggaggcagctgacacccccgacacgcggcacccctgcagtctcggctcctccctcgtggcggactactccgactcggagagtgagtgagcgatccccatcctggagactggacccgctctagaggcccggacacacccaggaggcccctcacagactgcagacccccggctcgcccaccagccctgggagagctcagatgccgcatcctccccagaccgcgccttcctgcaaccgtggagttatttatttggtcctggtgagggtgtttgtgccttgtgagactccgtacattaaagacctgtctcttcttccctg

SEQ ID NO: 120765 - DNA, 914 bp, Homo sapiens
  Payload ID: 3657
  Gene Symbol: CCDC130
  Gene Name: coiled-coil domain containing 130
  ENST ID: ENST00000586666
  CDS Start-End: 203-914
cgcgctctcagcgcgcacttccgggcacggtcagggcgtgacgtcgggaggagggcagggtgaaaggaaaggggtcaacaagtactatcctccagacttcaaccctgagaagcatggctctctcaaccgataccacaacagccacccgcttcgggagcgggctcggaagctgtcacagggcatcctcatcatccgattcgaaatgccatataacatctggtgcgatggctgcaagaaccacatcggcatgggtgttcgttacaatgcagaaaagaagaaggtgggcaattactacacaaccccgatctacaggttccggatgaaatgccacctctgtgtcaactacatcgagatgcagacggaccccgccaactgcgactacgtgatcgtgagtggcgcccagcgcaaggaggagcgctgggacatggcggacaatgagcaggtgctgaccacagagcatgagaagaagcagaagctggagacggacgccatgttccggctggagcatggcgaggccgaccgcagcacactcaagaaggcgctgcccacactgagccacatccaggaggcccagagcgcctggaaggacgacttcgccctcaacagcatgctgcggagaaggttccgggaaaagaaaaaagccatccaggaggaggaggagagagaccaggccttgcaggccaaggcgagcctgaccatcccgctggtgcccgagacggaagatgaccgcaagctggcggctctgctgaagttccacaccctggactcctacgaggacaagcagaaactcaagcggaccgagatcatcagccgctcctggttcccctctgcccccggatccgcctccagcagcaaggtcagcggcgtcctgaagaagctggcacagagccgcagaaccgcgcttgccacctccc

SEQ ID NO: 120766 - DNA, 720 bp, Homo sapiens
  Payload ID: 3657
  Gene Symbol: CCDC130
  Gene Name: coiled-coil domain containing 130
  ENST ID: ENST00000589096
  CDS Start-End: 1-183
atgcagacggaccccgccaactgcgactacgtgatcgtgagtggcgcccagcgcaaggaggagcgctgggacatggcggacaatgagcaggtgctgaccacaggtgagcgccacccacttacctgcctgggggccctggccctgagtctgcgctggggcccccaaagcccagccgagctctgatcgttgcagagcatgagaagaagcagaagctggagacggacgccatgttccggctggagcatggcgaggccgaccgcagcacactcaagaaggcgctgcccacactgagccacatccaggaggcccagagcgcctggaaggacgacttcgccctcaacagcatgctgcggagaaggttccgggtgaggggggctccagcccggggtcagagaggatgcatggtggaccaaggcccgggtccagccctccccccaccacatcctagctttgagcaggccactgtaccctctgagcctcagtttccccatctgctacatggtgaccatgccctgtcttaatccattctggctactataataaaaaataccatagacagaaacagtagaaatttggctgggcacagtgactcacgcctgtaatccagcacattgggaggatcgcttgaggccaggagttcaagatcagcctgggcaacatagtgagacaccaccccccccctcccccagcatctctaaataaataaataatagaaattaa

SEQ ID NO: 120767 - DNA, 887 bp, Homo sapiens
  Payload ID: 3657
  Gene Symbol: CCDC130
  Gene Name: coiled-coil domain containing 130
  ENST ID: ENST00000585844
  CDS Start-End: 1-309
aagcagaagctggagacggacgccatgttccggctggagcatggcgaggccgaccgcagcacactcaagaaggcgctgcccacactgagccacatccaggaggcccagagcgcctggaaggacgacttcgccctcaacagcatgctgcggagaaggttccgggaaaagaaaaaagccatccaggaggaggaggagagagaccaggccttgcaggccaaggcgagcctgaccatcccgctggtgcccgagacggaagatgaccgcaagctggcggctctgctgaagttccacaccctggactgtgcgtaggaggccagggggaaaaggggacagggaggctcagagttgcctggagatggggggtcctcagccatgagtggactctggtctaccagagggcagttctggaccccctcccctgccgcccctgaaatgtcctctcctctcctctagcctacgaggacaagcagaaactcaagcggaccgagatcatcagccgctcctggttcccctctgcccccggatccgcctccagcagcaaggtcagcggcgtcctgaagaagctggcacagagccgcagaaccgcgcttgccacctcccccatcaccgtcggggacctgggcatcgtgcggcggaggtctcgggacgtcccggagagcccccagcatgcggccgacacccccaagtctggggaaccgcgggtaccagaggaggctgcccaggaccggcccatgtcccccggagactgtcctccggaaacaactgagacccccaagtgcagcagcccgagggggcaggaagggagccgtcaggacaagcccctgtcgccagcaggctcctcccaggaggcagctgacacccccgacacgcggcacccctgcagtctc

SEQ ID NO: 120768 - DNA, 1270 bp, Homo sapiens
  Payload ID: 3658
  Gene Symbol: CCDC134
  Gene Name: coiled-coil domain containing 134
  Uniprot ID: Q9H6E4
  ENST ID: ENST00000255784
  CDS Start-End: 105-794
agttgctttgctgttagcctgttggaccttcgagcctagctgctcgcacaggactcggccacctgcccttcctgcaccgactggccagctcaagaggtttggatatggaccttcttcaattcctggccttcctctttgtcctgcttttgtctgggatgggagccacaggcaccttgaggacctccctggacccaagcctggagatctacaagaagatgtttgaggtgaagcggcgggagcagctgttggcactgaagaacctggcacagctgaacgacatccaccagcagtacaagatccttgatgtcatgctcaaggggctctttaaggtgctggaggactcccggacagtgctcaccgctgctgatgtgctcccagatgggcccttcccccaggacgagaagctgaaggatgctttctcccacgtggtggagaacacggccttcttcggcgatgtggtgctgcgcttcccgaggattgtgcactattactttgaccacaactccaactggaacctcctcatccgctggggtatcagtttctgcaaccagacaggcgtcttcaaccaggggccccactcgcccatcctcagcctgatggcccaggagctggggatcagtgagaaagactccaacttccagaacccatttaaaatcgaccgcacagagttcattcccagcactgaccctttccagaaggccctgagagaagaagagaaacgccgaaagaaagaggagaagcggaaggagatccgaaaaggcccaaggatctccagatcccagtctgagttatagccctggagcagctcagggctcagggggccacaaggaggcaggtcgggaggaagaagaggtggaggtgtggttgtggtggagagcaccagctagccccttccagaaggggaggccacatttgcccggccccctggagctgggtctgagccccagctgaagggactgagcctcagatggctggattttctctcaggggcctcctgctgaaggggccttcagaggattttatgctggaaatatgaccctgtgcagactgctgggggaggcaggaggatgcctgcctggaccctgttggtggctgaagacctctggccagctggcttccgcccttggtggggaagcagcagaactaggttctgagccacgggtcagggtgccaccctgctgctggccccactgtgtcacagagctgcctggcacaggtcccagcccctctgcagagacacaataaaagccagcagaccctttggaccgac

SEQ ID NO: 120769 - DNA, 525 bp, Homo sapiens
  Payload ID: 3658
  Gene Symbol: CCDC134
  Gene Name: coiled-coil domain containing 134
  ENST ID: ENST00000402061
  CDS Start-End: 105-455
agttgctttgctgttagcctgttggaccttcgagcctagctgctcgcacaggactcggccacctgcccttcctgcaccgactggccagctcaagaggtttggatatggaccttcttcaattcctggccttcctctttgtcctgcttttgtctgggatgggagccacaggcaccttgaggacctccctggacccaagcctggagatctacaagaagatgtttgaggtgaagcggcgggagcagctgttggcactgaagaacctggcacagctgaacgacatccaccagcagtacaagatccttgatgtcatgctcaaggggctctttaagttcattcccagcactgaccctttccagaaggccctgagagaagaagagaaacgccgaaagaaagaggagaagcggaaggagatccgaaaaggcccaaggatctccagatcccagtctgagttatagccctggagcagctcagggctcagggggccacaaggaggcaggtcgggaggaagaagaggtggaggtgtgg

SEQ ID NO: 120770 - DNA, 4169 bp, Homo sapiens
  Payload ID: 3659
  Gene Symbol: CCDC136
  Gene Name: coiled-coil domain containing 136
  Uniprot ID: Q96JN2
  ENST ID: ENST00000297788
  CDS Start-End: 368-3832
ccctgtccccccggactaaatacgcacaccccctctttctttctgtgcaagcaagagggtcctggaacagcgggttctgaggaggctgggaggcagggctgagaggtggccgagagagaggagtcgcagagccgccagagtgagtcaggcacctccactgggattacagatcccagagcctcgaggagctggaagacatgtccccttctttcctctgcaccccagcccgcagccagccccccaccccccagcccctcctttctccctgctctcaggacccacagtgaccactctaggctcctatgaggcttccgagggctgtgagaggaagaagggccaacgctgggggtccctggaacgacgggggatgcaagctatggagggggaggtgttactcccagctctctatgaggaggaagaggaagaggaagaggaggaagaagaggtggaagaagaagaagaacaagtgcagaaaggtggcagtgttggctctctgtcagtcaacaagcaccggggactgagcctcacggagacagagctggaggagctgcgggctcaggtgctgcagctggtggcagaactggaggagacccgggaactggcagggcagcatgaggatgactccttggagctacaggggctcctggaggatgaacggctagccagcgcccagcaggcagaggtgttcaccaagcagatccagcagctccaaggtgagctgcgttctctacgggaggagatttccctgttagagcatgagaaagaaagcgaacttaaggaaatagaacaggaattgcatttggcccaggctgagatccagagtctgcggcaagcagcagaggattccgcaactgaacatgagagtgacatagcatccctgcaggaggatctctgccggatgcagaatgaacttgaagacatggaacgcattcggggagattatgagatggagatcgcctccctccgtgcagaaatggaaatgaagagctctgaaccatccggtagtttaggtctctcagattactctgggttacaagaagaactgcaggagctgcgggaacgctaccatttcctgaatgaggaataccgggccctgcaggagagcaacagcagcctcacggggcagcttgcagatctggagagtgagaggacacagagagcaacagagagatggctgcagtcccaaacactgagtatgacgtcagcagagtctcagacttcagaaatggatttcttagagcctgatcctgaaatgcagttgttacggcagcagctacgggatgctgaagagcagatgcatggcatgaagaacaagtgtcaggaattgtgttgtgagttggaagagctacagcatcatcgccaggtcagtgaggaggagcagaggcggctgcagagggagctcaagtgtgctcagaatgaggtgcttcggtttcagacctcccacagtgtcacccagaatgaggagctgaagtccagactctgtaccctgcagaaaaaatatgatactagccaggatgagcagaacgagctcttgaagatgcagctgcaacttcagactgagctccggcagctcaaagtcatgaaatccacacttgtagaaaaccagagtgagaaggagttactgtgccggctgcagaagctgcacctccagcaccagaacgtcacatgtgagaaggaaaagctgctggaacggcagcagcagctgcaggaggagctgcagtgccatgaggcagagctgcagcacctcagggatacggtggcctccttcaaagagagcaatgagaaggacacagagacgcacgctcagcttcaggagatgaagcagctgtaccaggccagcaaggacgagctggagcggcagaagcacatgtatgaccagctggagcaggacctcctgctctgccagctggagctgaaagagctcaaggcctcccaccccattccggaggacaaaggaaagtgtgctaataagtgtgacacactgctgtccagactgacagaattgcaggaaaagtacaaggccagccagaaggagatggggcagctgcagatggagcagtgtgagctcctggaggatcagaggaggatgcaggaggagcagggccagctgcaggaagagctgcacaggctcacactgccactgccaaagagtggcctcttactcaagagtcaggagctactcaccaagttagaagacctgtgtgagctgcagctgctctaccaaggcatgcaggaggaacagaagaagctgatacagaaccaagactgtgtattaaaagaacaattagagatccacgaagagctgcgacgtttcaaagagtctcatttccaggaagtgttggagaatcccgatgattccaaattggctaagtcctccaaatgtaatcgaaacaagcaatccaagctgctcatggagcagatgcaggccctgcaggtgatgtatgacgccggtcaggcgaagcaggagctcttgcagcaagagcaagggaggctcctagaggagcggaagaggctgcaggcagacttgcagctctgcctggaagaaatgcagctgcttcaagtccagtccccttctataaaaatgagccttgagtcctacgggaagagctatggtagcatggtccccagcaatgagaactgtcgcaagacttatgataccactgtggatgacaatgagagctattacaagagttacaccagcacccagaccagcagcaagagctttctcaagagctatgacagcagcaccagtgccagtgaggcctatgggaagagttactgcactaccagcaacagcagcattacctataagaagagttacggcagcaccagtagctctgacacctgccagaagagttttgtcagcagctgcactgacgaggaacctgctgagcctgaagacatggagcgctttgaggaaatggttgtgaaagtgctgatcaagctgcaggcggtgcaggccatgtaccagataagccaggaggaacacagccagctgcaagagcagatggaaaagttactggccaagcagaaagacctgaaggaagagctggatgcctgtgaaagggagttcaaggagtgcatggaatgccttgaaaagcccatggccccccagaacgacaagaatgagatcaaagaactgcagaccaagctgcgggagctgcagctgcaataccaggctagcatggatgagcaggggcggcttctggtagtgcaggagcagctggaggggcagctgcagtgctgccaggaggagctccgccagctcagggagaagaggccttctgttgtcaaagaagcccgggggaagaatgctaataagaacatgaacaagaatgccaatggggttaaaatgaaaaaggtgaccaagccatgctcggatacttctgagagcgaccttgagaccagaaagagtctggaggtagtgctgtactacaaggccagccagaggaaattagatggactagcaaaagaggaggaaaagaaagaggagatggaggaggaaaaaaagcaagtgaaagaggaagcaaaggagcagtgtggggatgagctagttgctgagccagcagatcctgaggaagctaaatccacagaagatcaggaggaaaatgaagaggacaaagaggaagaggagaaggaagaagacagtgaagaggaggaggatgacgccgactcttcccttgaaagtcccgaagaaaataaccccctcagactttccgagagcaaaaagtcatcccctacccccaatccccccatcttctccttgcctcttgtaggcctggtggtcatctcggctttgctctggtgctggtgggctgagacgtcgtcctaatgcagaacatgtttgggttgtggaagcctatggtattcttggctattgcagctgtggctctgtatgtgttacccaacatgcgacagcaggagtcagagttctgcctcatggagtgatggcagaccttggccagcgcgagggcagatccccagtggccaccaccctcagctttgggcaggacacactgtgccagaaccctccccatatgttccatgtgtccccatctcctcagcctcagtcacccaggctgaaaaggcttgtggggagcggctgacttccatctcctgccttgtgtaagaacctgagttccttgtaattaaatatcaactgaattaca

SEQ ID NO: 120771 - DNA, 1689 bp, Homo sapiens
  Payload ID: 3659
  Gene Symbol: CCDC136
  Gene Name: coiled-coil domain containing 136
  Uniprot ID: Q96JN2
  ENST ID: ENST00000378685
  CDS Start-End: 51-1355
gcggctgcggcttctgctcagggaggcggaaggcggcggcgggagcggtcatggaggcgggcgccggagccggcgcgggagccgcgggctggagctgcccgggcccaggacccacagtgaccactctaggctcctatgaggcttccgagggctgtgagaggaagaagggccaacgctgggggtccctggaacgacgggggatgcaagctatggagggggaggtgttactcccagctctctatgaggaggaagaggaagaggaagaggaggaagaagaggtggaagaagaagaagaacaagtgcagaaaggtggcagtgttggctctctgtcagtcaacaagcaccggggactgagcctcacggagacagagctggaggagctgcgggctcaggtgctgcagctggtggcagaactggaggagacccgggaactggcagggcagcatgaggatgactccttggagctacaggggctcctggaggatgaacggctagccagcgcccagcaggcagaggtgttcaccaagcagatccagcagctccaaggtgagctgcgttctctacgggaggagatttccctgttagagcatgagaaagaaagcgaacttaaggaaatagaacaggaattgcatttggcccaggctgagatccagagtctgcggcaagcagcagaggattccgcaactgaacatgagagtgacatagcatccctgcaggaggatctctgccggatgcagaatgaacttgaagacatggaacgcattcggggagattatgagatggagatcgcctccctccgtgcagaaatggaaatgaagagctctgaaccatccgaagaactgcaggagctgcgggaacgctaccatttcctgaatgaggaataccgggccctgcaggagagcaacagcagcctcacggggcagcttgcagatctggagagtgagaggacacagagagcaacagagagatggctgcagtcccaaacactgagtatgacgtcagcagagtctcagacttcagaaatggatttcttagagcctgatcctgaaatgcagttgttacggcagcagctacgggatgctgaagagcagatgcatggcatgaagaacaagtgtcaggaattgtgttgtgagttggaagagctacagcatcatcgccaggtcagtgaggaggagcagaggcggctgcagagggagctcaagtgtgctcagaatgaggtgcttcggtttcagacctcccacagtgtcacccagtcatcccctacccccaatccccccatcttctccttgcctcttgtaggcctggtggtcatctcggctttgctctggtgctggtgggctgagacgtcgtcctaatgcagaacatgtttgggttgtggaagcctatggtattcttggctattgcagctgtggctctgtatgtgttacccaacatgcgacagcaggagtcagagttctgcctcatggagtgatggcagaccttggccagcgcgagggcagatccccagtggccaccaccctcagctttgggcaggacacactgtgccagaaccctccccatatgttccatgtgtccccatctcctcagcctcagtcacccaggctgaaaaggcttgtggggagcggctgacttccatctcctgccttgtgtaagaacctgagttccttgtaattaaatatcaactgaatt

SEQ ID NO: 120772 - DNA, 253 bp, Homo sapiens
  Payload ID: 3659
  Gene Symbol: CCDC136
  Gene Name: coiled-coil domain containing 136
  ENST ID: ENST00000472049
  CDS Start-End: 237-253
tgctcagggaggcggaaggcggcggcgggagcggtcatggaggcgggcgccggagccggcgcgggagccgcgggctggagctgcccgggcccagcccgcagccagccccccaccccccagcccctcctttctccctgctctcaggacccacagtgaccactctaggctcctatgaggcttccgagggctgtgagaggaagaagggccaacgctgggggtccctggaacgacgggggatgcaagctatggaggg

SEQ ID NO: 120773 - DNA, 624 bp, Homo sapiens
  Payload ID: 3659
  Gene Symbol: CCDC136
  Gene Name: coiled-coil domain containing 136
  ENST ID: ENST00000459946
  CDS Start-End: 319-624
cctccctgcgcacccggctcgggtccccgggctcgcggctgcggcttctgctcagggaggcggaaggcggcggcgggagcggtcatggaggcgggcgccggagccggcgcgggagccgcgggctggagctgcccgggcccagagggtcctggaacagcgggttctgaggaggctgggaggcagggctgagaggtggccgagagagaggagtcgcagagccgccagagacccacagtgaccactctaggctcctatgaggcttccgagggctgtgagaggaagaagggccaacgctgggggtccctggaacgacgggggatgcaagctatggagggggaggtgttactcccagctctctatgaggaggaagaggaagaggaagaggaggaagaagaggtggaagaagaagaagaacaagtgcagaaaggtggcagtgttggctctctgtcagtcaacaagcaccggggactgagcctcacggagacagagctggaggagctgcgggctcaggtgctgcagctggtggcagaactggaggagacccgggaactggcagggcagcatgaggatgactccttggagctacaggggctcctggaggatgaacggctagccagcgcccag

SEQ ID NO: 120774 - DNA, 3320 bp, Homo sapiens
  Payload ID: 3659
  Gene Symbol: CCDC136
  Gene Name: coiled-coil domain containing 136
  ENST ID: ENST00000494552
  CDS Start-End: 1-3104
agatttccctgttagagcatgagaaagaaagcgaacttaaggaaatagaacaggaattgcatttggcccaggctgagatccagagtctgcggcaagcagcagaggattccgcaactgaacatgagagtgacatagcatccctgcaggaggatctctgccggatgcagaatgaacttgaagacatggaacgcattcggggagattatgagatggagatcgcctccctccgtgcagaaatggaaatgaagagctctgaaccatccggtagtttaggtctctcagattactctgggttacaagaagaactgcaggagctgcgggaacgctaccatttcctgaatgaggaataccgggccctgcaggagagcaacagcagcctcacggggcagcttgcagatctggagagtgagaggacacagagagcaacagagagatggctgcagtcccaaacactgagtatgacgtcagcagagtctcagacttcagaaatggatttcttagagcctgatcctgaaatgcagttgttacggcagcagctacgggatgctgaagagcagatgcatggcatgaagaacaagtgtcaggaattgtgttgtgagttggaagagctacagcatcatcgccaggtcagtgaggaggagcagaggcggctgcagagggagctcaagtgtgctcagaatgaggtgcttcggtttcagacctcccacagtgtcacccagaatgaggagctgaagtccagactctgtaccctgcagaaaaaatatgatactagccaggatgagcagaacgagctcttgaagatgcagctgcaacttcagactgagctccggcagctcaaagtcatgaaatccacacttgtagaaaaccagagtgagaaggagttactgtgccggctgcagaagctgcacctccagcaccagaacgtcacatgtgagaaggaaaagctgctggaacggcagcagcagctgcaggaggagctgcagtgccatgaggcagagctgcagcacctcagggatacggtggcctccttcaaagagagcaatgagaaggacacagagacgcacgctcagcttcaggagatgaagcagctgtaccaggccagcaaggacgagctggagcggcagaagcacatgtatgaccagctggagcaggacctcctgctctgccagctggagctgaaagagctcaaggcctcccaccccattccggaggacaaaggaaagtgtgctaataagtgtgacacactgctgtccagactgacagaattgcaggaaaagtacaaggccagccagaaggagatggggcagctgcagatggagcagtgtgagctcctggaggatcagaggaggatgcaggaggagcagggccagctgcaggaagagctgcacaggctcacactgccactgccaaagagtggcctcttactcaagagtcaggagctactcaccaagttagaagacctgtgtgagctgcagctgctctaccaaggcatgcaggaggaacagaagaagctgatacagaaccaagactgtgtattaaaagaacaattagagatccacgaagagctgcgacgtttcaaagagtctcatttccaggaagtgttggagaatcccgatgattccaaattggctaagtcctccaaatgtaatcgaaacaagcaatccaagctgctcatggagcagatgcaggccctgcaggtgatgtatgacgccggtcaggcgaagcaggagctcttgcagcaagagcaagggaggctcctagaggagcggaagaggctgcaggcagacttgcagctctgcctggaagaaatgcagctgcttcaagtccagtccccttctataaaaatgagccttgagtcctacgggaagagctatggtagcatggtccccagcaatgagaactgtcgcaagacttatgataccactgtggatgacaatgagagctattacaagagttacaccagcacccagaccagcagcaagagctttctcaagagctatgacagcagcaccagtgccagtgaggcctatgggaagagttactgcactaccagcaacagcagcattacctataagaagagttacggcagcaccagtagctctgacacctgccagaagagttttgtcagcagctgcactgacgaggaacctgctgagcctgaagacatggagcgctttgaggaaatggttgtgaaagtgctgatcaagctgcaggcggtgcaggccatgtaccagataagccaggaggaacacagccagctgcaagagcagatggaaaagttactggccaagcagaaagacctgaaggaagagctggatgcctgtgaaagggagttcaaggagtgcatggaatgccttgaaaagcccatggccccccagaacgacaagaatgagatcaaagaactgcagaccaagctgcgggagctgcagctgcaataccaggctagcatggatgagcaggggcggcttctggtagtgcaggagcagctggaggggcagctgcagtgctgccaggaggagctccgccagctcagggagaagaggccttctgttgtcaaagaagcccgggggaagaatgctaataagaacatgaacaagaatgccaatggggttaaaatgaaaaaggtgaccaagccatgctcggatacttctgagagcgaccttgagaccagaaagagtctggaggtagtgctgtactacaaggccagccagaggaaattagatggactagcaaaagaggaggaaaagaaagaggagatggaggaggaaaaaaagcaagtgaaagaggaagcaaaggagcagtgtggggatgagctagttgctgagccagcagatcctgaggaagctaaatccacagaagatcaggaggaaaatgaagaggacaaagaggaagaggagaaggaagaagacagtgaagaggaggaggatgacgccgactcttcccttgaaagtcccgaagaaaataaccccctcagactttccgagagcaaaaagaacatgtttgggttgtggaagcctatggtattcttggctattgcagctgtggctctgtatgtgttacccaacatgcgacagcaggagtcagagttctgcctcatggagtgatggcagaccttggccagcgcgagggcagatccccagtggccaccaccctcagctttgggcaggacacactgtgccagaaccctccccatatgttccatgtgtccccatctcctcagcctcagtcacccaggctgaaaaggcttgtggggagcggctgacttccatctcctgccttgtgtaagaacctgagttccttgtaattaaatatcaactgaa

SEQ ID NO: 120775 - DNA, 1870 bp, Homo sapiens
  Payload ID: 3659
  Gene Symbol: CCDC136
  Gene Name: coiled-coil domain containing 136
  ENST ID: ENST00000464672
  CDS Start-End: 1-1647
gtagaaaaccagagtgagaaggagttactgtgccggctgcagaagctgcacctccagcaccagaacgtcacatgtgagaaggaaaagctgctggaacggcagcagcagctgcaggaggagctgcagtgccatgaggcagagctgcagcacctcagggatacggtggcctccttcaaagagagcaatgagaaggacacagagacgcacgctcagcttcaggagatgaagcagctgtaccaggccagcaaggacgagctggagcggcagaagcacatgtatgaccagctggagcaggacctcctgctctgccagctggagctgaaagagctcaaggcctcccaccccattccggaggacaaaggaaagtgtgctaataagtgtgacacactgctgtccagactgacagaattgcaggaaaagtacaaggccagccagaaggagatggggcagctgcagatggagcagtgtgagctcctggaggatcagaggaggatgcaggaggagcagggccagctgcaggaagagctgcacaggctcacactgccactgccaaagagtggcctcttactcaagagtcaggagctactcaccaagttagaagacctgtgtgagctgcagctgctctaccaaggcatgcaggaggaacagaagaagctgatacagaaccaagactgtgtattaaaagaacaattagagatccacgaagagctgcgacgtttcaaagagtctcatttccaggaagtgttggagaatcccgatgattccaaattggctaagtcctccaaatgtaatcgaaacaagcaatccaagctgctcatggagcagatgcaggccctgcaggtgatgtatgacgccggtcaggcgaagcaggagctcttgcagcaagagcaagggaggctcctagaggagcggaagaggctgcaggcagacttgcagctctgcctggaagaaatgcagctgcttcaagtccagtccccttctataaaaatgagccttgagtcctacgggaagagctatggtagcatggtccccagcaatgagaactgtcgcaagacttatgataccactgtggatgacaatgagagctattacaagagttacaccagcacccagaccagcagcaagagctttctcaagagctatgacagcagcaccagtgccagtgaggcctatgggaagagttactgcactaccagcaacagcagcattacctataagaagagttacggcagcaccagtagctctgacacctgccagaagagttttgtcagcagctgcactgacgaggaacctgctgagcctgaagacatggagcgctttgaggaaatggttgtgaaagtgctgatcaagctgcaggcggtgcaggccatgtaccagataagccaggaggaacacagccagctgcaagagcagatggaaaagttactggccaagcagaaagacctgaaggaagagctggatgcctgtgaaagggagttcaaggagtgcatggaatgccttgaaaagcccatggccccccagaacgacaagaatgagaacatgtttgggttgtggaagcctatggtattcttggctattgcagctgtggctctgtatgtgttacccaacatgcgacagcaggagtcagagttctgcctcatggagtgatggcagaccttggccagcgcgagggcagatccccagtggccaccaccctcagctttgggcaggacacactgtgccagaaccctccccatatgttccatgtgtccccatctcctcagcctcagtcacccaggctgaaaaggcttgtggggagcggctgacttccatctcctgccttgtgtaagaacctgagttccttgtaattaaatatcaactgaattacatg

SEQ ID NO: 120776 - DNA, 552 bp, Homo sapiens
  Payload ID: 3659
  Gene Symbol: CCDC136
  Gene Name: coiled-coil domain containing 136
  ENST ID: ENST00000488925
  CDS Start-End: 362-552
agacccccaggtgctcccggcctccgcggctcccctttctccgcccaaagtcttcctccctccatcctggcctccaccggggcccggtctccatccttccggcctgggactgaggcttccgcgcaccggccgcatcctgcctggtggtccctccccagcgcgtctctccacttcagtccgacggtgcttccagccttcgggactgcagaccctacacctcctgcagccccggagactcctgagcgcggggcgagggtggggtgggcaaggacccacagtgaccactctaggctcctatgaggcttccgagggctgtgagaggaagaagggccaacgctgggggtccctggaacgacgggggatgcaagctatggagggggaggtgttactcccagctctctatgaggaggaagaggaagaggaagaggaggaagaagaggtggaagaagaagaagaacaagtgcagaaaggtggcagtgttggctctctgtcagtcaacaagcaccggggactgagcctcacggagacagagctggaggagctgcgggctca

SEQ ID NO: 120777 - DNA, 723 bp, Homo sapiens
  Payload ID: 3659
  Gene Symbol: CCDC136
  Gene Name: coiled-coil domain containing 136
  ENST ID: ENST00000485998
  CDS Start-End: 313-723
gggggtcttccggccctgaggcttgatggggccaccggagggctcctcctaagagggtccttggccctggctcggtggggggtcgcggaaagcggagaggtcagggccctgccgttcgcccatccgggcctcgacttccctcctccggcccccaggctgccgaggggccaccgggcaggggtgggcagggcctggggccggagtcagcgcggactgctaggacccacagtgaccactctaggctcctatgaggcttccgagggctgtgagaggaagaagggccaacgctgggggtccctggaacgacgggggatgcaagctatggagggggaggtgttactcccagctctctatgaggaggaagaggaagaggaagaggaggaagaagaggtggaagaagaagaagaacaagtgcagaaaggtggcagtgttggctctctgtcagtcaacaagcaccggggactgagcctcacggagacagagctggaggagctgcgggctcaggtgctgcagctggtggcagaactggaggagacccgggaactggcagggcagcatgaggatgactccttggagctacaggggctcctggaggatgaacggctagccagcgcccagcaggcagaggtgttcaccaagcagatccagcagctccaaggtgagctgcgttctctacgggaggagatttccctgttagagcatgagaaagaaagcgaacttaag

SEQ ID NO: 120778 - DNA, 1720 bp, Homo sapiens
  Payload ID: 3659
  Gene Symbol: CCDC136
  Gene Name: coiled-coil domain containing 136
  ENST ID: ENST00000464832
  CDS Start-End: 45-1385
gcggcttctgctcagggaggcggaaggcggcggcgggagcggtcatggaggcgggcgccggagccggcgcgggagccgcgggctggagctgcccgggcccaggacccacagtgaccactctaggctcctatgaggcttccgagggctgtgagaggaagaagggccaacgctgggggtccctggaacgacgggggatgcaagctatggagggggaggtgttactcccagctctctatgaggaggaagaggaagaggaagaggaggaagaagaggtggaagaagaagaagaacaagtgcagaaaggtggcagtgttggctctctgtcagtcaacaagcaccggggactgagcctcacggagacagagctggaggagctgcgggctcaggtgctgcagctggtggcagaactggaggagacccgggaactggcagggcagcatgaggatgactccttggagctacaggggctcctggaggatgaacggctagccagcgcccagcaggcagaggtgttcaccaagcagatccagcagctccaaggtgagctgcgttctctacgggaggagatttccctgttagagcatgagaaagaaagcgaacttaaggaaatagaacaggaattgcatttggcccaggctgagatccagagtctgcggcaagcagcagaggattccgcaactgaacatgagagtgacatagcatccctgcaggaggatctctgccggatgcagaatgaacttgaagacatggaacgcattcggggagattatgagatggagatcgcctccctccgtgcagaaatggaaatgaagagctctgaaccatccggtagtttaggtctctcagattactctgggttacaagaagaactgcaggagctgcgggaacgctaccatttcctgaatgaggaataccgggccctgcaggagagcaacagcagcctcacggggcagcttgcagatctggagagtgagaggacacagagagcaacagagagatggctgcagtcccaaacactgagtatgacgtcagcagagtctcagacttcagaaatggatttcttagagcctgatcctgaaatgcagttgttacggcagcagctacgggatgctgaagagcagatgcatggcatgaagaacaagtgtcaggaattgtgttgtgagttggaagagctacagcatcatcgccaggtcagtgaggaggagcagaggcggctgcagagggagctcaagtgtgctcagaatgaggtgcttcggtttcagacctcccacagtgtcacccagtcatcccctacccccaatccccccatcttctccttgcctcttgtaggcctggtggtcatctcggctttgctctggtgctggtgggctgagacgtcgtcctaatgcagaacatgtttgggttgtggaagcctatggtattcttggctattgcagctgtggctctgtatgtgttacccaacatgcgacagcaggagtcagagttctgcctcatggagtgatggcagaccttggccagcgcgagggcagatccccagtggccaccaccctcagctttgggcaggacacactgtgccagaaccctccccatatgttccatgtgtccccatctcctcagcctcagtcacccaggctgaaaaggcttgtggggagcggctgacttccatctcctgccttgtgtaagaacctgagttccttgtaattaaatatcaactgaatta

SEQ ID NO: 120779 - DNA, 2268 bp, Homo sapiens
  Payload ID: 3659
  Gene Symbol: CCDC136
  Gene Name: coiled-coil domain containing 136
  ENST ID: ENST00000487361
  CDS Start-End: 395-1942
gccctctttcagtcttggccctctcctccctgtccccccggactaaatacgcacaccccctctttctttctgtgcaagcaagagggtcctggaacagcgggttctgaggaggctgggaggcagggctgagaggtggccgagagagaggagtcgcagagccgccagagtgagtcaggcacctccactgggattacagatcccagagcctcgaggagctggaagacatgtccccttctttcctctgcaccccagcccgcagccagccccccaccccccagcccctcctttctccctgctctcaggacccacagtgaccactctaggctcctatgaggcttccgagggctgtgagaggaagaagggccaacgctgggggtccctggaacgacgggggatgcaagctatggagggggaggtgttactcccagctctctatgaggaggaagaggaagaggaagaggaggaagaagaggtggaagaagaagaagaacaagtgcagaaaggtggcagtgttggctctctgtcagtcaacaagcaccggggactgagcctcacggagacagagctggaggagctgcgggctcaggtgctgcagctggtggcagaactggaggagacccgggaactggcagggcagcatgaggatgactccttggagctacaggggctcctggaggatgaacggctagccagcgcccagcaggcagaggtgttcaccaagcagatccagcagctccaaggtgagctgcgttctctacgggaggagatttccctgttagagcatgagaaagaaagcgaacttaaggaaatagaacaggaattgcatttggcccaggctgagatccagagtctgcggcaagcagcagaggattccgcaactgaacatgagagtgacatagcatccctgcaggaggatctctgccggatgcagaatgaacttgaagacatggaacgcattcggggagattatgagatggagatcgcctccctccgtgcagaaatggaaatgaagagctctgaaccatccggtagtttaggtctctcagattactctgggttacaagaagaactgcaggagctgcgggaacgctaccatttcctgaatgaggaataccgggccctgcaggagagcaacagcagcctcacggggcagcttgcagatctggagagtgagaggacacagagagcaacagagagatggctgcagtcccaaacactgagtatgacgtcagcagagtctcagacttcagaaatggatttcttagagcctgatcctgaaatgcagttgttacggcagcagctacgggatgctgaagagcagatgcatggcatgaagaacaagtgtcaggaattgtgttgtgagttggaagagctacagcatcatcgccaggtcagtgaggaggagcagaggcggctgcagagggagctcaagtgtgctcagaatgaggtgcttcggtttcagacctcccacagtgtcacccaggagttactgtgccggctgcagaagctgcacctccagcaccagaacgtcacatgtgagaaggaaaagctgctggaacggcagcagcagctgcaggaggagctgcagtgccatgaggcagagctgcagcacctcagggatacggtggcctccttcaaagagagcaatgagaaggacacagagacgcacgctcagcttcaggagatgaagcagctgtaccaggccagcaaggacgagctggagcggcagaagcacatgtatgaccagctggagcaggacctcctgctctgccagctggagctgaaagagctcaaggcctcccaccccattccggaggacaaaggaaagtgtgctaataagtcatcccctacccccaatccccccatcttctccttgcctcttgtaggcctggtggtcatctcggctttgctctggtgctggtgggctgagacgtcgtcctaatgcagaacatgtttgggttgtggaagcctatggtattcttggctattgcagctgtggctctgtatgtgttacccaacatgcgacagcaggagtcagagttctgcctcatggagtgatggcagaccttggccagcgcgagggcagatccccagtggccaccaccctcagctttgggcaggacacactgtgccagaaccctccccatatgttccatgtgtccccatctcctcagcctcagtcacccaggctgaaaaggcttgtggggagcggctgacttccatctcctgccttgtgtaagaacctgagttccttgtaattaaatatca

SEQ ID NO: 120780 - DNA, 2468 bp, Homo sapiens
  Payload ID: 3660
  Gene Symbol: CCDC137
  Gene Name: coiled-coil domain containing 137
  Uniprot ID: Q6PK04
  ENST ID: ENST00000329214
  CDS Start-End: 404-1273
ggggtccttcggcggcggccagcgcgcgatcctcccggctccgtccccacatgcgggtggaggggccggggctcctcccggtacgtgcgggcccccggacagcggcctctcggacgtgcccttcggcgctgccaagacccgtcctggtacttgccgagccacggaccgcggcggctaccgcccggcctccctcgaccaccctccgcagcagcatcgcccgcggacgggatccggcaacccctgaccgtgagcggcgggcgctccggccaatcccggaccttcaggaagtcgcgccgctccagccagcgtgaggctgagcgcaggaagcggaagtgccgatcggtggggcggaaccatgcaggaaggcggaagtggcttcgctagggagcctcccggcgtggagatggcgggagctggtcgcggagcagcggtgtccagggtgcaggcgggtcctgggagtccccggcgagcgcgggggcggcagcaagtgcagccgctggggaagcagcgcccagccccgtggcccgggcttcgcagcaaagagaagaagaaagtgaactgcaagcccaagaaccaggacgaacaggagattcctttccggctccgggagattatgaggagccgccaagagatgaaaaacccgatcagtaacaagaagaggaagaaagcagcccaggtgaccttcagaaagacattggagaaggaagcaaagggagaggagcccgacatcgcagtccccaagttcaaacagaggaagggggagtctgacggggcctatatccaccgcatgcagcaagaggcccagcatgtgctgttcctcagcaagaaccaggccatccggcagccagaggtgcaggcagctcccaaggagaagtctgagcagaaaaaagcaaaaaaagcgttccagaagcggcgactagataaagtccgacggaaaaaggaggaaaaggcggcagacaggctggagcaggagttgctccgagacacggtgaagtttggtgaggttgtcctgcagcccccagagctgactgccaggccccagaggagcgtaagcaaggaccagcctggcaggagatcgcagatgctgcggatgcttctgagccccggtggtgtgtcccagcctctgaccgcctccctggcccgccagcggattgtggaggaggagagagagcgggccgtgcaggcctacagagcgttgaagcagcggcagcagcagctgcacggggagcgaccccacctcacttcccggaagaagccagagccgcagctgtgatggagagacacccggggcctggccacgctctggggcaactggcaccaggagctgctacacctgggtaggagagaggcaggccatgccagcagtgtggggtgaggcctccagctacttgttcacacgttgggcactagtgggtccacatcttgcagggggtgagtgcccgatggactagggccaaggcctggttgacagacggcccgtggggcccggtgtcactcacagctccatctctttgttttgaacgtccattctgagtctcagcccaggtggaccttaggaagggctggatccctgtccctgaacaccaaataccgagacagctgatgaggctggctcagtgtgtgacggaggcccccgggagtcagcagagccgagcgtacagtgcacatcaggcagagcaggccacgggcagggacgacgcatcgggacagggctctgcaggggaccgtgactacaggccagctgtgagtggtcccctacagaggctgcccacccaaggtttggttggggtgaaacatgatgacaacacatacacttaagaaggtgggaaccgggggccgggcgcggtggctcacacctgtaatgccagcactttgggcagctgaggcgagtggatcacctgaggtcaggagttcgaaccagcctggccaacatggtgaaactgcatctctactaaaaatacacgaagaaaaaaaaaacagtgggaacagagttgtcacctacctaacagggctctgagagagccgggaggcccaaagtggctggaagaaggtaaaggaaaaatcctgtcttgggctcaaggtcacagagtggggcccagggggagttcctgctgagggcagggccttgccaggcttcagtctccagtgccaaaggaggaaatgcccaggctgtcagcatttccagatgagagcagaagggagaagcttaaacccaagtcacacatccagcaatggagtccgacagcccagcaccatctgggaactgagaagcacctctgcccggcccccacaccgtgtggaaagtgaggagcacctctgcctggccgccaccccgtctggcaagtgaggagcgcctctgcccggccgctgtgcaaccttccaagtgtgaagtgacagccttgtgtgtgatgttttctgccttccccaagtttgcactttcgacattaaagtttactttttagttaaaa

SEQ ID NO: 120781 - DNA, 890 bp, Homo sapiens
  Payload ID: 3660
  Gene Symbol: CCDC137
  Gene Name: coiled-coil domain containing 137
  ENST ID: ENST00000574107
  CDS Start-End: 13-890
cccggcgtggagatggcgggagctggtcgcggagcagcggtgtccagggtgcaggcgggtcctgggagtccccggcgagcgcgggggcggcagcaagtgcagccgctggggaagcagcgcccagccccgtggcccgggcttcgcagcaaagagaagaagaaagtgaactgcaagcccaagaaccaggacgaacaggagattcctttccggctccgggagattatgaggagccgccaagagatgaaaaacccgatcagtaacaagaagaggaagaaagcagctgtgctgcagtggacatctgtgacagcccaggtgaccttcagaaagacattggagaaggaagcaaagggagaggagcccgacatcgcagtccccaagttcaaacagaggaagggggagtctgacggggcctatatccaccgcatgcagcaagaggcccagcatgtgctgttcctcagcaagaaccaggccatccggcagccagaggtgcaggcagctcccaaggagaagtctgagcagaaaaaagcaaaaaaagcgttccagaagcggcgactagataaagtccgacggaaaaaggaggaaaaggcggcagacaggctggagcaggagttgctccgagacacggtgaagtttggtgaggttgtcctgcagcccccagagctgactgccaggccccagaggagcgtaagcaaggaccagcctggcaggagatcgcagatgctgcggatgcttctgagccccggtggtgtgtcccagcctctgaccgcctccctggcccgccagcggattgtggaggaggagagagagcgggccgtgcaggcctacagagcgttgaagcagcggcagcagcagctgcacggggagcgaccccacctcacttcccggaagaa

SEQ ID NO: 120782 - DNA, 1888 bp, Homo sapiens
  Payload ID: 3660
  Gene Symbol: CCDC137
  Gene Name: coiled-coil domain containing 137
  Uniprot ID: Q6PK04
  ENST ID: ENST00000575223
  CDS Start-End: 16-885
cctcccggcgtggagatggcgggagctggtcgcggagcagcggtgtccagggtgcaggcgggtcctgggagtccccggcgagcgcgggggcggcagcaagtgcagccgctggggaagcagcgcccagccccgtggcccgggcttcgcagcaaagagaagaagaaagtgaactgcaagcccaagaaccaggacgaacaggagattcctttccggctccgggagattatgaggagccgccaagagatgaaaaacccgatcagtaacaagaagaggaagaaagcagcccaggtgaccttcagaaagacattggagaaggaagcaaagggagaggagcccgacatcgcagtccccaagttcaaacagaggaagggggagtctgacggggcctatatccaccgcatgcagcaagaggcccagcatgtgctgttcctcagcaagaaccaggccatccggcagccagaggtgcaggcagctcccaaggagaagtctgagcagaaaaaagcaaaaaaagcgttccagaagcggcgactagataaagtccgacggaaaaaggaggaaaaggcggcagacaggctggagcaggagttgctccgagacacggtgaagtttggtgaggttgtcctgcagcccccagagctgactgccaggccccagaggagcgtaagcaaggaccagcctggcaggagatcgcagatgctgcggatgcttctgagccccggtggtgtgtcccagcctctgaccgcctccctggcccgccagcggattgtggaggaggagagagagcgggccgtgcaggcctacagagcgttgaagcagcggcagcagcagctgcacggggagcgaccccacctcacttcccggaagaagccagagccgcagctgtgatggagagacacccggggcctggccacgctctggggcaactggcaccaggagctgctacacctggtctcagcccaggtggaccttaggaagggctggatccctgtccctgaacaccaaataccgagacagctgatgaggctggctcagtgtgtgacggaggcccccgggagtcagcagagccgagcgtacagtgcacatcaggcagagcaggccacgggcagggacgacgcatcgggacagggctctgcaggggaccgtgactacaggccagctgtgagtggtcccctacagaggctgcccacccaaggtttggttggggtgaaacatgatgacaacacatacacttaagaaggtgggaaccgggggccgggcgcggtggctcacacctgtaatgccagcactttgggcagctgaggcgagtggatcacctgaggtcaggagttcgaaccagcctggccaacatggtgaaactgcatctctactaaaaatacacgaagaaaaaaaaaacagtgggaacagagttgtcacctacctaacagggctctgagagagccgggaggcccaaagtggctggaagaaggtaaaggaaaaatcctgtcttgggctcaaggtcacagagtggggcccagggggagttcctgctgagggcagggccttgccaggcttcagtctccagtgccaaaggaggaaatgcccaggctgtcagcatttccagatgagagcagaagggagaagcttaaacccaagtcacacatccagcaatggagtccgacagcccagcaccatctgggaactgagaagcacctctgcccggcccccacaccgtgtggaaagtgaggagcacctctgcctggccgccaccccgtctggcaagtgaggagcgcctctgcccggccgctgtgcaaccttccaagtgtgaagtgacagccttgtgtgtgatgttttctgccttccccaagtttgcactttcgacattaaagtttactttttagttaaaagtttt

SEQ ID NO: 120783 - DNA, 708 bp, Homo sapiens
  Payload ID: 3660
  Gene Symbol: CCDC137
  Gene Name: coiled-coil domain containing 137
  ENST ID: ENST00000571916
  CDS Start-End: 1-186
gacgaacaggagattcctttccggctccgggagattatgaggagccgccaagagatgaaaaacccgatcagtaacaagaagaggaagaaagcaggtgaccttcagaaagacattggagaaggaagcaaagggagaggagcccgacatcgcagtccccaagttcaaacagaggaagggggagtctgacggggcctatatccaccgcatgcagcaagaggcccagcatgtgctgttcctcagcaagaaccaggccatccggcagccagaggtgcaggcagctcccaaggagaagtctgagcagaaaaaagcaaaaaaagcgttccagaagcggcgactagataaagtccgacggaaaaaggaggaaaaggcggcagacaggctggagcaggagttgctccgagacacggtgaagtttggtgaggttgtcctgcagcccccagagctgactgccaggccccagaggagcgtaagcaaggaccagcctggcaggagatcgcagatgctgcggatgcttctgagccccggtggtgtgtcccagcctctgaccgcctccctggcccgccagcggattgtggaggaggagagagagcgggccgtgcaggcctacagagcgttgaagcagcggcagcagcagctgcacggggagcgaccccacctcacttcccggaagaagccagagccgcagctgtgatggagagacacccgggg

SEQ ID NO: 120784 - DNA, 437 bp, Homo sapiens
  Payload ID: 3660
  Gene Symbol: CCDC137
  Gene Name: coiled-coil domain containing 137
  ENST ID: ENST00000574200
  CDS Start-End: 1-133
gggagctggtcgcggagcagcggtgtccagggtgcaggcgggtcctgggagtccccggcgagcgcgggggcggcagcaagtgcagccgctggggaagcagcgcccagccccgtggcccgggcttcgcaggtgactgcgctgccccgcgaggccgccacacttccccagagaaggggacgccttgaaggctccgcccgggaccccctagggagcgttcgctcggaccccttccccagcaaagagaagaagaaagtgaactgcaagcccaagaaccaggacgaacaggagattcctttccggctccgggagattatgaggagccgccaagagatgaaaaacccgatcagtaacaagaagaggaagaaagcagcccaggtgaccttcagaaagacattggagaaggaagcaaagggagaggagcccgacatcgcagtccc

SEQ ID NO: 120785 - DNA, 2383 bp, Homo sapiens
  Payload ID: 3661
  Gene Symbol: CCDC138
  Gene Name: coiled-coil domain containing 138
  Uniprot ID: Q96M89
  ENST ID: ENST00000295124
  CDS Start-End: 61-2058
gtagcgccgcgggtttgatgaacgcggttcccggggagactggtacggttgctgtgtgctatggagccgagggtcgtcaagccaccggggcaggatttagtagtggagagtctcaaaagccgctacggactcgggggcagctgccccgacgagtatgatttttcaaatttttatcagtctaagtataagagaagaactctaacctccccaggtgatttggatatctactctggagataaagttggttcatcgttaaaatattctgatgaaagcaagcattgtagaacaccattgggcagcttattcaagcacgtaaatgtgaattgcctagatgatgaactggattctttccatgatttgaagaaacaggaaacagaagaagagttaattgaaaatgattatagagttagtacctcgaaaataaccaagcagtcttttaaagaaatagaaaaagttgccttgccaactaatacgacctcatcgagacctcggactgagtgttgtagtgatgcaggtgactctcctttgaaacctgtcagctgtccaaaatctaaagcatcagacaagcggagtttacttccacatcagatcagtcagatatatgacgaattatttcagatacatctgaaattgcagtgtgaaactgcagcacaacagaaatttgctgaagaacttcaaaagcgagaacgttttttacttgaaagagaacaactgcttttcagacatgaaaatgccttgagtaaaattaaaggtgttgaagaagaggttcttacaagatttcaaattataaaagagcagcatgatgcagaagttgaacacttaaccgaagttcttaaggaaaagaataaagaaaccaagagactgaggtcctcttttgatgcattgaaagaattgaatgataccttaaaaaaacagttaaatgaagcaagtgaagaaaacaggaagatagacattcaggctaaaagagttcaagctcgtttagataatttacagaggaagtacgagtttatgacaatacagagattgaaaggaagttcccatgctgttcatgaaatgaaaagtttaaaacaagaaaaagcaccagtttcaaaaacttacaaggtaccacttaatgggcaagtttatgaacttttaactgtcttcatggactggatttcggatcatcatcttagcaaagtgaaacatgaagaatctggaatggatggtaaaaaaccacaactcaaatttgcttcccagagaaatgatattcaggagaagtgtgtaaagcttttgcctctaatgacagagcagctacagtggatgccatttgtgaatatcaaacttcacgagccttttgtaaaatttatatattggtccctaaggcagctagatgctggagcacagcactcgactatgacatcaacattgaggagattgggtgaagacatttttaaaggagtggtaactaaaggaattcaggataattctccacagcattctgtggagaataaaccaaagacagctgctttctttaagagctccaatttgccattgagatttttatcaaccttaattgttctcaaaacagtcactcaagctgattacctggctcaggcatttgattctctttgtttggacttgaagacagaagaaggaaaaaccttgtttttggagtatcaggctgttccagtaatattaagtcatctaagaatatccagtaaaggactcctgtctaatgttattgatagtttgctccagatgacggtggaatctaaatccttgcagcctttcctggaagcctgtagcaactctttattttttcgtacttgctctgtgctgcttcgagcccctaagcttgatcttcaaatactagaaaaactcagtattattttacagaaactttccaaaatcaagagtaataagaagctctttgaactttttacgattcatctgatgcttcaagaaatacaaaggacaacaaacccagagcatgcatttctctgtattaatctaaattcaactctgttcaatctgggtttaacaaaatgtaactccctggtctccagtgcaagcccttagactggctaattttttaatatagtatatgtggtgcttatttataaacatgtagaaattaccaaagtaactacaattctaccaagtaaagttatcagtagcatcatttatcatgaaaaataaataatttttttgaactgtaaaaatgaaatctgtagaaggtattggaacttttggaatgtttcagttcaggtaaggtaatactaatatacaagatggcgtttctagaatgtatgacactgaagtgactttttgtaaaaatatattaggaaaattatttcttaaaattatgtgattatttggaataaaattggtgcttatgtgagaa

SEQ ID NO: 120786 - DNA, 2364 bp, Homo sapiens
  Payload ID: 3661
  Gene Symbol: CCDC138
  Gene Name: coiled-coil domain containing 138
  ENST ID: ENST00000409529
  CDS Start-End: 63-377
gcgtagcgccgcgggtttgatgaacgcggttcccggggagactggtacggttgctgtgtgctatggagccgagggtcgtcaagccaccggggcaggatttagtagtggagagtctcaaaagccgctacggactcgggggcagctgccccgacgagtatgatttttcaaatttttatcagtctaagtataagagaagaactctaacctccccaggtgatttggatatctactctggagataaagttggttcatcgttaaaatattctgatgaaagcaagcattgtagaacaccattgggcagcttattcaagcacgtaaatgtgaattgtttaaaaaatgtttttacattttttctcagttatgctgttaatatttgaaaagcagttttatctttttaaagtgctatagtaaacttctagattgctgtgatacaattatttttttaaagcctagatgatgaactggattctttccatgatttgaagaaacaggaaacagaagaagagttaattgaaaatgattatagagttagtacctcgaaaataaccaagcagtcttttaaagaaatagaaaaagttgccttgccaactaatacgacctcatcgagacctcggactgagtgttgtagtgatgcaggtgactctcctttgaaacctgtcagctgtccaaaatctaaagcatcagacaagcggagtttacttccacatcagatcagtcagatatatgacgaattatttcagatacatctgaaattgcagtgtgaaactgcagcacaacagaaatttgctgaagaacttcaaaagcgagaacgttttttacttgaaagagaacaactgcttttcagacatgaaaatgccttgagtaaaattaaaggtgttgaagaagaggttcttacaagatttcaaattataaaagagcagcatgatgcagaagttgaacacttaaccgaagttcttaaggaaaagaataaagaaaccaagagactgaggtcctcttttgatgcattgaaagaattgaatgataccttaaaaaaacagttaaatgaagcaagtgaagaaaacaggaagatagacattcaggctaaaagagttcaagctcgtttagataatttacagaggaagtacgagtttatgacaatacagagattgaaaggaagttcccatgctgttcatgaaatgaaaagtttaaaacaagaaaaagcaccagtttcaaaaacttacaaggtaccacttaatgggcaagtttatgaacttttaactgtcttcatggactggatttcggatcatcatcttagcaaagtgaaacatgaagaatctggaatggatggtaaaaaaccacaactcaaatttgcttcccagagaaatgatattcaggagaagtgtgtaaagcttttgcctctaatgacagagcagctacagtggatgccatttgtgaatatcaaacttcacgagccttttgtaaaatttatatattggtccctaaggcagctagatgctggagcacagcactcgactatgacatcaacattgaggagattgggtgaagacatttttaaaggagtggtaactaaaggaattcaggataattctccacagcattctgtggagaataaaccaaagacagctgctttctttaagagctccaatttgccattgagatttttatcaaccttaattgttctcaaaacagtcactcaagctgattacctggctcaggcatttgattctctttgtttggacttgaagacagaagaaggaaaaaccttgtttttggagtatcaggctgttccagtaatattaagtcatctaagaatatccagtaaaggactcctgtctaatgttattgatagtttgctccagatgacggtggaatctagagtaataagaagctctttgaactttttacgattcatctgatgcttcaagaaatacaaaggacaacaaacccagagcatgcatttctctgtattaatctaaattcaactctgttcaatctgggtttaacaaaatgtaactccctggtctccagtgcaagcccttagactggctaattttttaatatagtatatgtggtgcttatttataaacatgtagaaattaccaaagtaactacaattctaccaagtaaagttatcagtagcatcatttatcatgaaaaataaataatttttttgaactgtaaaaatgaaatctgtagaaggtattggaacttttggaatgtttcagttcaggtaaggtaatactaatatacaagatggcgtttctagaatgtatgacactgaagtgactttttgtaaaaatatattaggaaaattatttcttaaaattatgtgattatttggaataaaattggtgcttatgtgag

SEQ ID NO: 120787 - DNA, 1056 bp, Homo sapiens
  Payload ID: 3661
  Gene Symbol: CCDC138
  Gene Name: coiled-coil domain containing 138
  ENST ID: ENST00000456512
  CDS Start-End: 1-1056
aggaaacagaagaagagttaattgaaaatgattatagagttagtacctcgaaaataaccaagcagtcttttaaagaaatagaaaaagttgccttgccaactaatacgacctcatcgagacctcggactgagtgttgtagtgatgcaggtgactctcctttgaaacctgtcagctgtccaaaatctaaagcatcagacaagcggagtttacttccacatcagatcagtcagatatatgacgaattatttcagatacatctgaaattgcagtgtgaaactgcagcacaacagaaatttgctgaagaacttcaaaagcgagaacgttttttacttgaaagagaacaactgcttttcagacatgaaaatgccttgagtaaaattaaaggtgttgaagaagaggttcttacaagatttcaaattataaaagagcatgatgcagaagttgaacacttaaccgaagttcttaaggaaaagaataaagaaaccaagagactgaggtcctcttttgatgcattgaaagaattgaatgataccttaaaaaaacagttaaatgaagcaagtgaagaaaacaggaagatagacattcaggctaaaagagttcaagctcgtttagataatttacagaggaagtacgagtttatgacaatacagagattgaaaggaagttcccatgctgttcatgaaatgaaaagtttaaaacaagaaaaagcaccagtttcaaaaacttacaaggtaccacttaatgggcaagtttatgaacttttaactgtcttcatggactggatttcggatcatcatcttagcaaagtgaaacatgaagaatctggaatggatggtaaaaaaccacaactcaaatttgcttcccagagaaatgatattcaggagaagtgtgtaaagcttttgcctctaatgacagagcagctacagtggatgccatttgtgaatatcaaacttcacgagccttttgtaaaatttatatattggtccctaaggcagctagatgctggagcacagcactcgactatgacatcaacattgaggagattgggtgaagaca

SEQ ID NO: 120788 - DNA, 539 bp, Homo sapiens
  Payload ID: 3661
  Gene Symbol: CCDC138
  Gene Name: coiled-coil domain containing 138
  ENST ID: ENST00000447782
  CDS Start-End: 36-173
ggttcccggggagactggtacggttgctgtgtgctatggagccgagggtcgtcaagccaccggggcaggatttagtagtggagagtctcaaaagccgctacggactcgggggcagctgccccgacgaggtgatttggatatctactctggagataaagttggttcatcgttaaaatattctgatgaaagcaagcattgtagaacaccattgggcagcttattcaagcacgtaaatgtgaattgatgatgaactggattctttccatgatttgaagaaacaggaaacagaagaagagttaattgaaaatgattatagagttagtacctcgaaaataaccaagcagtcttttaaagaaatagaaaaagttgccttgccaactaatacgacctcatcgagacctcggactgagtgttgtagtgatgcaggtgactctcctttgaaacctgtcagctgtccaaaatctaaagcatcagacaagcggagtttacttccacatcagatcagtcagatatatgacgaattatttcagatacatctg

SEQ ID NO: 120789 - DNA, 2250 bp, Homo sapiens
  Payload ID: 3661
  Gene Symbol: CCDC138
  Gene Name: coiled-coil domain containing 138
  Uniprot ID: Q96M89
  ENST ID: ENST00000412964
  CDS Start-End: 67-1800
ggccgcgtagcgccgcgggtttgatgaacgcggttcccggggagactggtacggttgctgtgtgctatggagccgagggtcgtcaagccaccggggcaggatttagtagtggagagtctcaaaagccgctacggactcgggggcagctgccccgacgagtatgatttttcaaatttttatcagtctaagtataagagaagaactctaacctccccaggtgatttggatatctactctggagataaagttggttcatcgttaaaatattctgatgaaagcaagcattgtagaacaccattgggcagcttattcaagcacgtaaatgtgaattgcctagatgatgaactggattctttccatgatttgaagaaacaggaaacagaagaagagttaattgaaaatgattatagagttagtacctcgaaaataaccaagcagtcttttaaagaaatagaaaaagttgccttgccaactaatacgacctcatcgagacctcggactgagtgttgtagtgatgcaggtgactctcctttgaaacctgtcagctgtccaaaatctaaagcatcagacaagcggagtttacttccacatcagatcagtcagatatatgacgaattatttcagatacatctgaaattgcagtgtgaaactgcagcacaacagaaatttgctgaagaacttcaaaagcgagaacgttttttacttgaaagagaacaactgcttttcagacatgaaaatgccttgagtaaaattaaaggtgttgaagaagaggttcttacaagatttcaaattataaaagagcagcatgatgcagaagttgaacacttaaccgaagttcttaaggaaaagaataaagaaaccaagagactgaggtcctcttttgatgcattgaaagaattgaatgataccttaaaaaaacagttaaatgaagcaagtgaagaaaacaggaagatagacattcaggctaaaagagttcaagctcgtttagataatttacagaggaagtacgagtttatgacaatacagagattgaaaggaagttcccatgctgttcatgaaatgaaaagtttaaaacaagaaaaagcaccagtttcaaaaacttacaaggtaccacttaatgggcaagtttatgaacttttaactgtcttcatggactggatttcggatcatcatcttagcaaagtgaaacatgaagaatctggaatggatggtaaaaaaccacaactcaaatttgcttcccagagaaatgatattcaggagaagtgtgtaaagcttttgcctctaatgacagagcagctacagtggatgccatttgtgaatatcaaacttcacgagccttttgtaaaatttatatattggtccctaaggcagctagatgctggagcacagcactcgactatgacatcaacattgaggagattgggtgaagacatttttaaaggagtggtaactaaaggaattcaggataattctccacagcattctgtggagaataaaccaaagacagctgctttctttaagagctccaatttgccattgagatttttatcaaccttaattgttctcaaaacagtcactcaagctgattacctggctcaggcatttgattctctttgtttggacttgaagacagaagaaggaaaaaccttgtttttggagtatcaggctgttccagtaatattaagtcatctaagaatatccagtaaaggactcctgtctaatgttattgatagtttgctccagatgacggtggaatctagagtaataagaagctctttgaactttttacgattcatctgatgcttcaagaaatacaaaggacaacaaacccagagcatgcatttctctgtattaatctaaattcaactctgttcaatctgggtttaacaaaatgtaactccctggtctccagtgcaagcccttagactggctaattttttaatatagtatatgtggtgcttatttataaacatgtagaaattaccaaagtaactacaattctaccaagtaaagttatcagtagcatcatttatcatgaaaaataaataatttttttgaactgtaaaaatgaaatctgtagaaggtattggaacttttggaatgtttcagttcaggtaaggtaatactaatatacaagatggcgtttctagaatgtatgacactgaagtgactttttgtaaaaatatattaggaaaattatttcttaaaattatgtgattatttggaataaaattggtgcttatgtgagaa

SEQ ID NO: 120790 - DNA, 540 bp, Homo sapiens
  Payload ID: 3661
  Gene Symbol: CCDC138
  Gene Name: coiled-coil domain containing 138
  ENST ID: ENST00000608781
  CDS Start-End: 1-120
tctaatgttattgatagtttgctccagatgacggtggaatctagtcatcctccatgcccttctgatgtccacatgtctcttcattttcttctcaggcctcctctttctctcaccatctaagttattgaaattcttgaaatcctaagcaggcctggcactgagaggtactctgtaagggagctgaaacttccagcctttcttcctattcacaaacccacctttacccgcccccaatgctggactttggtttttcatattgcttttgcagaactttaaaacatttgaatctttccttgatgagtttttgtcctgaggggccagtgcagttttcttgccactttgttttcctctcatataacttttccctgtcaataaggcatttaggctgagagaaaaagttattgagcatgtgcatccaaatttgagatgattgttatttcattacctaatgactttaacttctttgatactgtgtttgtcttatgaatataatggctttctcactttaatgaaaagttatacaataaaattgaaaagtaa

SEQ ID NO: 120791 - DNA, 3111 bp, Homo sapiens
  Payload ID: 3662
  Gene Symbol: CCDC14
  Gene Name: coiled-coil domain containing 14
  ENST ID: ENST00000310351
  CDS Start-End: 57-2651
ctttttaccgtgaggcttcacttccctcggtctgggcttctctgaggcggcgagagatggtcaggtctggagctcgaccgggccaggtgttatcttcaggaaggcacactggacctgctaaattaacaaatggaaagaaagcgacctatttaagaaaaataccacgttttaatgcagattctggctattccatccattctgattcagaaagtcaggctgaaactgtacacgggcttgatggttgtgcttctttgctgagggacattttgagaaatgaagattcagcatcttcagataataagaaacagatacctaatgaagcttctgctagaagtgaaagagacacatcagacctagagcaaaactggtcattgcaagatcattatagaatgtattcacccataatataccaagccctctgtgagcacgtgcagactcagatgtcactgatgaatgacttgacttcaaagaacatccctaatggaattcctgctgtaccatgccatgctccctctcattctgaatctcaggcaactcctcattctagttatggcttatgtacctccaccccagtctggtcacttcagcggccaccctgccctccaaaggttcattctgaagttcaaactgatggcaacagtcagtttgcatcacaaggtaaaacagtttctgcaacctgtactgatgttctacggaattcatttaataccagtcctggagttccatgtagcctgcccaaaactgacatatcagctattccaacattgcagcaactgggccttgttaatggaattctgccacaacaaggaattcataaggaaacagacctactaaaatgtattcaaacatatttgtctctttttcgatctcatggaaaagaaacgcatctggacagtcagacacaccgaagccctactcagtcacaaccagctttcttggccactaatgaagaaaaatgtgccagagagcaaattagagaggccacaagtgaaagaaaggatttaaacatacatgtgcgagatacaaaaacagtgaaggatgtacagaaggcaaaaaatgtgaacaagacagctgaaaaagttagaattataaaatatttgttgggagagctcaaggccctggtagcagaacaagaggattcagaaattcagaggttgattacagaaatggaggcatgtatatctgtacttccaacagtaagtggaaacacagatattcaagttgagatagcactggccatgcaaccattaagaagtgagaatgctcagttacgaaggcagttgagaattttgaaccagcaactcagagaacaacagaaaactcaaaaaccatctggtgctgtggattgcaaccttgaattgttttctcttcagtcattgaatatgtcactgcaaaatcaattggaggagtcactaaagagccaggaattactgcagagtaaaaatgaagagctgttaaaagtgattgaaaatcagaaagatgaaaacaaaaaatttagtagtatatttaaagacaaagatcaaactatacttgaaaataaacagcaatatgatattgagataacaagaataaaaattgaattggaggaagccctagtcaatgtgaaaagctcccagtttaagttagaaactgctgaaaaggaaaaccagatattggggataacattacgtcagcgtgatgctgaggtgactcgactaagagaattaaccagaactttacagactagcatggcaaagcttctctccgatcttagtgtggacagtgctcgctgcaagcctgggaataaccttaccaaatcactcttgaacattcatgataaacaacttcaacatgacccagctcctgctcacacttccataatgagctatctaaataagttagaaacaaattacagttttacacattcagagccactttctacaattaaaaatgaggaaaccatagagccagacaaaacctatgaaaatgttctgtcctccagaggccctcaaaatagtaacactaggggcatggaggaagcatctgcacctggaattatttctgccctttcaaaacaggattctgatgaagggagtgaaactatggctttaatagaagatgagcataatttggataatacaatttacattccttttgctagaagcactcctgaaaagaaatcaccactttctaagagactatcccctcagccacaaataagagcagctacaacacagctagtcagcaacagcggacttgctgtctctggaaaagaaaataaactgtgtacacctgtaatctgttcctcttcaacaaaggaagcagaagatgcacctgaaaaactttccagagcatctgatatgaaggacacacagctcctcaagaaaataaaggaagcaattggtaagatccctgctgccaccaaggagccagaggaacaaactgcatgtcatggcccatcaggttgtcttagcaacagccttcaagtgaaaggcaatactgtctgtgatggtagtgttttcacttctgacttgatgtctgactggagcatctcttcgttttcaacgttcacttctcgtgatgaacaagacttcagaaatggccttgcggcattagatgccaacatagctagactccagaagtctttaaggactggtcttctggagaaatgaattcagaagaaaactcatcaggtgcttctttttaaaactagaacttggctatattgaatgtgtatttttctttagtgaaatgatgttttatgttattatgtgtgaagtaatatattgtacaagtaataaatgtattgttgagatatattgacactgaggagcttataaaaacaagtcatcttaagttcacaattgctacaagaagaaagttgtggataactaggaaattattgtaagtaatgttttatttcagtacttagcaattagagttcttttattaagatgtatctgctggattaagggtacaggttgaaatagttctgtggctgtcctaagaaataatgggaaaagaatctctggatgtaagtttttctgttgaaactagagggttttttttttctgtttacatatacttttttttaatagcaatgtgtttttattaaacatgctgtgtgccaca

SEQ ID NO: 120792 - DNA, 3815 bp, Homo sapiens
  Payload ID: 3662
  Gene Symbol: CCDC14
  Gene Name: coiled-coil domain containing 14
  ENST ID: ENST00000409657
  CDS Start-End: 1-159
ggcgggcgggccaagaaggtccgggagcccacggcggttaattctttttaccgtgaggcttcacttccctcggtctgggcttctctgaggcggcgagagatggtcaggtctggagctcgaccgggccaggacctatttaagaaaaataccacgttttaatgcagattctggctattccatccattctgattcagaaagtcaggctgaaactgtacacgggcttgatggttgtgcttctttgctgagggacattttgagaaatgaagattcaggttcagaaacagcatatttagaaaacagatctaattctagacctttagaaagcaaaagatacggatcaaaaaagaaaagacatgaaaaacatactattcctttggtagtccagaaagaaacatcatcttcagataataagaaacagatacctaatgaagcttctgctagaagtgaaagagacacatcagacctagagcaaaactggtcattgcaagatcattatagaatgtattcacccataatataccaagccctctgtgagcacgtgcagactcagatgtcactgatgaatgacttgacttcaaagaacatccctaatggaattcctgctgtaccatgccatgctccctctcattctgaatctcaggcaactcctcattctagttatggcttatgtacctccaccccagtctggtcacttcagcggccaccctgccctccaaaggttcattctgaagttcaaactgatggcaacagtcagtttgcatcacaaggtaaaacagtttctgcaacctgtactgatgttctacggaattcatttaataccagtcctggagttccatgtagcctgcccaaaactgacatatcagctattccaacattgcagcaactgggccttgttaatggaattctgccacaacaaggaattcataaggaaacagacctactaaaatgtattcaaacatatttgtctctttttcgatctcatggaaaagaaacgcatctggacagtcagacacaccgaagccctactcagtcacaaccagctttcttggccactaatgaagaaaaatgtgccagagagcaaattagagaggccacaagtgaaagaaaggatttaaacatacatgtgcgagatacaaaaacagtgaaggatgtacagaaggcaaaaaatgtgaacaagacagctgaaaaagttagaattataaaatatttgttgggagagctcaaggccctggtagcagaacaagaggattcagaaattcagaggttgattacagaaatggaggcatgtatatctgtacttccaacagtaagtggaaacacagatattcaagttgagatagcactggccatgcaaccattaagaagtgagaatgctcagttacgaaggcagttgagaattttgaaccagcaactcagagaacaacagaaaactcaaaaaccatctggtgctgtggattgcaaccttgaattgttttctcttcagtcattgaatatgtcactgcaaaatcaattggaggagtcactaaagagccaggaattactgcagagtaaaaatgaagagctgttaaaagtgattgaaaatcagaaagatgaaaacaaaaaatttagtagtatatttaaagacaaagatcaaactatacttgaaaataaacagcaatatgatattgagataacaagaataaaaattgaattggaggaagccctagtcaatgtgaaaagctcccagtttaagttagaaactgctgaaaaggaaaaccagatattggggataacattacgtcagcgtgatgctgaggtgactcgactaagagaattaaccagaactttacagactagcatggcaaagcttctctccgatcttagtgtggacagtgctcgctgcaagcctgggaataaccttaccaaatcactcttgaacattcatgataaacaacttcaacatgacccagctcctgctcacacttccataatgagctatctaaataagttagaaacaaattacagttttacacattcagagccactttctacaattaaaaatgaggaaaccatagagccagacaaaacctatgaaaatgttctgtcctccagaggccctcaaaatagtaacactaggggcatggaggaagcatctgcacctggaattatttctgccctttcaaaacaggattctgatgaagggagtgaaactatggctttaatagaagatgagcataatttggataatacaatttacattccttttgctagaagcactcctgaaaagaaatcaccactttctaagagactatcccctcagccacaaataagagcagctacaacacagctagtcagcaacagcggacttgctgtctctggaaaagaaaataaactgtgtacacctgtaatctgttcctcttcaacaaaggaagcagaagatgcacctgaaaaactttccagagcatctgatatgaaggacacacagctcctcaagaaaataaaggaagcaattggtaagatccctgctgccaccaaggagccagaggaacaaactgcatgtcatggcccatcaggttgtcttagcaacagccttcaagtgaaaggcaatactgtctgtgatggtagtgttttcacttctgacttgatgtctgactggagcatctcttcgttttcaacgttcacttctcgtgatgaacaagacttcagaaatggccttgcggcattagatgccaacatagctagactccagaagtctttaaggactggtcttctggagaaatgaattcagaagaaaactcatcaggtgcttctttttaaaactagaacttggctatattgaatgtgtatttttctttagtgaaatgatgttttatgttattatgtgtgaagtaatatattgtacaagtaataaatgtattgttgagatatattgacactgaggagcttataaaaacaagtcatcttaagttcacaattgctacaagaagaaagttgtggataactaggaaattattgtaagtaatgttttatttcagtacttagcaattagagttcttttattaagatgtatctgctggattaagggtacaggttgaaatagttctgtggctgtcctaagaaataatgggaaaagaatctctggatgtaagtttttctgttgaaactagagggttttttttttctgtttacatatacttttttttaatagcaatgtgtttttattaaacatgctgtgtgccacaggccagtgttgttggtgaaatatataaacatttatttaaagagaaaagttaccagtatctacacctcttaaaaaacattgattggtctaaaaaatatatagataacatcctaagttaacatatggcttcttaaaacttgggcacttttatttgtttttatcccaaattcatgttttaaggcctttaaagaatagtcagactgataaagaagtgctaacagataagctatagttggggaaatttgtgggttttttttaaataagaaatgtttatttttgtccttatatttaaacatgatggaatttgtaaatcttggcattgattgtaattctgcctttttggaagaattttttctcccagcatgttagctgagaatattctctattttataaataatatgaagtaggttggtctctctgcttctctataccaggacttcttagctcagtatcatctcccttcatgtaagcagcacgttttaactcttaggaagctgaatgttgtgttatcactaatactttgtacaggtcacctgcctactctaattgtccttagtacttggacaggctttatcattaaagagtgttctcctaa

SEQ ID NO: 120793 - DNA, 2962 bp, Homo sapiens
  Payload ID: 3662
  Gene Symbol: CCDC14
  Gene Name: coiled-coil domain containing 14
  ENST ID: ENST00000409697
  CDS Start-End: 88-2805
aagaaggtccgggagcccacggcggttaattctttttaccgtgaggcttcacttccctcggtctgggcttctctgaggcggcgagagatggtcaggtctggagctcgaccgggccaggtgttatcttcaggaaggcacactggacctgctaaattaacaaatggaaagaaagcgacctatttaagaaaaataccacgttttaatgcagattctggctattccatccattctgattcagaaagtcaggctgaaactgtacacgggcttgatggttgtgcttctttgctgagggacattttgagaaatgaagattcaggttcagaaacagcatatttagaaaacagatctaattctagacctttagaaagcaaaagatacggatcaaaaaagaaaagacatgaaaaacatactattcctttggtagtccagaaagaaacatcatcttcagataataagaaacagatacctaatgaagcttctgctagaagtgaaagagacacatcagacctagagcaaaactggtcattgcaagatcattatagaatgtattcacccataatataccaagccctctgtgagcacgtgcagactcagatgtcactgatgaatgacttgacttcaaagaacatccctaatggaattcctgctgtaccatgccatgctccctctcattctgaatctcaggcaactcctcattctagttatggcttatgtacctccaccccagtctggtcacttcagcggccaccctgccctccaaaggttcattctgaagttcaaactgatggcaacagtcagtttgcatcacaaggtaaaacagtttctgcaacctgtactgatgttctacggaattcatttaataccagtcctggagttccatgtagcctgcccaaaactgacatatcagctattccaacattgcagcaactgggccttgttaatggaattctgccacaacaaggaattcataaggaaacagacctactaaaatgtattcaaacatatttgtctctttttcgatctcatggaaaagaaacgcatctggacagtcagacacaccgaagccctactcagtcacaaccagctttcttggccactaatgaagaaaaatgtgccagagagcaaattagagaggccacaagtgaaagaaaggatttaaacatacatgtgcgagatacaaaaacagtgaaggatgtacagaaggcaaaaaatgtgaacaagacagctgaaaaagttagaattataaaatatttgttgggagagctcaaggccctggtagcagaacaagaggattcagaaattcagaggttgattacagaaatggaggcatgtatatctgtacttccaacagtaagtggaaacacagatattcaagttgagatagcactggccatgcaaccattaagaagtgagaatgctcagttacgaaggcagttgagaattttgaaccagcaactcagagaacaacagaaaactcaaaaaccatctggtgctgtggattgcaaccttgaattgttttctcttcagtcattgaatatgtcactgcaaaatcaattggaggagtcactaaagagccaggaattactgcagagtaaaaatgaagagctgttaaaagtgattgaaaatcagaaagatgaaaacaaaaaatttagtagtatatttaaagacaaagatcaaactatacttgaaaataaacagcaatatgatattgagataacaagaataaaaattgaattggaggaagccctagtcaatgtgaaaagctcccagtttaagttagaaactgctgaaaaggaaaaccagatattggggataacattacgtcagcgtgatgctgaggtgactcgactaagagaattaaccagaactttacagactagcatggcaaagcttctctccgatcttagtgtggacagtgctcgctgcaagcctgggaataaccttaccaaatcactcttgaacattcatgataaacaacttcaacatgacccagctcctgctcacacttccataatgagctatctaaataagttagaaacaaattacagttttacacattcagagccactttctacaattaaaaatgaggaaaccatagagccagacaaaacctatgaaaatgttctgtcctccagaggccctcaaaatagtaacactaggggcatggaggaagcatctgcacctggaattatttctgccctttcaaaacaggattctgatgaagggagtgaaactatggctttaatagaagatgagcataatttggataatacaatttacattccttttgctagaagcactcctgaaaagaaatcaccactttctaagagactatcccctcagccacaaataagagcagctacaacacagctagtcagcaacagcggacttgctgtctctggaaaagaaaataaactgtgtacacctgtaatctgttcctcttcaacaaaggaagcagaagatgcacctgaaaaactttccagagcatctgatatgaaggacacacagctcctcaagaaaataaaggaagcaattggtaagatccctgctgccaccaaggagccagaggaacaaactgcatgtcatggcccatcaggttgtcttagcaacagccttcaagtgaaaggcaatactgtctgtgatggtagtgttttcacttctgacttgatgtctgactggagcatctcttcgttttcaacgttcacttctcgtgatgaacaagacttcagaaatggccttgcggcattagatgccaacatagctagactccagaagtctttaaggactggtcttctggagaaatgaattcagaagaaaactcatcaggtgcttctttttaaaactagaacttggctatattgaatgtgtatttttctttagtgaaatgatgttttatgttattatgtgtgaagtaatatattgtacaagtaataaatgtattgttgagatatattgacactga

SEQ ID NO: 120794 - DNA, 567 bp, Homo sapiens
  Payload ID: 3662
  Gene Symbol: CCDC14
  Gene Name: coiled-coil domain containing 14
  ENST ID: ENST00000434954
  CDS Start-End: 216-567
tggttggttttgttttgttttgtttttgaggacccaaagcatcagaattgtacaaactattctctttcctattgcattttcccttgagaacatgaactgacaaggaacaagcatcttcagataataagaaacagatacctaatgaagcttctgctagaagtgaaagagacacatcagacctagagcaaaactggtcattgcaagatcattatagaatgtattcacccataatataccaagccctctgtgagcacgtgcagactcagatgtcactgatgaatgacttgacttcaaagaacatccctaatggaattcctgctgtaccatgccatgctccctctcattctgaatctcaggcaactcctcattctagttatggcttatgtacctccaccccagtctggtcacttcagcggccaccctgccctccaaaggttcattctgaagttcaaactgatggcaacagtcagtttgcatcacaaggtaaaacagtttctgcaacctgtactgatgttctacggaattcatttaataccagtcctggagttccatgtagcctgcccaaaa

SEQ ID NO: 120795 - DNA, 3260 bp, Homo sapiens
  Payload ID: 3662
  Gene Symbol: CCDC14
  Gene Name: coiled-coil domain containing 14
  Uniprot ID: Q49A88
  ENST ID: ENST00000433542
  CDS Start-End: 62-2800
gcgtacgcccaaggcgctgggcctggagcaggagaaagggagtggaggcgcgtcggagactatgaagcgcggcattcggcgggatcctttccggaagcggaagctcggcgggcgggccaagaaggtccgggagcccacggcggttaattctttttaccgtgaggcttcacttccctcggtctgggcttctctgaggcggcgagagatggtcaggtctggagctcgaccgggccaggtgttatcttcaggaaggcacactggacctgctaaattaacaaatggaaagaaagcgacctatttaagaaaaataccacgttttaatgcagattctggctattccatccattctgattcagaaagtcaggctgaaactgtacacgggcttgatggttgtgcttctttgctgagggacattttgagaaatgaagattcagcatcttcagataataagaaacagatacctaatgaagcttctgctagaagtgaaagagacacatcagacctagagcaaaactggtcattgcaagatcattatagaatgtattcacccataatataccaagccctctgtgagcacgtgcagactcagatgtcactgatgaatgacttgacttcaaagaacatccctaatggaattcctgctgtaccatgccatgctccctctcattctgaatctcaggcaactcctcattctagttatggcttatgtacctccaccccagtctggtcacttcagcggccaccctgccctccaaaggttcattctgaagttcaaactgatggcaacagtcagtttgcatcacaaggtaaaacagtttctgcaacctgtactgatgttctacggaattcatttaataccagtcctggagttccatgtagcctgcccaaaactgacatatcagctattccaacattgcagcaactgggccttgttaatggaattctgccacaacaaggaattcataaggaaacagacctactaaaatgtattcaaacatatttgtctctttttcgatctcatggaaaagaaacgcatctggacagtcagacacaccgaagccctactcagtcacaaccagctttcttggccactaatgaagaaaaatgtgccagagagcaaattagagaggccacaagtgaaagaaaggatttaaacatacatgtgcgagatacaaaaacagtgaaggatgtacagaaggcaaaaaatgtgaacaagacagctgaaaaagttagaattataaaatatttgttgggagagctcaaggccctggtagcagaacaagaggattcagaaattcagaggttgattacagaaatggaggcatgtatatctgtacttccaacagtaagtggaaacacagatattcaagttgagatagcactggccatgcaaccattaagaagtgagaatgctcagttacgaaggcagttgagaattttgaaccagcaactcagagaacaacagaaaactcaaaaaccatctggtgctgtggattgcaaccttgaattgttttctcttcagtcattgaatatgtcactgcaaaatcaattggaggagtcactaaagagccaggaattactgcagagtaaaaatgaagagctgttaaaagtgattgaaaatcagaaagatgaaaacaaaaaatttagtagtatatttaaagacaaagatcaaactatacttgaaaataaacagcaatatgatattgagataacaagaataaaaattgaattggaggaagccctagtcaatgtgaaaagctcccagtttaagttagaaactgctgaaaaggaaaaccagatattggggataacattacgtcagcgtgatgctgaggtgactcgactaagagaattaaccagaactttacagactagcatggcaaagcttctctccgatcttagtgtggacagtgctcgctgcaagcctgggaataaccttaccaaatcactcttgaacattcatgataaacaacttcaacatgacccagctcctgctcacacttccataatgagctatctaaataagttagaaacaaattacagttttacacattcagagccactttctacaattaaaaatgaggaaaccatagagccagacaaaacctatgaaaatgttctgtcctccagaggccctcaaaatagtaacactaggggcatggaggaagcatctgcacctggaattatttctgccctttcaaaacaggattctgatgaagggagtgaaactatggctttaatagaagatgagcataatttggataatacaatttacattccttttgctagaagcactcctgaaaagaaatcaccactttctaagagactatcccctcagccacaaataagagcagctacaacacagctagtcagcaacagcggacttgctgtctctggaaaagaaaataaactgtgtacacctgtaatctgttcctcttcaacaaaggaagcagaagatgcacctgaaaaactttccagagcatctgatatgaaggacacacagctcctcaagaaaataaaggaagcaattggtaagatccctgctgccaccaaggagccagaggaacaaactgcatgtcatggcccatcaggttgtcttagcaacagccttcaagtgaaaggcaatactgtctgtgatggtagtgttttcacttctgacttgatgtctgactggagcatctcttcgttttcaacgttcacttctcgtgatgaacaagacttcagaaatggccttgcggcattagatgccaacatagctagactccagaagtctttaaggactggtcttctggagaaatgaattcagaagaaaactcatcaggtgcttctttttaaaactagaacttggctatattgaatgtgtatttttctttagtgaaatgatgttttatgttattatgtgtgaagtaatatattgtacaagtaataaatgtattgttgagatatattgacactgaggagcttataaaaacaagtcatcttaagttcacaattgctacaagaagaaagttgtggataactaggaaattattgtaagtaatgttttatttcagtacttagcaattagagttcttttattaagatgtatctgctggattaagggtacaggttgaaatagttctgtggctgtcctaagaaataatgggaaaagaatctctggatgtaagtttttctgttgaaactagagggttttttttttctgtttacatatacttttttttaatagcaatgtgtttttattaaacatgctgtgtgccaca

SEQ ID NO: 120796 - DNA, 548 bp, Homo sapiens
  Payload ID: 3662
  Gene Symbol: CCDC14
  Gene Name: coiled-coil domain containing 14
  ENST ID: ENST00000417438
  CDS Start-End: 65-259
attgcgtacgcccaaggcgctgggcctggagcaggagaaagggagtggaggcgcgtcggagactatgaagcgcggcattcggcgggatcctttccggaagcggaagctcggcgggcgggccaagaaggtccgggagcccacggcggttaattctttttaccgtgaggcttcacttccctcggtctgggcttctctgaggcggcgagagatggtcaggtctggagctcgaccgggccaggttcagaaacagcatatttagaaaacagatctaattctagacctttagaaagcaaaagatacggatcaaaaaagaaaagacatgaaaaacatactattcctttggtagtccagaaagaaacatcatcttcagataataagaaacagatacctaatgaagcttctgctagaagtgaaagagacacatcagacctagagcaaaactggtcattgcaagatcattatagaatgtattcacccataatataccaagccctctgtgagcacgtgcagactcagatgtcactgatgaatgacttgacttcaaagaa

SEQ ID NO: 120797 - DNA, 1221 bp, Homo sapiens
  Payload ID: 3662
  Gene Symbol: CCDC14
  Gene Name: coiled-coil domain containing 14
  ENST ID: ENST00000419247
  CDS Start-End: 286-1221
ctaattactttcagaaagaatttgagatgattttctttagtaggggtgatagtggtaaagcccttctatgaagtatgtgatggattggactacttctgagagccctttcttctcttaaaatcttacggtaaaagtttttgaagaatcatatttcaagaacttttttcttcttccacattagcatcttcagataataagaaacagatacctaatgaagcttctgctagaagtgaaagagacacatcagacctagagcaaaactggtcattgcaagatcattatagaatgtattcacccataatataccaagccctctgtgagcacgtgcagactcagatgtcactgatgaatgacttgacttcaaagaacatccctaatggaattcctgctgtaccatgccatgctccctctcattctgaatctcaggcaactcctcattctagttatggcttatgtacctccaccccagtctggtcacttcagcggccaccctgccctccaaaggttcattctgaagttcaaactgatggcaacagtcagtttgcatcacaagaggattcagaaattcagaggttgattacagaaatggaggcatgtatatctgtacttccaacagtaagtggaaacacagatattcaagttgagatagcactggccatgcaaccattaagaagtgagaatgctcagttacgaaggcagttgagaattttgaaccagcaactcagagaacaacagaaaactcaaaaaccatctggtgctgtggattgcaaccttgaattgttttctcttcagtcattgaatatgtcactgcaaaatcaattggaggagtcactaaagagccaggaattactgcagagtaaaaatgaagagctgttaaaagtgattgaaaatcagaaagatgaaaacaaaaaatttagtagtatatttaaagacaaagatcaaactatacttgaaaataaacagcaatatgatattgagataacaagaataaaaattgaattggaggaagccctagtcaatgtgaaaagctcccagtttaagttagaaactgctgaaaaggaaaaccagatattggggataacattacgtcagcgtgatgctgaggtgactcgactaagagaattaaccagaagcactcctgaaaagaaatcaccactttctaagagactatcccctcagccacaaataagagcagctacaacacagctagtcagcaacagc

SEQ ID NO: 120798 - DNA, 864 bp, Homo sapiens
  Payload ID: 3662
  Gene Symbol: CCDC14
  Gene Name: coiled-coil domain containing 14
  ENST ID: ENST00000435910
  CDS Start-End: 1-112
ttaccgtgaggcttcacttccctcggtctgggcttctctgaggcggcgagagatggtcaggtctggagctcgaccgggccaggacctatttaagaaaaataccacgttttaatgcagattctggctattccatccattctgattcagaaagtcaggctgaaactgtacacgggcttgatggttgtgcttctttgctgagggacattttgagaaatgaagattcagcatcttcagataataagaaacagatacctaatgaagcttctgctagaagtgaaagagacacatcagacctagagcaaaactggtcattgcaagatcattatagaatgtattcacccataatataccaagccctctgtgagcacgtgcagactcagatgtcactgatgaatgacttgacttcaaagaacatccctaatggaattcctgctgtaccatgccatgctccctctcattctgaatctcaggcaactcctcattctagttatggcttatgtacctccaccccagtctggtcacttcagcggccaccctgccctccaaaggttcattctgaagttcaaactgatggcaacagtcagtttgcatcacaaggtaaaacagtttctgcaacctgtactgatgttctacggaattcatttaataccagtcctggagttccatgtagcctgcccaaaactgacatatcagctattccaacattgcagcaactgggccttgttaatggaattctgccacaacaaggaattcataaggaaacagacctactaaaatgtattcaaacatatttgtctctttttcgatctcatggaaaagaaacgcatctggacagtcagacacaccgaagccctactcagtcac

SEQ ID NO: 120799 - DNA, 735 bp, Homo sapiens
  Payload ID: 3662
  Gene Symbol: CCDC14
  Gene Name: coiled-coil domain containing 14
  ENST ID: ENST00000426152
  CDS Start-End: 214-735
ttgagaacatgaactgacaaggaacaaggtgaaggagtttgactggactttagggataatataactcccttaaaagaagtgttaaaatgaaggagagattttacaaatgcatcttcagataataagaaacagatacctaatgaagcttctgctagaagtgaaagagacacatcagacctagagcaaaactggtcattgcaagatcattatagaatgtattcacccataatataccaagccctctgtgagcacgtgcagactcagatgtcactgatgaatgacttgacttcaaagaacatccctaatggaattcctgctgtaccatgccatgctccctctcattctgaatctcaggcaactcctcattctagttatggcttatgtacctccaccccagtctggtcacttcagcggccaccctgccctccaaaggttcattctgaagttcaaactgatggcaacagtcagtttgcatcacaagaaacgcatctggacagtcagacacaccgaagccctactcagtcacaaccagctttcttggccactaatgaagaaaaatgtgccagagagcaaattagagaggccacaagtgaaagaaaggatttaaacatacatgtgcgagatacaaaaacagtgaaggatgtacagaaggcaaaaaatgtgaacaagacagctgaaaaagttagaattataaaatatttgttgggagagctcaaggccctggtagcagaacaa

SEQ ID NO: 120800 - DNA, 7917 bp, Homo sapiens
  Payload ID: 3662
  Gene Symbol: CCDC14
  Gene Name: coiled-coil domain containing 14
  Uniprot ID: Q49A88
  ENST ID: ENST00000485727
  CDS Start-End: 4594-6855
gaagcttgaagacattatgctaagtgaaataagccagtcacaaaagaacaaatattgtattatttcagttatataaagtttctagactagtcaaattcatagaaactaggatgatagttgctagggtcagggagaagaggggatggaaaggtattgtttaatggatgcagagtttcagtttgagaagatgaataaaagaaaaaaatgacattaaattttgtcaagatagcatattgaaaatataatagaaaaatatttgtttatctgctataatatattatgtcataggtgttatcttcaggaaggcacactggacctgctaaattaacaaatggaaagaaagcgtaagtacttgaagacgtttacaacttcagatttcaaggaatttttcaggtctttgggctggatgacatgtcgtctaccccagaaaattaggtaggcctctaccatcacaagctctgaggaacaatttttcatgtctacccatgttaatcattttagtatttaacagtctttctgatcttcagaatgtgtttataaattcatcttgtacatggttggacaagctttcttgtctttgctggaaagaaaatgactacttactaatatattttgggaaaaatatttgtaagaatattaataagcttgttttccaggacctatttaagaaaaataccacgttttaatgcagattctggctattccatccattctgattcagaaagtcaggtaagattgaatagatacaatacacactattttaattagttttcaaatagtagctaaaaagtaggaataaaatgcaaagtattaattgctctaaggaagtatgaagtctgttgctttaaaacatcttttctaccaataatagtttgtaaataaacaaattttaaaactacataatttatattttttcctacactaacagtcatatacaaatgtattctaaatgactttatttcttacaggctgaaactgtacacgggcttgatggttgtgcttctttgctgagggacattttgagaaatgaagattcaggttttttttttttaattctttgctgatcaccttatctcaagtcattattttgatgtaacaaatttttgttttattaataggttcagaaacagcatatttagaaaacagatctaattctagacctttagaaagcaaaagatacggatcaaaaaagaaaagacatgaaaaacatactattcctttggtagtccagaaagaaacatgtaagccttttttctcttagttatttaaagataatccttaattgtgggtattttgatcaattatcaggattatacagttgattttcattttaataatcagtattagttaggtttatgtgtgcttatgcctttctgtattcagcttctaatcactgagtagtccactttgcttgctatcattttctcaagaagaaaaatagaaaaagagactgtcagggttttgtaggagaaaaagttcaaactcagaatgacatttgggaggtatatagagtgatcttagtttcccctgccacttgttttcatagataatcataaattggttgtatttcaagtgtatacttctagtagttgctttaaaattattatatttatatatatatatatcctaagttggtcaagctgaacttgtcaagctacacagttaggatacatggtacataggaaggtaaaatcggatgaataaggaaaggctgctgctgattggtggtgagtatagccaagggtactttacaccctcacggctaacttttcctagtttagaacaagaaagttttgattatgttgtcccttggaggcctagaaaacaagatagcccaaaatgaagatgaaaaagtccacagtgggaattcagatggactagaattagactagccagttctatagttcaggtgggccagaaatgtcagcactgtagtacgtgcttagattcagcttgggcaaggaatgaagtttagaaagtcatataaagcagtagccctataaagagatcaggatttaagcaaggaggctgagaaagtgtcagtagagcattcatgggactagaggttgatgtttcagatagtcccaaggtagagaactaaggcaagggaaacctaactcatcttggaggccagtaatgatagctttatattatcttgacctgtgctattcaagatggtagccactggccacatgtggctattcagcacttgaaatgtgactagtacaaccaaggaattgaattttaatgttatttaatttaatttaatttaaaattaaattagaaaactgataattgatccagttattataaaacttttaagtatgtttggaataacttgggcatgtgaacctaccttttcaagtgtaaattttattaaatctaaatatagaccaagtatttctgatgagaatttagcatctagattgtgctttgtgtaaaatatatgctagatttagaagatttaatacaaaatttcagttatttatattatacactgaaatgttaatattttggatatattgatttaaatattatgaaaagtaattttacctattttatatggttactggaaatttcaagttacatatatggtttgtattatatttctattggacagcattggtctaagctcaatacactacagccagttttataagtaatgtttagttattttattgtgtaaataagattttattagaatgcagccaagctaatttattaatgtgtttttattagctgtttttgtgctgcagtgtcagagttgagtagttttgacagagatcatctggcctgctaaacctaaaatatttatttgacctttgaagaaagagtgctaaaccctggccttaactctttaaagcagaggcctttttattggggcccaactgagaaagaaaggagcggtagcacctgttcctccagtctcctactttttgtctgtaggcaggttatttcttatccagggcacctttcctcaaggaactattatttgcaatatatgtgactggcagtgggtgtcatggtatcaacttactggatcctgacttaactgcctctgtcggtcagagttccaacaagaaacagatggcaacactcaaattgaggtaattttaggagggtttatttacaaagggactcataaaggtatgaatagggtataggaaaaccacaggttttgcctactaggtcatgcgagcctagtgctagcagcagagcagcagagctgttatcatctctaggccataagggattaggagagagagaggttactggatctagaaagagatactgtttatagaatacgctaccttgagaagagcagtgagcttcattgaaatgacgaaggcagcccaaggtggccttatagaaagggagcaggaataagtgtatatcctgacttcatgcttcttcctttccttgatatgccaagactcccattggattgaacccaactgaagccctactgatgtatatcaggtctgggatttgactcttacaagctagtaagttagtcttactgtgtcatggatgctagcagaagacaagactgctgggtcagagacaaaggactttattactcacagcacaggaagcagtatgtgcatcagcatattgtgttggttctcattcaccctagttcccattggggtgatatggtggacccatatggatgctgcacatgccttaggtttaggttgcagctgaggaacactgagcttggggaatccgtcactttggtagtaagcagtaatcaagcctgtgcttgtcccagagggaaacattacctcatccttcaaggttgctcactgcagacacaaccctgagaagcggcccaggtaaggagtttaggtcaaagccttgcttttttggtatatacagcaagacatattgaaggactgtctttttgcagcccatatggatcagcattccagggagaccagggtgaagaccagtagaggtgggtttggattggcagatggaagattctggcattctgggtccatagcgttaaattcttatttggattacagccgaatcagcagttctggcctgtgatcagggtgcaatattcttattgttctttctcccatattttcttaatcagaaggaaggacctacttccacaggacaatcttctttagggttgcaatattagaaattagtttctagttgtgtgtgtgtgtggttggcagctgttaaccaataatacaagattttgctttgttaccacaatgctcaaaaatacacaaaatccaagctcataacttgttctctttaccgtctccaagtgaagtaatcataaagaactttaagcgatctattacagcatgttaactagtatccatgtattattttacttttaacacacattatcttgctattttgtgttaactgtcttctggggagtggcctccttatgtactttctatctgggatgatatgatcattgaatgcctacctgatcactgaatgcctatggagtcagcatcttcagataataagaaacagatacctaatgaagcttctgctagaagtgaaagagacacatcagacctagagcaaaactggtcattgcaagatcattatagaatgtattcacccataatataccaagccctctgtgagcacgtgcagactcagatgtcactgatgaatgacttgacttcaaagaacatccctaatggaattcctgctgtaccatgccatgctccctctcattctgaatctcaggcaactcctcattctagttatggcttatgtacctccaccccagtctggtcacttcagcggccaccctgccctccaaaggttcattctgaagttcaaactgatggcaacagtcagtttgcatcacaaggtaaaacagtttctgcaacctgtactgatgttctacggaattcatttaataccagtcctggagttccatgtagcctgcccaaaactgacatatcagctattccaacattgcagcaactgggccttgttaatggaattctgccacaacaaggaattcataaggaaacagacctactaaaatgtattcaaacatatttgtctctttttcgatctcatggaaaagaaacgcatctggacagtcagacacaccgaagccctactcagtcacaaccagctttcttggccactaatgaagaaaaatgtgccagagagcaaattagagaggccacaagtgaaagaaaggatttaaacatacatgtgcgagatacaaaaacagtgaaggatgtacagaaggcaaaaaatgtgaacaagacagctgaaaaagttagaattataaaatatttgttgggagagctcaaggccctggtagcagaacaagaggattcagaaattcagaggttgattacagaaatggaggcatgtatatctgtacttccaacagtaagtggaaacacagatattcaagttgagatagcactggccatgcaaccattaagaagtgagaatgctcagttacgaaggcagttgagaattttgaaccagcaactcagagaacaacagaaaactcaaaaaccatctggtgctgtggattgcaaccttgaattgttttctcttcagtcattgaatatgtcactgcaaaatcaattggaggagtcactaaagagccaggaattactgcagagtaaaaatgaagagctgttaaaagtgattgaaaatcagaaagatgaaaacaaaaaatttagtagtatatttaaagacaaagatcaaactatacttgaaaataaacagcaatatgatattgagataacaagaataaaaattgaattggaggaagccctagtcaatgtgaaaagctcccagtttaagttagaaactgctgaaaaggaaaaccagatattggggataacattacgtcagcgtgatgctgaggtgactcgactaagagaattaaccagaactttacagactagcatggcaaagcttctctccgatcttagtgtggacagtgctcgctgcaagcctgggaataaccttaccaaatcactcttgaacattcatgataaacaacttcaacatgacccagctcctgctcacacttccataatgagctatctaaataagttagaaacaaattacagttttacacattcagagccactttctacaattaaaaatgaggaaaccatagagccagacaaaacctatgaaaatgttctgtcctccagaggccctcaaaatagtaacactaggggcatggaggaagcatctgcacctggaattatttctgccctttcaaaacaggattctgatgaagggagtgaaactatggctttaatagaagatgagcataatttggataatacaatttacattccttttgctagaagcactcctgaaaagaaatcaccactttctaagagactatcccctcagccacaaataagagcagctacaacacagctagtcagcaacagcggacttgctgtctctggaaaagaaaataaactgtgtacacctgtaatctgttcctcttcaacaaaggaagcagaagatgcacctgaaaaactttccagagcatctgatatgaaggacacacagctcctcaagaaaataaaggaagcaattggtaagatccctgctgccaccaaggagccagaggaacaaactgcatgtcatggcccatcaggttgtcttagcaacagccttcaagtgaaaggcaatactgtctgtgatggtagtgttttcacttctgacttgatgtctgactggagcatctcttcgttttcaacgttcacttctcgtgatgaacaagacttcagaaatggccttgcggcattagatgccaacatagctagactccagaagtctttaaggactggtcttctggagaaatgaattcagaagaaaactcatcaggtgcttctttttaaaactagaacttggctatattgaatgtgtatttttctttagtgaaatgatgttttatgttattatgtgtgaagtaatatattgtacaagtaataaatgtattgttgagatatattgacactgaggagcttataaaaacaagtcatcttaagttcacaattgctacaagaagaaagttgtggataactaggaaattattgtaagtaatgttttatttcagtacttagcaattagagttcttttattaagatgtatctgctggattaagggtacaggttgaaatagttctgtggctgtcctaagaaataatgggaaaagaatctctggatgtaagtttttctgttgaaactagagggttttttttttctgtttacatatacttttttttaatagcaatgtgtttttattaaacatgctgtgtgccacaggccagtgttgttggtgaaatatataaacatttatttaaagagaaaagttaccagtatctacacctcttaaaaaacattgattggtctaaaaaatatatagataacatcctaagttaacatatggcttcttaaaacttgggcacttttatttgtttttatcccaaattcatgttttaaggcctttaaagaatagtcagactgataaagaagtgctaacagataagctatagttggggaaatttgtgggttttttttaaataagaaatgtttatttttgtccttatatttaaacatgatggaatttgtaaatcttggcattgattgtaattctgcctttttggaagaattttttctcccagcatgttagctgagaatattctctattttataaataatatgaagtaggttggtctctctgcttctctataccaggacttcttagctcagtatcatctcccttcatgtaagcagcacgttttaactcttaggaagctgaatgttgtgttatcactaatactttgtacaggtcacctgcctactctaattgtccttagtacttggacaggctttatcattaaagagtgttctcctaatcccagaa

SEQ ID NO: 120801 - DNA, 6476 bp, Homo sapiens
  Payload ID: 3662
  Gene Symbol: CCDC14
  Gene Name: coiled-coil domain containing 14
  Uniprot ID: Q49A88
  ENST ID: ENST00000489746
  CDS Start-End: 3163-5424
gacaaatactgcatgattttacttacataaagtacctaaatagttaaaactcatagaaacagaatgtgagcatggattgggcgtgaaccagagggatttttgttttttgggtttttttttgtaaagaacagtattgggataattggcaacatgtgaataaggtctgaatattagattgtaattctgtatcaatgttaatttcctggttttgataattatactgtggttatgttagagaatggccttgtttttaggaaacatttaggagtaaaggagtattgtatctgcaaacttaactctaatggttcaggcaaaaagtactgctgtgtatatatattgagagagaatatggaaaatgtcaaggttcacagaatctgagtgaagcatatatagggcatctttgtactattatttcatagtagaaactacaaaaaaaaattgaaaggaattgttccaatatgacagttactgtttcaaggtgcttttatcatgggtagttttctttaccagattttctataatatagccttgtgtatattttttggagaaacaccatatgtaatcttacagttatgccagacatatacctcagacagtgtactttaattgtggtagttgtttttggactcgatccagggtatagtattatagtgtcatggcttggattttttattatgattccagccaagacatcgacataaatataccaaagggaaggaccctgagagtgtgatgcagagaccagtggtgtgatgttatacaaggtcttatttcctacattgttggttctcactgctggcttcatgaccctccatcataatccaagttatctcaagacgtataactcttaccaacccagtttttaaaaaatgtattctcagtgacattcttagaaggatggagcacatattcaagcatataatagaatgccgtataactttagaaagtttggtagttacagctcaaagctatctggagatgaaattaaatatgtgaagagaaattataaataaaactgccaacagtgactacatctggagggtggaactagggggggaatcagggactttctcatgtctatttaaaattattttgaataaagattatatttatctgatataaaattattaagatataaaatagtataccatggaaagtgtcccttctcgctctgtcccccagatactctgtttccctccccagaggcaaccatgattaactgtttctggcataactcccaagatactggatgcatgtaaaagcaaatgcttattttttcctgtttttctacacaaaaggttgtccattattgtcacttttaaaacaaaaaagtttaagaaaacaacagtggtatatgaatttaaaaagaaaaattaagacagtgagatgtagataaagagacagggtagagttctcacttcctggtctaatcaggcattctaaagaatgtacataaaaggaaccagagttaagaactctgtcctatatcatgaattaacttgcatgtttcaaagaatttgggactatagaacatattttgggattaatatagtctgaacttagtgtagtagttacttctggtttaaaatagtatctcaatttccttttcaccttaaatagacttaaggaacaaatatatgtgtagtttgcttgacgttttacataaaagaaatttaatatatgaattaaattataattgtgtatttttaggatatatcacattaattaaaacagtgaataatgtggtacatacatataatggaatatatttgacctcaaaaaggaagaaaaattttgacacatgctacaatatagatgaagcttgaagacattatgctaagtgaaataagccagtcacaaaagaacaaatattgtattatttcagttatataaagtttctagactagtcaaattcatagaaactaggatgatagttgctagggtcagggagaagaggggatggaaaggtattgtttaatggatgcagagtttcagtttgagaagatgaataaaagaaaaaaatgacattaaattttgtcaagatagcatattgaaaatataatagaaaaatatttgtttatctgctataatatattatgtcataggtgttatcttcaggaaggcacactggacctgctaaattaacaaatggaaagaaagcgtaagtacttgaagacgtttacaacttcagatttcaaggaatttttcaggtctttgggctggatgacatgtcgtctaccccagaaaattaggtaggcctctaccatcacaagctctgaggaacaatttttcatgtctacccatgttaatcattttagtatttaacagtctttctgatcttcagaatgtgtttataaattcatcttgtacatggttggacaagctttcttgtctttgctggaaagaaaatgactacttactaatatattttgggaaaaatatttgtaagaatattaataagcttgttttccaggacctatttaagaaaaataccacgttttaatgcagattctggctattccatccattctgattcagaaagtcaggtaagattgaatagatacaatacacactattttaattagttttcaaatagtagctaaaaagtaggaataaaatgcaaagtattaattgctctaaggaagtatgaagtctgttgctttaaaacatcttttctaccaataatagtttgtaaataaacaaattttaaaactacataatttatattttttcctacactaacagtcatatacaaatgtattctaaatgactttatttcttacaggctgaaactgtacacgggcttgatggttgtgcttctttgctgagggacattttgagaaatgaagattcaggttttttttttttaattctttgctgatcaccttatctcaagtcattattttgatgtaacaaatttttgttttattaataggttcagaaacagcatatttagaaaacagatctaattctagacctttagaaagcaaaagatacggatcaaaaaagaaaagacatgaaaaacatactattcctttggtagtccagaaagaaacatcatcttcagataataagaaacagatacctaatgaagcttctgctagaagtgaaagagacacatcagacctagagcaaaactggtcattgcaagatcattatagaatgtattcacccataatataccaagccctctgtgagcacgtgcagactcagatgtcactgatgaatgacttgacttcaaagaacatccctaatggaattcctgctgtaccatgccatgctccctctcattctgaatctcaggcaactcctcattctagttatggcttatgtacctccaccccagtctggtcacttcagcggccaccctgccctccaaaggttcattctgaagttcaaactgatggcaacagtcagtttgcatcacaaggtaaaacagtttctgcaacctgtactgatgttctacggaattcatttaataccagtcctggagttccatgtagcctgcccaaaactgacatatcagctattccaacattgcagcaactgggccttgttaatggaattctgccacaacaaggaattcataaggaaacagacctactaaaatgtattcaaacatatttgtctctttttcgatctcatggaaaagaaacgcatctggacagtcagacacaccgaagccctactcagtcacaaccagctttcttggccactaatgaagaaaaatgtgccagagagcaaattagagaggccacaagtgaaagaaaggatttaaacatacatgtgcgagatacaaaaacagtgaaggatgtacagaaggcaaaaaatgtgaacaagacagctgaaaaagttagaattataaaatatttgttgggagagctcaaggccctggtagcagaacaagaggattcagaaattcagaggttgattacagaaatggaggcatgtatatctgtacttccaacagtaagtggaaacacagatattcaagttgagatagcactggccatgcaaccattaagaagtgagaatgctcagttacgaaggcagttgagaattttgaaccagcaactcagagaacaacagaaaactcaaaaaccatctggtgctgtggattgcaaccttgaattgttttctcttcagtcattgaatatgtcactgcaaaatcaattggaggagtcactaaagagccaggaattactgcagagtaaaaatgaagagctgttaaaagtgattgaaaatcagaaagatgaaaacaaaaaatttagtagtatatttaaagacaaagatcaaactatacttgaaaataaacagcaatatgatattgagataacaagaataaaaattgaattggaggaagccctagtcaatgtgaaaagctcccagtttaagttagaaactgctgaaaaggaaaaccagatattggggataacattacgtcagcgtgatgctgaggtgactcgactaagagaattaaccagaactttacagactagcatggcaaagcttctctccgatcttagtgtggacagtgctcgctgcaagcctgggaataaccttaccaaatcactcttgaacattcatgataaacaacttcaacatgacccagctcctgctcacacttccataatgagctatctaaataagttagaaacaaattacagttttacacattcagagccactttctacaattaaaaatgaggaaaccatagagccagacaaaacctatgaaaatgttctgtcctccagaggccctcaaaatagtaacactaggggcatggaggaagcatctgcacctggaattatttctgccctttcaaaacaggattctgatgaagggagtgaaactatggctttaatagaagatgagcataatttggataatacaatttacattccttttgctagaagcactcctgaaaagaaatcaccactttctaagagactatcccctcagccacaaataagagcagctacaacacagctagtcagcaacagcggacttgctgtctctggaaaagaaaataaactgtgtacacctgtaatctgttcctcttcaacaaaggaagcagaagatgcacctgaaaaactttccagagcatctgatatgaaggacacacagctcctcaagaaaataaaggaagcaattggtaagatccctgctgccaccaaggagccagaggaacaaactgcatgtcatggcccatcaggttgtcttagcaacagccttcaagtgaaaggcaatactgtctgtgatggtagtgttttcacttctgacttgatgtctgactggagcatctcttcgttttcaacgttcacttctcgtgatgaacaagacttcagaaatggccttgcggcattagatgccaacatagctagactccagaagtctttaaggactggtcttctggagaaatgaattcagaagaaaactcatcaggtgcttctttttaaaactagaacttggctatattgaatgtgtatttttctttagtgaaatgatgttttatgttattatgtgtgaagtaatatattgtacaagtaataaatgtattgttgagatatattgacactgaggagcttataaaaacaagtcatcttaagttcacaattgctacaagaagaaagttgtggataactaggaaattattgtaagtaatgttttatttcagtacttagcaattagagttcttttattaagatgtatctgctggattaagggtacaggttgaaatagttctgtggctgtcctaagaaataatgggaaaagaatctctggatgtaagtttttctgttgaaactagagggttttttttttctgtttacatatacttttttttaatagcaatgtgtttttattaaacatgctgtgtgccacaggccagtgttgttggtgaaatatataaacatttatttaaagagaaaagttaccagtatctacacctcttaaaaaacattgattggtctaaaaaatatatagataacatcctaagttaacatatggcttcttaaaacttgggcacttttatttgtttttatcccaaattcatgttttaaggcctttaaagaatagtcagactgataaagaagtgctaacagataagctatagttggggaaatttgtgggttttttttaaataagaaatgtttatttttgtccttatatttaaacatgatggaatttgtaaatcttggcattgattgtaattctgcctttttggaagaattttttctcccagcatgttagctgagaatattctctattttataaataatatgaagtaggttggtctctctgcttctctataccaggacttcttagctcagtatcatctcccttcatgtaagcagcacgttttaactcttaggaagctgaatgttgtgttatcactaatactttgtacaggtcacctgcctactctaattgtccttagtacttggacaggctttatcattaaagagtgttctcct

SEQ ID NO: 120802 - DNA, 4156 bp, Homo sapiens
  Payload ID: 3662
  Gene Symbol: CCDC14
  Gene Name: coiled-coil domain containing 14
  Uniprot ID: Q49A88
  ENST ID: ENST00000488653
  CDS Start-End: 92-2830
gacaagccgggaagcttggaggggtctattgcgtacgcccaaggcgctgggcctggagcaggagaaagggagtggaggcgcgtcggagactatgaagcgcggcattcggcgggatcctttccggaagcggaagctcggcgggcgggccaagaaggtccgggagcccacggcggttaattctttttaccgtgaggcttcacttccctcggtctgggcttctctgaggcggcgagagatggtcaggtctggagctcgaccgggccaggtgttatcttcaggaaggcacactggacctgctaaattaacaaatggaaagaaagcgacctatttaagaaaaataccacgttttaatgcagattctggctattccatccattctgattcagaaagtcaggctgaaactgtacacgggcttgatggttgtgcttctttgctgagggacattttgagaaatgaagattcagcatcttcagataataagaaacagatacctaatgaagcttctgctagaagtgaaagagacacatcagacctagagcaaaactggtcattgcaagatcattatagaatgtattcacccataatataccaagccctctgtgagcacgtgcagactcagatgtcactgatgaatgacttgacttcaaagaacatccctaatggaattcctgctgtaccatgccatgctccctctcattctgaatctcaggcaactcctcattctagttatggcttatgtacctccaccccagtctggtcacttcagcggccaccctgccctccaaaggttcattctgaagttcaaactgatggcaacagtcagtttgcatcacaaggtaaaacagtttctgcaacctgtactgatgttctacggaattcatttaataccagtcctggagttccatgtagcctgcccaaaactgacatatcagctattccaacattgcagcaactgggccttgttaatggaattctgccacaacaaggaattcataaggaaacagacctactaaaatgtattcaaacatatttgtctctttttcgatctcatggaaaagaaacgcatctggacagtcagacacaccgaagccctactcagtcacaaccagctttcttggccactaatgaagaaaaatgtgccagagagcaaattagagaggccacaagtgaaagaaaggatttaaacatacatgtgcgagatacaaaaacagtgaaggatgtacagaaggcaaaaaatgtgaacaagacagctgaaaaagttagaattataaaatatttgttgggagagctcaaggccctggtagcagaacaagaggattcagaaattcagaggttgattacagaaatggaggcatgtatatctgtacttccaacagtaagtggaaacacagatattcaagttgagatagcactggccatgcaaccattaagaagtgagaatgctcagttacgaaggcagttgagaattttgaaccagcaactcagagaacaacagaaaactcaaaaaccatctggtgctgtggattgcaaccttgaattgttttctcttcagtcattgaatatgtcactgcaaaatcaattggaggagtcactaaagagccaggaattactgcagagtaaaaatgaagagctgttaaaagtgattgaaaatcagaaagatgaaaacaaaaaatttagtagtatatttaaagacaaagatcaaactatacttgaaaataaacagcaatatgatattgagataacaagaataaaaattgaattggaggaagccctagtcaatgtgaaaagctcccagtttaagttagaaactgctgaaaaggaaaaccagatattggggataacattacgtcagcgtgatgctgaggtgactcgactaagagaattaaccagaactttacagactagcatggcaaagcttctctccgatcttagtgtggacagtgctcgctgcaagcctgggaataaccttaccaaatcactcttgaacattcatgataaacaacttcaacatgacccagctcctgctcacacttccataatgagctatctaaataagttagaaacaaattacagttttacacattcagagccactttctacaattaaaaatgaggaaaccatagagccagacaaaacctatgaaaatgttctgtcctccagaggccctcaaaatagtaacactaggggcatggaggaagcatctgcacctggaattatttctgccctttcaaaacaggattctgatgaagggagtgaaactatggctttaatagaagatgagcataatttggataatacaatttacattccttttgctagaagcactcctgaaaagaaatcaccactttctaagagactatcccctcagccacaaataagagcagctacaacacagctagtcagcaacagcggacttgctgtctctggaaaagaaaataaactgtgtacacctgtaatctgttcctcttcaacaaaggaagcagaagatgcacctgaaaaactttccagagcatctgatatgaaggacacacagctcctcaagaaaataaaggaagcaattggtaagatccctgctgccaccaaggagccagaggaacaaactgcatgtcatggcccatcaggttgtcttagcaacagccttcaagtgaaaggcaatactgtctgtgatggtagtgttttcacttctgacttgatgtctgactggagcatctcttcgttttcaacgttcacttctcgtgatgaacaagacttcagaaatggccttgcggcattagatgccaacatagctagactccagaagtctttaaggactggtcttctggagaaatgaattcagaagaaaactcatcaggtgcttctttttaaaactagaacttggctatattgaatgtgtatttttctttagtgaaatgatgttttatgttattatgtgtgaagtaatatattgtacaagtaataaatgtattgttgagatatattgacactgaggagcttataaaaacaagtcatcttaagttcacaattgctacaagaagaaagttgtggataactaggaaattattgtaagtaatgttttatttcagtacttagcaattagagttcttttattaagatgtatctgctggattaagggtacaggttgaaatagttctgtggctgtcctaagaaataatgggaaaagaatctctggatgtaagtttttctgttgaaactagagggttttttttttctgtttacatatacttttttttaatagcaatgtgtttttattaaacatgctgtgtgccacaggccagtgttgttggtgaaatatataaacatttatttaaagagaaaagttaccagtatctacacctcttaaaaaacattgattggtctaaaaaatatatagataacatcctaagttaacatatggcttcttaaaacttgggcacttttatttgtttttatcccaaattcatgttttaaggcctttaaagaatagtcagactgataaagaagtgctaacagataagctatagttggggaaatttgtgggttttttttaaataagaaatgtttatttttgtccttatatttaaacatgatggaatttgtaaatcttggcattgattgtaattctgcctttttggaagaattttttctcccagcatgttagctgagaatattctctattttataaataatatgaagtaggttggtctctctgcttctctataccaggacttcttagctcagtatcatctcccttcatgtaagcagcacgttttaactcttaggaagctgaatgttgtgttatcactaatactttgtacaggtcacctgcctactctaattgtccttagtacttggacaggctttatcattaaagagtgttctcctaatcccagaacctcctcgtgttttttgtttttttggtggttttttttttttttttaggtgttagtgctacagcgtttgaaggagccagctgtagtctctttgatatgttcagattttccagatagagatttaagtctaaaaatttattaagtgaattctaaactatttcacacaagagtccattagcatctttaattttatttagtattcatgaattaatttattggcatcttatttggaggtaataggccacaactctttaacaaataagttc

SEQ ID NO: 120803 - DNA, 770 bp, Homo sapiens
  Payload ID: 3662
  Gene Symbol: CCDC14
  Gene Name: coiled-coil domain containing 14
  ENST ID: ENST00000479903
  CDS Start-End: 1-770
agaaggcaaaaaatgtgaacaagacagctgaaaaagttagaattataaaatatttgttgggagagctcaaggccctggtagcagaacaagaggattcagaaattcagaggttgattacagaaatggaggcatgtatatctgtacttccaacagtaagtggaaacacagatattcaagttgagatagcactggccatgcaaccattaagaagtgagaatgctcagttacgaaggcagttgagaattttgaaccagcaactcagagaacaacagaaaactcaaaaaccatctggtgctgtggattgcaaccttgaattgttttctcttcagtcattgaatatgtcactgcaaaatcaattggaggagtcactaaagagccaggaattactgcagagtaaaaatgaagagctgttaaaagtgattgaaaatcagaaagatgaaaacaaaaaatttagtagtatatttaaagacaaagatcaaactatacttgaaaataaacagcaatatgatattgagataacaagaataaaaattgaattggaggaagccctagtcaatgtgaaaagctcccagtttaagttagaaactgctgaaaaggaaaaccagatattggggataacattacgtcagcgtgatgctgaggtgactcgactaagagaattaaccagactttttaaaactgtggacttaaatgttctgcaaagtcttacacaaaagcccaatacagtacatgaactacggaaaagcagaactgctctgaacaaggaagag

SEQ ID NO: 120804 - DNA, 1699 bp, Homo sapiens
  Payload ID: 3663
  Gene Symbol: CCDC140
  Gene Name: coiled-coil domain containing 140
  Uniprot ID: Q96MF4
  ENST ID: ENST00000295226
  CDS Start-End: 385-876
aagtgtgggcgcagccgggacaatttcgagacaacttcgagacaatttcgaatggacaaattgcggagaagttgcttctgccgctcagaagccggttcacctccttctccaccgcggcatttccaaaacaacagggacaagtctccccggctcgccgcaggcctgaccgcccagctccgccaggatttgcagagagcagcgcgctccatttgcagaaaggaaatcgagactggactccttctgactccacgcggccccagctcctgaaccagcgcagtgagcctcagccgcttctcaaactgggtctcagaaaatttctcctcgagatggatttcagcggcaggaaagaggggccagtgacgcgaggagcaagaaaagagtaacatgggagatgaatgttcaaacccagatctcctcgctgagcctggaagctcgccaccgtgggatcacgggaaccagaggcaagaggctgcgaatgagtccaacacccgcgttcctcgagttttaaaagcacacctggggccagagactgcacagccaactaaacggagtaaacgcaacaggtggaggaggcagagttgtcaggggccaagcccggcgcgatctggccagttcttggggagcgcggacctgggactgcagagaggcgttttgaagagtgctgcgcgcacctgcctctcggagatatccaactccacccgggcgtctcctgagagcgcacagtccacagaccccgggagggctgcccgccctaggacacgtactctcccgacccctcactctttcaaaattggggaagaggcggaggagatgaaaaagaagaaagagagaaagagaagaaaagagagaaagaaggaaagaaattttaaaaaataataaaaggagggaagaatggaggtaaaacgcgggggagagaagaggggagaaactctcctcaccacaaccaaagcaggaggcctaagcttcctgaatttctacacatgacttgcattaagttccttcctagaacttaaactttttcatctcccgtcacccaagaaaacacccatttcctcttttaaataaagtttctttttctggagatgaacctttaaataagtcgtacgtttgggagcgagggacaggagaataattttgatccagaaccttggagattggagaagcaggtggaaaaattctaaaaagatgaaaactgaccatctccgacacagaaacccatcgaaaggggccaccgagacccgttgattagctggagggagcatgcggcagaagtgcagacccctcgctaacccgccaacctccaagagccctcttgcagaaagctgcccggctccccacggtggccctgcgcgcgcaccatcctcgcggtctcgcttcttcgccccggaaaactctatgaggggcaccccagcctcagccgggttaagacaagtagccccaagaggaaggagcctcagagagcctttcttcctgttcttcttcgtcttcttttttttctaaacgaaatctaatactatctggctgcaaaaatatattatcaccggctctcagcctaagagactaacatttggatatgtaggaaatgtaatctgcatggctaattgattctcagcgtatcagtttaaaggataaagatcgatatctacatgatggatattgtattaataggggcataaataaaggtcgaagagtcgttacc

SEQ ID NO: 120805 - DNA, 441 bp, Homo sapiens
  Payload ID: 3663
  Gene Symbol: CCDC140
  Gene Name: coiled-coil domain containing 140
  ENST ID: ENST00000440903
  CDS Start-End: 391-441
ggaagataggaagagagaaggaaaataggaaaggaaaaagaaaagaggaaaagaagagagaggtacttttttttttaaaggcagtgagggagggagagaagaataaatctcacagcagctggtgtcctagttcatttgggtctgagaaaattatttttaggcaaacaaggaagacaggattccgccgcccgattctccagggcgggaagaataggatgtcttgtaaaaaataagactggactccttctgactccacgcggccccagctcctgaaccagcgcagtgagcctcagccgcttctcaaactgggtctcagaaaatttctcctcgagatggatttcagcggcaggaaagaggggccagtgacgcgaggagcaagaaaagagtaacatgggagatgaatgttcaaacccagatctcctcgctgagcctggaagctcg

SEQ ID NO: 120806 - DNA, 3795 bp, Homo sapiens
  Payload ID: 3664
  Gene Symbol: CCDC141
  Gene Name: coiled-coil domain containing 141
  ENST ID: ENST00000343876
  CDS Start-End: 1-2685
agatcgcaagtcctgcaaacttacgtggcatttctgaagtcatcagaggaggtagagatgcagtttcagagcttaaaagaattttatgaaaccgaaatccctcagaaggagcaggatgatgctaaagccaagcattgttctgactcggctgagaagcagtggcagctatttttaaagaagagttttataacacaagatctagggcttgagttccttaatttaataaatatggcaaaagagaacgagatattagatgtgaaaaatgaagtgtacctcatgaagaacaccatggaaaaccagaaagcagaacgggaagaacttagcctccttcggctggcatggcagcttaaagccacggaaagcaagcctggaaaacagcagtgggcggcattcaaagagcaacttaaaaagacttctcacaacttaaaacttcttcaggaagcacttatgcctgtgtctgcacttgacctcggagggagcctccagttcattttagatctacgacaaaaatggaatgacatgaagcctcagttccagcaattgaatgatgaggttcagtacattatgaaagaatcagaggagttaactggcagaggagcccctgtaaaagaaaagtctcaacaactgaaggaccttattcacttccatcaaaaacagaaagagagaatccaggattacgaggatatcctgtacaaggtggtccagttccatcaagtcaaggaagagctgggacgtctcatcaaatcaagagagctggagtttgtagagcagccgaaggaactgggtgatgcccatgatgtgcagattcacctccggtgctctcaggaaaagcaagcccgtgtagaccatctccacagactggccctttccttaggagtcgacatcatctcatcagtgcagcggcctcactgctctaatgtttctgcaaagaacctacagcagcagctggagctccttgaggaggacagcatgaagtggcgtgccaaagctgaggagtatggacggaccctgtcccgtagtgtggagtactgcgccatgagagacgagataaatgagctcaaagactcattcaaagatatcaaaaagaaattcaataatttgaagtttaattacactaagaaaaatgaaaaatctcggaatctgaaggcgcttaaatatcaaattcagcaagttgatatgtatgctgaaaaaatgcaggctttgaaaaggaaaatggaaaaagttagtaataaaacctctgattctttcttaaattatccaagtgataaagttaatgtccttttggaagtcatgaaggatttgcaaaaacatgtggatgactttgacaaagttgtgacagattacaagaagaatttggacctgactgagcatttccaggaggtgatagaagagtgtcatttttggtacgaagatgcaagtgccacagttgtaagagttggaaaatattccacagagtgcaagacaaaggaagctgtgaaaattctccaccagcagtttaataagtttattgcaccctcagtgccgcagcaagaagaaaggattcaggaggccactgaccttgctcagcacttatatggtttggaagaaggacagaaatatattgagaaaatagtgacaaaacacaaagaggttcttgaatctgtgactgaattatgtgagtccctcacagagctcgaagaaaaactgaagcagggagatgttttaaagatgaatccgaatttggaagacttccattatgattacattgacttgctaaaggaaccagcaaaaaataagcagacaatattcaatgaagaaaggaataaggggcaggtgcaggtggcagatcttttgggcatcaatggaacaggggaagagcgactaccacaagacctgaaggtgtccactgacaaggagggtggcgtccaggacctgctcctgcctgaagacatgctctcaggggaagaatatgagtgtgtctcacctgatgacatctccttgcctcctctcccaggaagccctgagtcccctcttgcaccatctgacatggaggtggaagagcctgtcagctcctccctcagccttcacataagcagctatggggtgcaggctgggaccagcagcccaggggatgcccaggaatctgttcttccaccacctgttgcctttgcggatgcatgcaatgataagagagaaacattttcaagtcattttgagaggccttacctccagttcaaagctgagcccccactaacctccagaggattcgtggaaaagagtactgccttacacagaatcagtgctgaacatccagagagcatgatgagtgaagtgcatgagagagctttacagcagcaccctcaggctcagggtggtttgctagaaacacgggagaaaatgcatgctgataataacttcactaaaacccaagataggctgcatgcttcctctgatgcattctcgggcctcaggtttcaatcaggcaccagcaggggctatcagaggcaaatggttcctcgagaagagattaaaagcacatcagcaaagagcagcgtggtcagcctagctgaccaggcacctaatttctccaggctcctgtctaatgtaactgtcatggaaggttctccagtgactttggaagttgaagtaacaggatttccagagcctacactgacatggtgggtagcctataatgacaagccataaatggaaacaaattcaatcacagagaaaaatcattctgtgagcactaactgaaaggtttagggctagctgattaatattctatgacactgcaactctgcatgattcaatctcacatcagacccctctcattttagtagcagcatagttaatacctttaagaaaaataaaaggtaaccatataaagtactaataatttaacaaatttccaaagcactgtaggttggttgtgcttgttttcttctgtgtttaacattccacatttctaaagattgtgggttgaaattattttttattgtctatttccatataagcatggcatctgcttgctttaactacctttatgcaattgaaaatataagaatttgtttttatttccctttactctcatttacctctttcatctttttcctctttccaacagagtcacacgtgtcatctttgtaacattttgttttactaggatttctttttacaaattttttcaatgtgagaggtggaatataaatatttctgtcacagttcctccaggtgacaggcaataaactcatttttgaaaggtagtataataactgagctgtaaacaatatgatttcactctggagacatcattattttttagcctctttttttcagtaaaagcaaactgtagaatactggttttggatcacctactattggtaacaaaagcagttctttctcaatatgtgggttacttttaaacatttagaaaattctcatccttaagtaaatttatttcaggacaaagttacaaatctgcaaaagccagtttatacttataaactaagattaagtaaaatagcatttattgatcacaatgtttcagtagatattaaatgatcagtttcagttattgtgtgtgcccattgatggtacttgaaatatgaaccagttatctaaggaacttatgagaaaactttggtttctcaaattatttaaaaaactgcacttgtgctatattagtgcagtcacttttgctttttgttttattgtctttactgttgcatgttttttacaaatcaagagtgtcatatttatgaattttaaagatatttaattcattattaaatctcagttcactccaaagaaaaa

SEQ ID NO: 120807 - DNA, 6960 bp, Homo sapiens
  Payload ID: 3664
  Gene Symbol: CCDC141
  Gene Name: coiled-coil domain containing 141
  ENST ID: ENST00000409284
  CDS Start-End: 119-2077
agtgtgagctgagctctttccctgaatgaatccaagtaaccctggccttctgaaatgaccagcagacacacaactgtccagaggctgcccaaagtataaactctggttctaaagtaccatgtccagccaaggaagtcctagtgttgcgctttctacgacgacagtcagttcagttgctgtgcaggctggggactccaaaatcgttatagctgtcataaagtgtggcaaatgggtacaacttcaactggctgaatcacagcccaatcttctagaaattggcagcagtcaagatgaaaccaaaaaacttcttcatgatcatgaacttcttttggccaagctcaaggctttggaagatcgggtatgggaactcttgcaggaagcagacaagacagctgaagagaacaaggatcagagtcaggtctatgatgccatggccgagactctgggtgaagcatgggcagctctggtgtccatgcttgaaagaagaacagagctccttaggttgacttctgaattttttgaaaatgccttagagtttgctattaaaatagaccaagctgaagatttcctccagaatactcatgagtttgagagtgctgagtccttaaaatcacttcttcagcttcatgaacatcatactaaagaactcttggaacggtctttagcccttttaaacaaaagtcaacaactcactgacttcatagaaaaattcaagtgtgaaggacctaatgtgaatcctgagttgactcagggagctcatagcagctgtctgaaggttgaccgccttcttgaacttctacaagacaggagaagacaactagacaagtacttgaagcaacagtggcaagaattgagtcaagttctgcagatatgtcagtgggaccaacaagaaaaccaggttacttgttggtttcagaaaactataagaaatttacaggaacaaagtctaggttcatcactttcagacaatgaggatcgaattcataagcaagaggaactgataataaaagcaaaggaatggaattctgctgttgagaagctgaagagtgaggcactgagaattctgctgtcaaaggactacgtggagaaagaacacctccagctctctcaccagaaactcagtcagcttcaagaagaatttggtcaactcatggtggaaaggaatacctggttaaagaaggcgaatgaattttttaacagtgctaacaaggcatttgatgtacttggaagagttgaagcttaccttaagctccttaaatcagagggtttaagtctggctgttttggcagtgaggcatgaggaattacacagaaaaattaaagactgcacaactgatgctttgcaaaagggacaaaccttaatcagccaagtagactcctgcagctctcaggtgtccggcatccatgagatgatggggtgcattaagagacgagtggatcatctgaccgaacagtgttcagcgcacaaggaatatgctcttaagaaacaacaactaacagcctcagtggagggttacctacggaaggtggaaatgtcaattcagaaaatcagtccagtactttctaatgcaatggatgttggttctacccgttctgaatcagagaagattttgaataaatatctggaactagatatccaagctaaggagacatcacatgaattagaagcagctgcaaaaaccatgatggagaaaaatgaatttgtatctgatgaaatggtatcactttcctctaaagctagatggctagcagaagaattaaacctatttggccaaagcattgactatagatcgcaagtcctgcaaacttacgtggcatttctgaagtcatcagaggaggtagagatgcagtttcagagcttaaaagaattttatgaaaccgaaatccctcagaaggagcaggatgatgctaaagccaagcattgttctgactcggctgagaagcagtggcagctatttttaaagaagagttttataacacaagatctagggcttgagttccttaatttaataaatatggtaagaatggcattaaatggatcacaccttctgcagggatactcatcaaagtcaaaataataatttcaaaggttcagctgtctattaatcagcagttctctcctagggagttctctttagcttcattcaacctagaccagtcctgaagcccaacatttaaatgcttgcttggcctagaactttggttagtttataacaggaaggctgttttaactattaagaagaaagtgactgtaatccaaatgcaacattgttattattaaatagagtcctcagaagtccacccaaaagttctgtgttattttgaaagcatgcaacaaggtcctttcaaaatttctaggggctaaagacaacttctaagatgaatcttcttttgaagagtttcttaccatagcagatctctttgtagtgaagatccattgcatttagaaaaataccctaacctttaactgtcttgaattatatctgtaaaatattttagaatccttatatccacccataacccatataaaattccctgtaggatacttaaaagatagtccacttctctttcaatacctcaagtattttcctaatgaaactgctcatttgattgttggagaatgccagctgctagaaaccttctttttttaatgttaaatatatctgtttccgtatctactcctaatcatctgtagctacacagggacaaaaagtattcatatttaatttctcttacacatgaaagtccttccaacattaaaaacagttgctatgtctgagttttttctgcagcattaaaaatcctttccatcatttatgaaggagctttatttttctttctatgctgatccccccttctcaggattttctatggtttgtcaagatcattcattaaatgtaaccaaaaagtgaactacaggtgcaacacagagtacagtaaactggacattattattcactaatgagacctacaattatgctaacatttttagcagtagtttcactttgctggtacatattaagcttgtgatagaacaaaactctcataatatttttattgcagcttctgtcaaaccatgtctctcccatattatacctgtgtcagccatttaccttttttatacaaatgtgggcctttatattttttcttatttaattttattttgttagtcttcacacatgatcccatcttgctaaactaatttgaacctacctagtatattagccatctgtcttgggtttaattctgtagatatgacaagtaagctttctatggcagcaattagttcttaaatataaatgcctaaagggcagattggcattccagttcatgaagcagtctattgattaaaccagtttttaaaataatcatgaatgctcccaatagtacttcattcagccgctacttcataatctttgtattaagtctataatgggagactttctcaaataaactgctcaaaagaaggtttacctacctagtatcttatcaatgacatagacaatttgacataaatcaggttggctcctagcgatcaaggcattctttccaaaatgctcacaaagtgcttgataagtaatgaacttattgcactgattttcagtgtgaagcttaccaatctgtaaattgtgtagtccatcctttcctccttttgaaaatcagggcattttctgttctctaattttatggctcttctagtttctgtagattttcaaagataactgacagctgcaattttctctgtacctgggatgtgattaatctcagtctggagcctgaattcatttggaagagttaggttctaactaccctcatctacttggagctgcaattttctctttatcttgtttcaacttttgttgtttgaagaccattcttgataaacctacttggaaataaaatatgcattagctgattctcatttattcaacatgattcttaagcactaaagaaaacttgctaagcaatttgcccatgttcctatgtgatctaggtgctttactgcaaaaaaaaagaaaagttatttttcgtttagaacatttagaacatgtattatctatctatctatctctgtctctctctcacacttctacgtggttcaatcagtcttctcccatctgttgatgatgtatgtttctgatttacctaagggaattcaaatactttcaaactgcgtaattttgtctacctttttattactaacttcatttcagaaattttagttctggaatctacagtcggtacttttatttattaaattactgatgaaattctgtttcttgtctgctcttttcccatctttccaatactttcttgaactatattaaccctaggcacttaaagtgttcatcagctagctacaacatttgtacctggagctctttctttctttctttcctttcttttcttttttttttagatggagtctcgctctgtcacccagactggagtgcagtggtgcgatctcagctccctttaacctccagctcctgggttcaagcaattctcatgcctcagtcccccgattagctggaattacaggtgcctgccaccatgcccggctaatacttgtatttttagtagagacgaggtttcaccatgttgaccaggctggtctcaaactcctgacttcaagtgatctgcccacctctgcctcccaaagtgctgggattacaggcatgaaccacagcgcccggccaatctggagctgtttctgttgtctaatttttctcttggtttccagtcctgtagtcctgtttcttggcagaactagcgaatatttatcaaatgccagacattatgtataaaaaattggaggatcagcagatggtgttttcttcttctagaaagggtcacccttctttctccaggcaggcattggtgggcaatcactcaagccaatcagaagctggcagagttgtgtttgcagtgtagtcctgtcccctcaggctcccagagttttgtattgagagccaagtgctttctctgacgtctctgcccctggcaggtcacaaactccaatctttgtttgggtagtctgctgaaaaactccactctgcttttcagaggccttttgcttaggttttttaatccactgcccgatatacccctggtattttgtcaacgtctttagaagatcattgtgcttgaagccctccaagtgtctgccaaaatctctggtgttttctcggctccagggaagtctcgattatcagcttcctgtctgcacagaattgggaaatccccctgggatgataggtgagctcacccctgtcaggttcttccctctctggagtcagcctctctagttccggttgtccgaccagttctctgcttccttcaaatggattccttctgcattttacccagcttttctaggtattctaagcaaaagcactgctctgccactggctaccccattctactcagaagtcctttgttacttatttagaatgtttaagattgtacagtcagatttttgtttttaaagatctgcaacaataacttattccaaattatattttgtatctatatctaaataaacttaggttatcataatattcaatgcccacttagatctcccagaaatagcatatattttactactgtgctttggtgttcttttatcttgatgtcataaacacggtcactctaccctaaggtctttaccactatcatatgataaataagttcctccttattgataaaattaaagcccacgtactaaggaaatttattggttagcaacatttggagagatgaaattgttggtaaagtaagtaaaacgattttttttattcttatatcttttggaccactaggcttttaaacaaacattattgttgaatcatggtgactagtttgcttgctaagaaggcagaggccagctggtatattcagttgagtgttctgttctttattgggttgtcgtggctcatattttcaagccagaaatagaaaaaatttcagttcatctaaaaatcattaagatcagagaaactgattcaggcccaaattatggcagacatcttgatgaaagtgctaatttattaatttataatggccaataccaagaatgctatctgggatacagccttcctattatcaaggtatctgaaaagcaagacatcagaaaaccattcatggtgcatgaatataaacgaaaaatgaatgctttagtggcctgtttagactggattatgacaaacattttccatgtcctacacagaagtaaaatgagtactgtgtttactaattagacctcaggcaaattattcaatcttcttgagtggccaaaatattcgtctgccaaatacatgatcacttttcacagatcctactagctagacatctacaaatcctactttagctctcctttctctagacctcactcagaccaccatatccttctgattaaagttgtcattggcatgctgcagtttcaaaatttatattaaattatataatacattacattctggttaatcatttctttaaaatatgtgaaagataattttatttatgataaaagtataatttggggtgaattctgctgtagttgtctaatatctttcataatttattatgtatcattattaataatgagggaatataacgttttattactagattcttaagttcatgggggaaatctcatttaggacctacagatatatatttttttggagttgccactttataatgtgtaaaataacataaaaatataagtgtgcaacatcaatatcatttaaaataattttaaaataaaatggcctatctttaaaatatcctgttaagtatttatgatactgtcaattgctgtcattgagatgatagaaatttgaagatttattgagaaagcctggctattaaagtaaaaaacataagaattgtttcgccaaatgaatgttcctgtgcattttttaaatgtttctacagaaataaagcacgcatagtctta

SEQ ID NO: 120808 - DNA, 2029 bp, Homo sapiens
  Payload ID: 3664
  Gene Symbol: CCDC141
  Gene Name: coiled-coil domain containing 141
  ENST ID: ENST00000446116
  CDS Start-End: 146-2029
ctgttctttccttttggcagagtaatcagtgtgagctgagctctttccctgaatgaatccaagtaaccctggccttctgaaatgaccagcagacacacaactgtccagaggctgcccaaagtataaactctggttctaaagtaccatgtccagccaaggaagtcctagtgttgcgctttctacgacgacagtcagttcagttgctgtgcaggctggggactccaaaatcgttatagctgtcataaagtgtggcaaatgggtacaacttcaactggctgaatcacagcccaatcttctagaaattggcagcagtcaagatgaaaccaaaaaacttcttcatgatcatgaacttcttttggccaagctcaaggctttggaagatcgggtatgggaactcttgcaggaagcagacaagacagctgaagagaacaaggatcagagtcaggtctatgatgccatggccgagactctgggtgaagcatgggcagctctggtgtccatgcttgaaagaagaacagagctccttaggttgacttctgaattttttgaaaatgccttagagtttgctattaaaatagaccaagctgaagatttcctccagaatactcatgagtttgagagtgctgagtccttaaaatcacttcttcagcttcatgaacatcatactaaagaactcttggaacggtctttagcccttttaaacaaaagtcaacaactcactgacttcatagaaaaattcaagtgtgaaggacctaatgtgaatcctgagttgactcagggagctcatagcagctgtctgaaggttgaccgccttcttgaacttctacaagacaggagaagacaactagacaagtacttgaagcaacagtggcaagaattgagtcaagttctgcagatatgtcagtgggaccaacaagaaaaccaggttacttgttggtttcagaaaactataagaaatttacaggaacaaagtctaggttcatcactttcagacaatgaggatcgaattcataagcaagaggaactgataataaaagcaaaggcatttgatgtacttggaagagttgaagcttaccttaagctccttaaatcagagggtttaagtctggctgttttggcagtgaggcatgaggaattacacagaaaaattaaagactgcacaactgatgctttgcaaaagggacaaaccttaatcagccaagtagactcctgcagctctcaggtgtccggcatccatgagatgatggggtgcattaagagacgagtggatcatctgaccgaacagtgttcagcgcacaaggaatatgctcttaagaaacaacaactaacagcctcagtggagggttacctacggaaggtggaaatgtcaattcagaaaatcagtccagtactttctaatgcaatggatgttggttctacccgttctgaatcagagaagattttgaataaatatctggaactagatatccaagctaaggagacatcacatgaattagaagcagctgcaaaaaccatgatggagaaaaatgaatttgtatctgatgaaatggtatcactttcctctaaagctagatggctagcagaagaattaaacctatttggccaaagcattgactatagatcgcaagtcctgcaaacttacgtggcatttctgaagtcatcagaggaggtagagatgcagtttcagagcttaaaagaattttatgaaaccgaaatccctcagaaggagcaggatgatgctaaagccaagcattgttctgactcggctgagaagcagtggcagctatttttaaagaagagttttataacacaagatctagggcttgagttccttaatttaataaatatggcaaaagagaacgagatattagatgtgaaaaatgaagtgtacctcatgaagaacaccatggaaaaccagaaagcagaacgggaagaacttagcctccttcggctggcatggcagcttaaagccacggaaagcaagcctggaaaacagcagtgggcggcattcaaagagcaacttaaaaag

SEQ ID NO: 120809 - DNA, 2987 bp, Homo sapiens
  Payload ID: 3664
  Gene Symbol: CCDC141
  Gene Name: coiled-coil domain containing 141
  ENST ID: ENST00000443758
  CDS Start-End: 123-2987
aatcagtgtgagctgagctctttccctgaatgaatccaagtaaccctggccttctgaaatgaccagcagacacacaactgtccagaggctgcccaaagtataaactctggttctaaagtaccatgtccagccaaggaagtcctagtgttgcgctttctacgacgacagtcagttcagttgctgtgcaggctggggactccaaaatcgttatagctgtcataaagtgtggcaaatgggtacaacttcaactggctgaatcacagcccaatcttctagaaattggcagcagtcaagatgaaaccaaaaaacttcttcatgatcatgaacttcttttggccaagctcaaggctttggaagatcgggtatgggaactcttgcaggaagcagacaagacagctgaagagaacaaggatcagagtcaggtctatgatgccatggccgagactctgggtgaagcatgggcagctctggtgtccatgcttgaaagaagaacagagctccttaggttgacttctgaattttttgaaaatgccttagagtttgctattaaaatagaccaagctgaagatttcctccagaatactcatgagtttgagagtgctgagtccttaaaatcacttcttcagcttcatgaacatcatactaaagaactcttggaacggtctttagcccttttaaacaaaagtcaacaactcactgacttcatagaaaaattcaagtgtgaaggacctaatgtgaatcctgagttgactcagggagctcatagcagctgtctgaaggttgaccgccttcttgaacttctacaagacaggagaagacaactagacaagtacttgaagcaacagtggcaagaattgagtcaagttctgcagatatgtcagtgggaccaacaagaaaaccaggttacttgttggtttcagaaaactataagaaatttacaggaacaaagtctaggttcatcactttcagacaatgaggatcgaattcataagcaagaggaactgataataaaagcaaaggaatggaattctgctgttgagaagctgaagagtgaggcactgagaattctgctgtcaaaggactacgtggagaaagaacacctccagctctctcaccagaaactcagtcagcttcaagaagaatttggtcaactcatggtggaaaggaatacctggttaaagaaggcgaatgaattttttaacagtgctaacaaggcatttgatgtacttggaagagttgaagcttaccttaagctccttaaatcagagggtttaagtctggctgttttggcagtgaggcatgaggaattacacagaaaaattaaagactgcacaactgatgctttgcaaaagggacaaaccttaatcagccaagtagactcctgcagctctcaggtgtccggcatccatgagatgatggggtgcattaagagacgagtggatcatctgaccgaacagtgttcagcgcacaaggaatatgctcttaagaaacaacaactaacagcctcagtggagggttacctacggaaggtggaaatgtcaattcagaaaatcagtccagtactttctaatgcaatggatgttggttctacccgttctgaatcagagaagattttgaataaatatctggaactagatatccaagctaaggagacatcacatgaattagaagcagctgcaaaaaccatgatggagaaaaatgaatttgtatctgatgaaatggtatcactttcctctaaagctagatggctagcagaagaattaaacctatttggccaaagcattgactatagatcgcaagtcctgcaaacttacgtggcatttctgaagtcatcagaggaggtagagatgcagtttcagagcttaaaagaattttatgaaaccgaaatccctcagaaggagcaggatgatgctaaagccaagcattgttctgactcggctgagaagcagtggcagctatttttaaagaagagttttataacacaagatctagggcttgagttccttaatttaataaatatggcaaaagagaacgagatattagatgtgaaaaatgaagtgtacctcatgaagaacaccatggaaaaccagaaagcagaacgggaagaacttagcctccttcggctggcatggcagcttaaagccacggaaagcaagcctggaaaacagcagtgggcggcattcaaagagcaacttaaaaagacttctcacaacttaaaacttcttcaggaagcacttatgcctgtgtctgcacttgacctcggagggagcctccagttcattttagatctacgacaaaaatggaatgacatgaagcctcagttccagcaattgaatgatgaggttcagtacattatgaaagaatcagaggagttaactggcagaggagcccctgtaaaagaaaagtctcaacaactgaaggaccttattcacttccatcaaaaacagaaagagagaatccaggattacgaggatatcctgtacaaggtggtccagttccatcaagtcaaggaagagctgggacgtctcatcaaatcaagagagctggagtttgtagagcagccgaaggaactgggtgatgcccatgatgtgcagattcacctccggtgctctcaggaaaagcaagcccgtgtagaccatctccacagactggccctttccttaggagtcgacatcatctcatcagtgcagcggcctcactgctctaatgtttctgcaaagaacctacagcagcagctggagctccttgaggaggacagcatgaagtggcgtgccaaagctgaggagtatggacggaccctgtcccgtagtgtggagtactgcgccatgagagacgagataaatgagctcaaagactcattcaaagatatcaaaaagaaattcaataatttgaagtttaattacactaagaaaaatgaaaaatctcggaatctgaaggcgcttaaatatcaaattcagcaagttgatatgtatgctgaaaaaatgcag

SEQ ID NO: 120810 - DNA, 9127 bp, Homo sapiens
  Payload ID: 3664
  Gene Symbol: CCDC141
  Gene Name: coiled-coil domain containing 141
  Uniprot ID: Q6ZP82
  ENST ID: ENST00000420890
  CDS Start-End: 119-4711
agtgtgagctgagctctttccctgaatgaatccaagtaaccctggccttctgaaatgaccagcagacacacaactgtccagaggctgcccaaagtataaactctggttctaaagtaccatgtccagccaaggaagtcctagtgttgcgctttctacgacgacagtcagttcagttgctgtgcaggctggggactccaaaatcgttatagctgtcataaagtgtggcaaatgggtacaacttcaactggctgaatcacagcccaatcttctagaaattggcagcagtcaagatgaaaccaaaaaacttcttcatgatcatgaacttcttttggccaagctcaaggctttggaagatcgggtatgggaactcttgcaggaagcagacaagacagctgaagagaacaaggatcagagtcaggtctatgatgccatggccgagactctgggtgaagcatgggcagctctggtgtccatgcttgaaagaagaacagagctccttaggttgacttctgaattttttgaaaatgccttagagtttgctattaaaatagaccaagctgaagatttcctccagaatactcatgagtttgagagtgctgagtccttaaaatcacttcttcagcttcatgaacatcatactaaagaactcttggaacggtctttagcccttttaaacaaaagtcaacaactcactgacttcatagaaaaattcaagtgtgaaggacctaatgtgaatcctgagttgactcagggagctcatagcagctgtctgaaggttgaccgccttcttgaacttctacaagacaggagaagacaactagacaagtacttgaagcaacagtggcaagaattgagtcaagttctgcagatatgtcagtgggaccaacaagaaaaccaggttacttgttggtttcagaaaactataagaaatttacaggaacaaagtctaggttcatcactttcagacaatgaggatcgaattcataagcaagaggaactgataataaaagcaaaggaatggaattctgctgttgagaagctgaagagtgaggcactgagaattctgctgtcaaaggactacgtggagaaagaacacctccagctctctcaccagaaactcagtcagcttcaagaagaatttggtcaactcatggtggaaaggaatacctggttaaagaaggcgaatgaattttttaacagtgctaacaaggcatttgatgtacttggaagagttgaagcttaccttaagctccttaaatcagagggtttaagtctggctgttttggcagtgaggcatgaggaattacacagaaaaattaaagactgcacaactgatgctttgcaaaagggacaaaccttaatcagccaagtagactcctgcagctctcaggtgtccggcatccatgagatgatggggtgcattaagagacgagtggatcatctgaccgaacagtgttcagcgcacaaggaatatgctcttaagaaacaacaactaacagcctcagtggagggttacctacggaaggtggaaatgtcaattcagaaaatcagtccagtactttctaatgcaatggatgttggttctacccgttctgaatcagagaagattttgaataaatatctggaactagatatccaagctaaggagacatcacatgaattagaagcagctgcaaaaaccatgatggagaaaaatgaatttgtatctgatgaaatggtatcactttcctctaaagctagatggctagcagaagaattaaacctatttggccaaagcattgactatagatcgcaagtcctgcaaacttacgtggcatttctgaagtcatcagaggaggtagagatgcagtttcagagcttaaaagaattttatgaaaccgaaatccctcagaaggagcaggatgatgctaaagccaagcattgttctgactcggctgagaagcagtggcagctatttttaaagaagagttttataacacaagatctagggcttgagttccttaatttaataaatatggcaaaagagaacgagatattagatgtgaaaaatgaagtgtacctcatgaagaacaccatggaaaaccagaaagcagaacgggaagaacttagcctccttcggctggcatggcagcttaaagccacggaaagcaagcctggaaaacagcagtgggcggcattcaaagagcaacttaaaaagacttctcacaacttaaaacttcttcaggaagcacttatgcctgtgtctgcacttgacctcggagggagcctccagttcattttagatctacgacaaaaatggaatgacatgaagcctcagttccagcaattgaatgatgaggttcagtacattatgaaagaatcagaggagttaactggcagaggagcccctgtaaaagaaaagtctcaacaactgaaggaccttattcacttccatcaaaaacagaaagagagaatccaggattacgaggatatcctgtacaaggtggtccagttccatcaagtcaaggaagagctgggacgtctcatcaaatcaagagagctggagtttgtagagcagccgaaggaactgggtgatgcccatgatgtgcagattcacctccggtgctctcaggaaaagcaagcccgtgtagaccatctccacagactggccctttccttaggagtcgacatcatctcatcagtgcagcggcctcactgctctaatgtttctgcaaagaacctacagcagcagctggagctccttgaggaggacagcatgaagtggcgtgccaaagctgaggagtatggacggaccctgtcccgtagtgtggagtactgcgccatgagagacgagataaatgagctcaaagactcattcaaagatatcaaaaagaaattcaataatttgaagtttaattacactaagaaaaatgaaaaatctcggaatctgaaggcgcttaaatatcaaattcagcaagttgatatgtatgctgaaaaaatgcaggctttgaaaaggaaaatggaaaaagttagtaataaaacctctgattctttcttaaattatccaagtgataaagttaatgtccttttggaagtcatgaaggatttgcaaaaacatgtggatgactttgacaaagttgtgacagattacaagaagaatttggacctgactgagcatttccaggaggtgatagaagagtgtcatttttggtacgaagatgcaagtgccacagttgtaagagttggaaaatattccacagagtgcaagacaaaggaagctgtgaaaattctccaccagcagtttaataagtttattgcaccctcagtgccgcagcaagaagaaaggattcaggaggccactgaccttgctcagcacttatatggtttggaagaaggacagaaatatattgagaaaatagtgacaaaacacaaagaggttcttgaatctgtgactgaattatgtgagtccctcacagagctcgaagaaaaactgaagcagggagatgttttaaagatgaatccgaatttggaagacttccattatgattacattgacttgctaaaggaaccagcaaaaaataagcagacaatattcaatgaagaaaggaataaggggcaggtgcaggtggcagatcttttgggcatcaatggaacaggggaagagcgactaccacaagacctgaaggtgtccactgacaaggagggtggcgtccaggacctgctcctgcctgaagacatgctctcaggggaagaatatgagtgtgtctcacctgatgacatctccttgcctcctctcccaggaagccctgagtcccctcttgcaccatctgacatggaggtggaagagcctgtcagctcctccctcagccttcacataagcagctatggggtgcaggctgggaccagcagcccaggggatgcccaggaatctgttcttccaccacctgttgcctttgcggatgcatgcaatgataagagagaaacattttcaagtcattttgagaggccttacctccagttcaaagctgagcccccactaacctccagaggattcgtggaaaagagtactgccttacacagaatcagtgctgaacatccagagagcatgatgagtgaagtgcatgagagagctttacagcagcaccctcaggctcagggtggtttgctagaaacacgggagaaaatgcatgctgataataacttcactaaaacccaagataggctgcatgcttcctctgatgcattctcgggcctcaggtttcaatcaggcaccagcaggggctatcagaggcaaatggttcctcgagaagagattaaaagcacatcagcaaagagcagcgtggtcagcctagctgaccaggcacctaatttctccaggctcctgtctaatgtaactgtcatggaaggttctccagtgactttggaagttgaagtaacaggatttccagagcctacactgacatggtacaagaagggccagaaattgtctgcagatgggcacttacaggttttacacaaggagacaaggcattcggtgttcattccaaaggtatgcaaggcagacgcaggcctctatgtggctcgggcccaaaactctagcggcgctctctcttccaatgtcatcctccacgtgacaggtaactgcaggctgccaatcacaagagtaaactggataaccctgtgtgtcgtctatgttagtgtgtccctaatgtactggctcctcacacaataactgtggtgttggcaccaatggacatcattctcatgtgcctaaagaaaagtgccgccgtttatcttcctgcacctcctgcaaagcatctcccaccaagtgtatctccagtctgatcaccatacttgtttggctaataccactgctaggtgaaataatcaaattttctggagcgtttaatatatttgagaagcttggtaaattatctgtagtggataagaacagatttttgtactctagaaacagatgttttcaacataatatgcagcaaaattattctatgcctattccctcctaatttaagggcgtgcagatgaaggctgacatcggcatagaaatgtgctaaatttcaaatatggttgttcaataatatatttttaattgtattttaaaacatccctttgtagggaatatcagtagaactattgaattgatgttgtatttttgcattagctgtcctttaattttgctttccatgtcttgatcttgttaccgaaatgcattctgtgtaatttcaacgtagactacgttcctgagtctgatgatgtcattgtaaataatcattcctcatgttgctctcacgggtttgacattggaggatagatgtgccatcaactttaaatagagtttccatcttttgtcagctctgcatgtcatacagcaagatggaacacaggttgcaagaaagaaccaacgttattcctgacattctattgatgtgttttgagcagcaatgtgtaaccaggtgtttctgcttctaatcttgattctgctgatgaccatttttatactttatggcaaagcctcattgcctcagtttcctgtctggaaaatgagttcatcatctacctcttgggcaattgagagttttcattttgtgtcttttaaacatctggaaaatggaaaacactgagggctaaggataatgatattgtttaatgtaatttgtcatcagaccggcctcctgctcactatttctttttttttagatgctgtttttttagaatattaaattaaaggagtgctgttaatatgtaatcttcaactagttccatggaggaaagtgatgttttatgaattagagcttaaattcctatctaatttctgaagactgcattcttttcaaagacttgaaattaaactcaggaggatacattttgtttgttctagggggaaacgtaatagaatggtatgagatgaattctatccttttacaataattattactataatattgaagtattctatgcctttctgaaacactttattcagaaaagatcattttttggcttccttttaaaaataagcttgaagtagggaagcatttgcttcttagattttaaatgtagtcttattatgctgaggaaaatctttagttgaaagaataattcattacagatttttgatgaagggaagaaattaattatgttgctggaagactgtctacaaataatcaaaatatttaaatgtaatgtattcaagttgttattaaaaagttactgaatgttatctgaagatgtgaaatgtgtagtcaagtaaaaagttggcgtatactttcttgggctgcatatccaatttaattaaaaaattaaatctcagtttccttctaaattttgatagaactatattaaaagcttgtatacacagcattctaggaaatttctcttaactatcttttttttgttttttttgttttttttttttttttttgagaaagagtcttgctctcttgcccagtgcagtggtgccatcttggctcactgcaacctccacctccgggttcaagcaattctcctgcttcagcctcctgagtagctaggattacaggcatgcctacctaatatttacatttttagtagaaaccaggtttcaccatgttggccaggctgggcctcagcctcccaaagtgccaggattacaggtatgagccaccatagccggcctcttgtatcctttttgtccaatttcaaataatgtgtgaatcttgcctaactgctgttgcccacgttgaagctaaagagtaaaaacctattcatgaacaaagaaggcaggtgagacccggtaacaaactgtctctcttcccactttctctttcttattaatttggcaggatctcccttcccattttgtcaacatggttgaatttgtgtgttggggttgttagggcatgggaattcctggtttgctttctctattgcatgcttgttcatgttaactctttggggagcagaatgagatacatatgcatccatggttatgatggaaaaaagcatgcaaaatccatttttagagagagagagaaagagaaaggtgggggtgggggagcacaaagatcagaagagtactatgctgatattcaagatatagtacagatagctttctgtgtacctatccatctacctattcatctgggctattgattgactcccacagcagtaaagaataattacgcagttattcttctggttatgttttaatttcaaaaagttaagtgtgattttcctttttgctgggatttctgtcttgagcaaataattattcttatgaaagtatcaattgcagttactggttaaaaatgtaagacctaggaaatttaagtgttgtttctattttaaggtatatacataatttataaccatttacttctagagaaaatcctgaatggttagtaatatcaaaacattttcaacaagaaaactaaaatgaaaagaaagtttaaaaattacatgtgttacagctcttttagaatttgtctagcaggttttctggtgaaaattaaactcaagattttcaccagaaaacgttttaaaacttctaaactcttaaacaaattataaatacttgatactttgaagaactgcaaaacaaaatgtttttaagttttcataaggcaaaatcattgagttttccagctttgattttccaataaaaggatgtataaatatttggtggtagtttttcacactcaattccaagagaaatttactgtaggaatctgtacatttgaatctctgaatattctatgatatttaaaatatttgaacaagatgcagaaaattttttagctatattaatcaataatggtaacctctatcactcataatcaagacacatacttaaaatagatgactacaagacccttctaactgctttgctcaaatttaaatttcctcaagtagttcatagaccctttacaacctggcctcccctctctggcctcggtttgatcccctcctattacccccaacccctagtaaagtgacatttaacttcagggttttaacatatcatgctcttctctccagccctttcttcctataactctcttactatcttcaccaccctatcttcatgtgacttaactcttgcttatgttccagttctgctgagacacaacttcccctgggaagcctcctgacccatcaagtccagagtagatggtcctgccatgtgcactgtcagcacctgcactgcccagccacgcccctgaatatacacaaaggaatcgcaggtttgagcatcagtctcctctggctaggctgtaagaaccttatcagcaggattcatgacagccctgttgtcattgtattgccagtacctaagacacagtcacactcagtaaactcttttgaattgaattgttgccaaaggtaaacaaagataaacctagcttgtttttctcccctttttagagggaggagaggggaaatgtaaaaagacaaagatgattctcccttcttatagacaggagtcaatccgaatcaggccctaacaatgaagcactcatgaaaatctctcacctcatctgcaaaacttgtgtgagaaccctccagaccctctgggctagaccctgattgaaaatttgaatttaaaaatagatgctggctccacggactaaaataatagtaaggaggaaagaggaaaggtccaggattgttgttcctggatcaatattgttccaacattttaaagtgttccaacattttaaaacatatgtacttaggcataaatcatcatccggtatgaggaactggatgcctccactctctatgactaaatccaaactgtcaaaaccagaatttatgtacttctttagaacactacgtaaatgatcaatatttaattgtagctggggctcagtagtctgggctgtgaacagatcttatttgaaaccagtatttcatacaaacttgtaaatataaagaaagccaaatccaagaacttaagagtatttgaattccaaatgaagaaaggaaagaatatcttattttgttctgctttatgtttgtctttattcatgaccatttcttactaaaaatcaccatctgaagcttttgaaactcctgttgtatgcacagcattttaagtgcagccatgaaataagttagttgaaacaaaataaaatatctccttccagta

SEQ ID NO: 120811 - DNA, 2835 bp, Homo sapiens
  Payload ID: 3665
  Gene Symbol: CCDC142
  Gene Name: coiled-coil domain containing 142
  Uniprot ID: Q17RM4
  ENST ID: ENST00000290418
  CDS Start-End: 160-2391
aagcctcccattacggagcacgagagagtccatgaaggtccccgcgactcccggactggagaaaacggctcttgcgatggggcgaagtccgagctgcggcgggcgttggtccgtgcagggaagtgggaatcgttaggttcgttctggacccgccgccccatggcccaggcgtctcgctcaggtagcctgcctccactcgttatcgtgcccccgctgagggcgcaacccgggggcactggggaggagcagtgggagagaagtcgaacgggcggtcttcgctgggaggttcactgctggccgagcggaacttctggagggacgccgtggtggccgacgccggcggatgtgagcgaggactacgaggctgatgctgcggcctggaggcgggggcccgcaggtggcggcccgatccctcccgcgctgcagcgtctccgggcggtgttgctgcggctgcatcgcgagcgggagcagctcctccaggcccgagactgcgcctaccacctacagtcggctgtgcgactcatgaagaccctgagtcctggctcgccatccggcggccctagccccttgccccagtggtgccgcgacctgcagctgcacccttcccaaggggcggttctgcgaatcggccctggggagactctcgagccgctgctgctagcgcgccccatcggactagccgcccagtgcctggaggctgtcatcgagatgcagcttcgcgctctcggccgggagcccgccagcccgggcctgtcgtcccaactcgccgagctgctctttgcacttcccgcctaccacacactacagagaaaagccttgagccacgtcccaggggccgcacgtcctttccccacgtcccgtgtgctccgcctcttgacgggggagcggggttgccaggtggcaagtcggctggacgaggcgctccaaggatcggcgttgagggaccagctccgcaggcggtgccaagaggagggggatctgctaccagggctgctgggcctggtcgggggcgtggcgggttcagccagctgtggactagggctcggaggggctggggccttgtggagccaatactggaccctgctgtgggcagcctgtgctcagagtctggacctaaatctgggaccctggagggaccccagggcaacagcgcaacagctgagtcaggcactgggtcaggcatccctgcctcaggagtgtgagaaggagctggcatctttgtgtcacagactacttcatcagtcgcttatctggagctgggaccaaggtttctgccaggccttgggatcagctcttgggggtcagagcagccttcccacatcctctggcactgctgaacttttgcagcagctctttcctcctctcttggatgcccttcgagagcccaggttacgacggattttctgccagcctgcaggtctctgtacccttcagaccaccttgctctggttcctgggcagagctcagcagtacttggcagcatgggacccagcttccttcctgctcctgatccaaaaggacttacctcctctgttgcatgaggcagaagctttgtatagcctggcctcagaggaaagcttagctctggaagtggagcagcagctgggcctggagatccagaagctgactgcacagatccagctcctgcctgaagagtcactaagtgtcttttctcaagaatgtcataaacaagccatgcaaggtttcaagctctacatgccacggggtcggtactggcggcttcgtctctgtcctgaacctcccagtgctcctagtgagtatgctggtttagtggtccgcaccgtactggagcctgtgttgcaaggattgcaagggttgccacctcaagcccaggcccctgcccttggtcaggctctgacggccatcgtgggtgcctggcttgaccacattcttacccatgggattcggttcagcctgcagggagcgctgcagctcaaacaagactttggagtggtcagggagttgctggaagaggagcagtggagcctgtcccctgatctccgccagaccctgctcatgctcagcatcttccagcagctggatggggccctgctgtgtctgttgcagcagcccctgcccaagtctcaagtccacaggaggcccccctgttgctgtgcttgtcaggaggtccagaccacgaaattgcccagcagctgcctcaatagcctggagagcttggagcccccgctccagcctggaacatctccagcccagacaggtcagctgcaaagcacactaggaggaaggggacctagcccggagggctacctggtgggaaatcagcaggcctggcttgccctcaggcaacaccagcgaccccgttggcacctgccgtttttttcctgcctgggaaccagtcctgaatcctaaggagcctgggaccaggagccagaaagttaagagctccccatctctagctggaaaatccagacatttggaattgcatattaaggaagcccagaactggaagcttggaggaaagcatactggagaataagctacaaagagcctgggcttaagaatccaagattaggggctgggcgaggtggctcacgcctgtaatccagcactttgggagaccgaggcaggcggatcatgaggtcaggagatcaagaccatcctggctaacacggtgaaaccctgtttccactaaaaatacaaaaaattagccgggcgtggtggcgggtgcctgtagtcccagctactcgggaggctgaggcaggagaatggtgtgaacctgggaggcggagcttgcagtgagctgagatccagccacagcactccagcctgggtgacagagcaagactctgtctc

SEQ ID NO: 120812 - DNA, 3406 bp, Homo sapiens
  Payload ID: 3665
  Gene Symbol: CCDC142
  Gene Name: coiled-coil domain containing 142
  Uniprot ID: Q17RM4
  ENST ID: ENST00000393965
  CDS Start-End: 398-2650
ctgcataaaatcctactcgaaacgttcagaccacaggtggacccaagaggggctgcctctgccctcctagacccccactggtcttgtcataccgctcacctagcttgatccgccccacagtctttggaatcggcgccatcgcatctacagtgacccggaaatgaaaggtagtctagtatttgataccagccaaagggcggggtgggacagagtgggcggccatgtttgttaggggcagaagcctcccattacggagcacgagagagtccatgaaggtccccgcgactcccggactggagaaaacggctcttgcgatggggcgaagtccgagctgcggcgggcgttggtccgtgcagggaagtgggaatcgttaggttcgttctggacccgccgccccatggcccaggcgtctcgctcaggtagcctgcctccactcgttatcgtgcccccgctgagggcgcaacccgggggcactggggaggagcagtgggagagaagtcgaacgggcggtcttcgctgggaggttcactgctggccgagcggaacttctggagggacgccgtggtggccgacgccggcggatgtgagcgaggactacgaggctgatgctgcggcctggaggcgggggcccgcaggtggcggcccgatccctcccgcgctgcagcgtctccgggcggtgttgctgcggctgcatcgcgagcgggagcagctcctccaggcccgagactgcgcctaccacctacagtcggctgtgcgactcatgaagaccctgagtcctggctcgccatccggcggccctagccccttgccccagtggtgccgcgacctgcagctgcacccttcccaaggggcggttctgcgaatcggccctggggagactctcgagccgctgctgctagcgcgccccatcggactagccgcccagtgcctggaggctgtcatcgagatgcagcttcgcgctctcggccgggagcccgccagcccgggcctgtcgtcccaactcgccgagctgctctttgcacttcccgcctaccacacactacagagaaaagccttgagccacgtcccaggggccgcacgtcctttccccacgtcccgtgtgctccgcctcttgacgggggagcggggttgccaggtggcaagtcggctggacgaggcgctccaaggatcggcgttgagggaccagctccgcaggcggtgccaagaggagggggatctgctaccagggctgctgggcctggtcgggggcgtggcgggttcagccagctgtggactagggctcggaggggctggggccttgtggagccaatactggaccctgctgtgggcagcctgtgctcagagtctggacctaaatctgggaccctggagggaccccagggcaacagcgcaacagctgagtcaggcactgggtcaggcatccctgcctcaggagtgtgagaaggagctggcatctttgtgtcacagactacttcatcagtcgcttatctggagctgggaccaaggtttctgccaggccttgggatcagctcttgggggtcagagcagccttcccacatcctctggcactgctgaacttttgcagcagctctttcctcctctcttggatgcccttcgagagcccaggttacgacggattttctgccagcctgcagatcctgcgcctgtcgccctaggtctctgtacccttcagaccaccttgctctggttcctgggcagagctcagcagtacttggcagcatgggacccagcttccttcctgctcctgatccaaaaggacttacctcctctgttgcatgaggcagaagctttgtatagcctggcctcagaggaaagcttagctctggaagtggagcagcagctgggcctggagatccagaagctgactgcacagatccagctcctgcctgaagagtcactaagtgtcttttctcaagaatgtcataaacaagccatgcaaggtttcaagctctacatgccacggggtcggtactggcggcttcgtctctgtcctgaacctcccagtgctcctagtgagtatgctggtttagtggtccgcaccgtactggagcctgtgttgcaaggattgcaagggttgccacctcaagcccaggcccctgcccttggtcaggctctgacggccatcgtgggtgcctggcttgaccacattcttacccatgggattcggttcagcctgcagggagcgctgcagctcaaacaagactttggagtggtcagggagttgctggaagaggagcagtggagcctgtcccctgatctccgccagaccctgctcatgctcagcatcttccagcagctggatggggccctgctgtgtctgttgcagcagcccctgcccaagtctcaagtccacaggaggcccccctgttgctgtgcttgtcaggaggtccagaccacgaaattgcccagcagctgcctcaatagcctggagagcttggagcccccgctccagcctggaacatctccagcccagacaggtcagctgcaaagcacactaggaggaaggggacctagcccggagggctacctggtgggaaatcagcaggcctggcttgccctcaggcaacaccagcgaccccgttggcacctgccgtttttttcctgcctgggaaccagtcctgaatcctaaggagcctgggaccaggagccagaaagttaagagctccccatctctagctggaaaatccagacatttggaattgcatattaaggaagcccagaactggaagcttggaggaaagcatactggagaataagctacaaagagcctgggcttaagaatccaagattaggggctgggcgaggtggctcacgcctgtaatccagcactttgggagaccgaggcaggcggatcatgaggtcaggagatcaagaccatcctggctaacacggtgaaaccctgtttccactaaaaatacaaaaaattagccgggcgtggtggcgggtgcctgtagtcccagctactcgggaggctgaggcaggagaatggtgtgaacctgggaggcggagcttgcagtgagctgagatccagccacagcactccagcctgggtgacagagcaagactctgtctcaaaaaaaaaaaaaaaaaaaatccaagattaggcagggcatggtggctcacacctataatcccagcactttgggaggctgaggcaggcggatcacctgaggtcgggagttccagaccagcctgaccaacatggagaaaccccgtctctactaaaaatacaaaattagccaggtgtggtggcgcatgcctgtaatcccagctactcaggaggctgaggcaggagaatcgcttgaacctaggaggcgaaggttgcggagagccgagattgtgccattgcactccagcctgggcaacaagggcaaaacttcgtctc

SEQ ID NO: 120813 - DNA, 2309 bp, Homo sapiens
  Payload ID: 3665
  Gene Symbol: CCDC142
  Gene Name: coiled-coil domain containing 142
  ENST ID: ENST00000454193
  CDS Start-End: 1-1703
atcgcgagcgggagcagctcctccaggcccgagactgcgcctaccacctacagtcggctgtgcgactcatgaagaccctgagtcctggctcgccatccggcggccctagccccttgccccagtggtgccgcgacctgcagctgcacccttcccaaggggcggttctgcgaatcggccctggggagactctcgagccgctgctgctagcgcgccccatcggactagccgcccagtgcctggaggctgtcatcgagatgcagcttcgcgctctcggccgggagcccgccagcccgggcctgtcgtcccaactcgccgagctgctctttgcacttcccgcctaccacacactacagagaaaagccttgagccacgtcccaggggccgcacgtcctttccccacgtcccgtgtgctccgcctcttgacgggggagcggggttgccaggtggcaagtcggctggacgaggcgctccaaggatcggcgttgagggaccagctccgcaggcggtgccaagaggagggggatctgctaccagggctgctgggcctggtcgggggcgtggcgggttcagccagctgtggactagggctcggaggggctggggccttgtggagccaatactggaccctgctgtgggcagcctgtgctcagagtctggacctaaatctgggaccctggagggaccccagggcaacagcgcaacagctgagtcaggcactgggtcaggcatccctgcctcaggagtgtgagaaggagctggcatctttgtgtcacagactacttcatcagtcgcttatctggagctgggaccaaggtttctgccaggccttgggatcagctcttgggggtcagagcagccttcccacatcctctggcactgctgaacttttgcagcagctctttcctcctctcttggatgcccttcgagagcccaggttacgacggattttctgccagcctgcagatcctgcgcctgtcgccctaggtctctgtacccttcagaccaccttgctctggttcctgggcagagctcagcagtacttggcagcatgggacccagcttccttcctgctcctgatccaaaaggacttacctcctctgttgcatgaggcagaagctttgtatagcctggcctcagaggaaagcttagctctggaagtggagcagcagctgggcctggagatccagaagctgactgcacagatccagctcctgcctgaagagtcactaagtgtcttttctcaagaatgtcataaacaagccatgcaaggtttcaagctctacatgccacggggtcggtactggcggcttcgtctctgtcctgaacctcccagtgctcctagtgagtatgctggtttagtggtccgcaccgtactggagcctgtgttgcaaggattgcaagggttgccacctcaagcccaggcccctgcccttggtcaggctctgacggccatcgtgggtgcctggcttgaccacattcttacccatgggattcggttcagcctgcagggagcgctgcagctcaaacaagactttggagtggtcagggagttgctggaagaggagcagtggagcctgtcccctgatctccgccagaccctgctcatgctcagcatcttccagcagctggatggggccctgctgtgtctgttgcagcagcccctgcccaagtctcaagtccacaggaggcccccctgttgctgaagcccagagctgcggttcgcaggcctgctaagcagccggcggccggaagtctatcccgcagaagcgcagccattcacggcctcacgcaatgcgacacttccgcctgcacgagttcttccggggcggaggtcaccatggcagctgccttggctcggcttggtctgcggcctgtcaaacaggttcgggttcagttctgtcccttcgagaaaaacgtggaatcgacgaggaccttcctgcagacggtgagcagtgagaaggtccgctccactaatctcaactgctcagtgattgcggacgtgaggcatgacggctccgagccctgcgtggacgtgctgttcggagacgggcatcgcctgattatgcgcggcgctcatctcaccgctctggaaatgctcaccgccttcgcctcccacatccgggccagggacgcggcgggcagcggggacaagccgggcgctgatactggtcgctgacagcgccaaagagaccaacaagatgattttagcgtggactaggacacttaacctaagaagagtttcacttaatcattcaaatcactatctgaagggtcacggagcgcaaaataaagtttaaaaccctgctacc

SEQ ID NO: 120814 - DNA, 2806 bp, Homo sapiens
  Payload ID: 3666
  Gene Symbol: CCDC144NL
  Gene Name: coiled-coil domain containing 144 family, N-terminal like
  Uniprot ID: Q6NUI1
  ENST ID: ENST00000327925
  CDS Start-End: 121-786
gcttggcgtggcagtgatcgcttggcttggcatttctggcttagcggtcctcctttcgcagattggaaaccgcgggctatcctgctgggaggttgtggccgaggcagtagctcgctactgatggcctcctggggtggagaaaagcggggaggggctggggggtctccgaagccggcagtctacgccacgaggaagacccctagtgttgggagccaggaggaccagtggtacttggactacccgggggaccagtggtccttgggcttctcctacagctggtggaagaacagcgtcggcagcgagagcaagcacggtgagggcgccttagaccagctccagcacgatgtccgcctggaagatcttggcgagctccacagagctgcccggtcgggcgacgtccctggggtggagcacgtcttggctcctggagacactggcgtggacaagagggataggaagaagagcattcagcaactagttcctgaatataaggaaaaacagacacctgaaagtcttcctcaaaataacaatccagctgctccaagccaggctgaaggaggagaaggaggagtcgcctgtggtacggtggagcagatgacgtggctctgcagcttgcctcatgcagttggtggtggagatggagaccacagctcgactggagcggtaggagggcacccacgggggcctggagagtattgtcatctgcatgagcaaagggttcatcaccacatctttgcaagaggaaaaagaaaggggaagaatcatgtgtctaatgttgtaaggtaaacattcacaaccaaaaacaaggttttattaacttttgcctttaagaacctgcagtgtttagccctctttgattcctagtattattacctttggtatgaactcttttattaaactgatcactctagaggtttatgcattttgtatcatttttcaagccaacagaaatgtgtaatgcctataattctgacactttagttatttttaaggctatgagcatgtaagatactgttggaagaatatgtataaataccactaggtagcttattttgaagagatagtatctaaatttttgtccagagtagattggttgcagtttcttaggtgtgtttcttaatacgttgcctcaatgttttaaagcatgtagaaatttgaatacagtttaacttcatatagtcctttgtttatagatttaatatttctaaagactaaagacatcacagctccctttaagattcagtaatattaataaaattttagaaatatagggttagaatccaacaaattcagaggaaaattgttaaattctatagctgtagagcagaaatgaaacccaggttctaagctctaagggggccatgaggtaccatacaggtgcatcagtgactgggcatagattcagcaaaattacaggatggttaagagagtgagctgtggagccaaactctatgtaacatgaatttttaaactgcctggtgcctcagtttatccatctttacagtggggactgtagtaagtttttctttttctgctcagttgtctgtcttgttgccactgttccctagtctgtcttgttgccactcagtgcccacatgagaggatctacggtaatttctgacagcctgggactccttaaagaaaaacagaaggtgctacaaaacccattttaggagaaacctctgttgtcctcatggaaccccaagaacttcaggcagacaggtctctctcaaaatctaaggctctcctctgttttgttttgcgttatctgaccttttaggtttggttgggcatcagaaatcagtcggggagagagatctaaagaaagttgtggatatgaagatgtatttatggtaaaaaagttatgaaggaaagaaatgttatatgagagaggatcttgtatggcaaattcttgtcctaaagtagaatgactaattatgaaagagggaaatacaggaaaagtcagaaagttcatgtcatagatggtctgtggaagttgtgctagggttcataaaatgagaaagaaaaacttacaactgctagatcttctcctgtctagaagtgttgtgtatgtgttggatatgtaaaggagccctaattacttggcttagaagaaaaggacggctcttaaatattttgtcagaaaaatagaatctccaatgccttttatttcacatgacttcagtaatctttgggaaataaagacagtgttaaaatcattggtaaaaaaaatcatcaaaatttatccattttgtctaatttaagtcagaggttaaattttagaagtgctttaacgtcataaattgattgactttggaaaattgttctgtttacctggtttggagctgctcaacttctaggtaaggcctgggggacaggtggagttagccatgtctcctagctatgctggaaagagtcagactttacctgcagttctgtcttgtatcctatacactgcacctggtacgttattaaaacttcctgctgcttctaatctctgagttccactttaaatttttccatcacttgaatactatcctctgtactaaatttttccgcaattaaatacttagaatcatttttgcccacttgacccaagcattagtgatatatctttaaaatacttataatgtgtcacaatatatttagcaaatgtagcgaatggcatttttacttttgtcagcatttacatagcatttagcaatgctatctcaagtatttttagtcatttgaatgttacataatatgcttttcctttgtttctatgtaaataaataggagatattcaataaatagtatcaattaa

SEQ ID NO: 120815 - DNA, 2214 bp, Homo sapiens
  Payload ID: 3667
  Gene Symbol: CCDC144A
  Gene Name: coiled-coil domain containing 144A
  ENST ID: ENST00000340621
  CDS Start-End: 170-1885
cttacccacgaggctttgcggtggctgttggcttggcggtggtcgcttggcttggcgtggcagtgatcgcttggcttggcatttctggcttggcggtcctcctttcgcagattggaaaccgcgggctatcctgctgggaggttgtggccgaggcagtagctcgctactgatggcctcctggggtggagaaaagcggggaggggctgaggggtctccgaagccggcagtctacgccacgaggaagacccctagcgtcgggagccagggggaccagtggtacttgggctacccgggggaccagtggtcctcgggcttcccctacagctggtggaaaaacagcgtcggcagcgagagcaagcacggtgagggcgccttagaccagccccagcacgacgtccgcctggaagatcttggcgagctccacagagctgcccggtcgggcgacgtccctggggtggagcacatcttagctcctggagacactggcgtggacaagagggataggaagaagagcattcagcaactagttcctgaatataaggaaaaacagacacctgaaagtcttcctcaaaataacaatccagattggcatcctactaatttgacccttagtgatgagacttgtcagagatccaagaatctgaaagttgatgataaatgtccatctgtatcaccatcaatgcctgaaaatcagtcagcaaccaaagaactgggacagatgaacttaacagaacgagaaaagatggacactggagttgtacttctctcagggaatgatactctccatgacctgtgccaatcacagctaccagaaaacaaagagagcaaagaagaacaagactcggagctgacatcagaggaagagcaagaaagacttaaaggatgcgaaaataagcagccacagaaaacgtctcaagaaccagaaatggctaaggattgcgatagagaggatatacctatatatccagtacttcctcatgtgcaaaaatctgaggaaatgtggattgaacaaggcaaattagagtggaaaaaccaattaaaactcgtcataaatgagttaaagcagaggtttggtgaaatttatgaaaaatacaaaattccggcttgtcctgaggaagagccactacttgataactctacaagaggaacagatgtaaaggatattccctttaatttgacaaataacatacctggttgtgaggaagaagatgcatctgaaatatctgtctcagtggtattcgagacatttcctgaacaaaaagaacccagtctcaaaaatatcatccatccatactatcatccatactctgggtcccaggaacatgtttgccagtcatcttctaagtttcatttacatgaaaataaattagactgcgacaatgataacaaaccaggcattggacatatttttagtacagataagaactttcataatgatgcaagcactaagaaagcaaggaacccagaagtggttatggttgaaatgaaagaagaccaagagtttgatttgcaaatgacaaaaaatatgaaccaaaatagtgacagtggcagtacaaacaactataaaagcctgaaacctaaattagaaaatctgagttctttaccaccagattctgacagaacatcagaagtatatctacatgaagaattacagcaagacatgcaaaagtttaagaatgaggtcaacacattagaagaagagttcctggctttgaagaaagaagatgttcaacttcataaagatgttgaagaagaaatggagaagcacagaagtaatagcacagaattatcaggaaccctaactgatggtactactgttggcaatgatgatgatggactaaatcagcagattcctaggaaggaaaatggagagcatgacaggtaagcctatagcagcgtttaacaggagacaattggtcaagcgtggtggctcacgcctgtaatccagcaatttgggaggccaaggcgggtgaatcacctgaggtcaggagttcaagaccagcctgaccaacatggataaaccccatctctactaaaaatacaaaattagccagatgtagtggtgcatgcctgtaatcccagttactcaggaggctgaggcaagagaatcatttgaacctgggaggcgggggttgtggtgagctgtgatcatgccattgcactcgagcctgggcaacaagagtaaaactccatttcaaaaaaaaaaagcaaaaa

SEQ ID NO: 120816 - DNA, 5545 bp, Homo sapiens
  Payload ID: 3667
  Gene Symbol: CCDC144A
  Gene Name: coiled-coil domain containing 144A
  ENST ID: ENST00000360495
  CDS Start-End: 77-2257
cggtcctcctttcgcagattggaaaccgcgggctatcctgctgggaggttgtggccgaggcagtagctcgctactgatggcctcctggggtggagaaaagcggggaggggctgaggggtctccgaagccggcagtctacgccacgaggaagacccctagcgtcgggagccagggggaccagtggtacttgggctacccgggggaccagtggtcctcgggcttcccctacagctggtggaaaaacagcgtcggcagcgagagcaagcacggtgagggcgccttagaccagccccagcacgacgtccgcctggaagatcttggcgagctccacagagctgcccggtcgggcgacgtccctggggtggagcacatcttagctcctggagacactggcgtggacaagagggataggaagaagagcattcagcaactagttcctgaatataaggaaaaacagacacctgaaagtcttcctcaaaataacaatccagattggcatcctactaatttgacccttagtgatgagacttgtcagagatccaagaatctgaaagttgatgataaatgtccatctgtatcaccatcaatgcctgaaaatcagtcagcaaccaaagaactgggacagatgaacttaacagaacgagaaaagatggacactggagttgtacttctctcagggaatgatactctccatgacctgtgccaatcacagctaccagaaaacaaagagagcaaagaagcagaacaagactcggagctgacatcagaggaagagcaagaaagacttaaaggatgcgaaaataagcagccacagaaaacgtctcaagaaccagaaatggctaaggattgcgatagagaggatatacctatatatccagtacttcctcatgtgcaaaaatctgaggaaatgtggattgaacaaggcaaattagagtggaaaaaccaattaaaactcgtcataaatgagttaaagcagaggtttggtgaaatttatgaaaaatacaaaattccggcttgtcctgaggaagagccactacttgataactctacaagaggaacagatgtaaaggatattccctttaatttgacaaataacatacctggttgtgaggaagaagatgcatctgaaatatctgtctcagtggtattcgagacatttcctgaacaaaaagaacccagtctcaaaaatatcatccatccatactatcatccatactctgggtcccaggaacatgtttgccagtcatcttctaagtttcatttacatgaaaataaattagactgcgacaatgataacaaaccaggcattggacatatttttagtacagataagaactttcataatgatgcaagcactaagaaagcaaggaacccagaagtggttatggttgaaatgaaagaagaccaagagtttgatttgcaaatgacaaaaaatatgaaccaaaatagtgacagtggcagtacaaacaactataaaagcctgaaacctaaattagaaaatctgagttctttaccaccagattctgacagaacatcagaagtatatctacatgaagaattacagcaagacatgcaaaagtttaagaatgaggtcaacacattagaagaagagttcctggctttgaagaaagaagatgttcaacttcataaagatgttgaagaagaaatggagaagcacagaagtaatagcacagaattatcaggaaccctaactgatggtactactgttggcaatgatgatgatggactaaatcagcagattcctaggaaggaaaatggagagcatgacaggcctgcagataaaacatctaatgaaaagaacgaggtcaaaaaccaaatatatcctgaggctgactttgctgactcaatggagccatctgaaatagcctcagaggattgtgaattgtctcactctgtttatgagaattttatgttgctgattgaacaacttagaatggagtataaagattctgctagcctaccaagaatccaagacacattttgtttgtgtgaacacttactgaaacttaagaataatcactgtgaccaacttacagtaaaacttaaacaaatggaaaatatggtcagtgtactacaaaatgagctatctgaaacaaaaaagacaaaattacagttagaacttcaaaaaattgaatgggagaaagagctgtacgatttgagatttctcataggcatcagaaagaaaaggatctctttcatgaagattgcatgttgcaggaagaaattgccttgctgagactggaaatagatacaataaaaaatcagaacaagcaaaaggaaaagaaatattttgaggacattgaggctgtgaaagaaaagaatgataaccttcaaaaaattataaaactaaatgaggaaacattaacagaaacaatactccagtacagtggacagctgaacaatctgacagctgagaacaaaatactcaattctgaactggagaatgggaaacagaaccaagaaagactagaaatagaaatggaatcataccgttgtagactagctgctgctgtacgtgactgtgatcaaagtcagacagcaagagacctaaaacttgatttccagagaacaagacaagagtgggttcgtttacatgacaaaatgaaggttgatatgtctggcctacaagctaagaatgagattctttctgaaaaactttctaatgctgaaagtaaaattaacagcctacaaattcagctccataacacaagagatgctcttggaagagagagtttgattttggaacgtgtgcaaagagacctcagccaaacacagtgtcagaagaaagaaactgaacaaatgtaccaaattgaacaaagcaaactgaagaaatacattgccaagcaggaatctgtagaggagagattatctcaactacaaagtgaaaatatgttgcttcgacagcaactggatgatgctcacaagaaagctaacagtcaagaaaagacaagcagtactatccaagaccagtttcattctgctgccaaaaatcttcaagctgagagtgaaaagcagattctttcactacaagagaagaacaaggagctgatggatgaatataatcatttaaaagaaagaatggatcaatgtgagaaagagaaagcaggaagaaaagtagttatgagagaattccaacaagaatggaccgatctcctaaaacaacaacctacgtcagaggctacctcacgttgtcacattaatttagatgagacacaggattcaaagaagaaattgggtcaaatcagaagtgaaattgaccttacagaagcacaggaaactgtaccttcacgatgtctacatctggatgcagagaatgaagttcttcaacttcaacagacattattctctatgaaagcaatacaaaagcaatgtgaaacactacagaagaataagaagcagctgaaacaagaagtagtaaacctcaaaagttatatggaaagaaatatgttagaacgtggtaaagctgaatggcataaactgttgattgaagaaagagcaaggaaggagatagaagaaaaattaaacgaagccattctcaccttgcagaaacaagcagcagtatctcatgaacagttagtacagttaagggaggataatactacttcaataaaaactcagatggaactcacaatcaaagatctggaatctgaaatctccagaataaaaacttcgcaagccgactttaataaaaccgaattggaaagatataaggaactctacctagaagaagtgaaagttagagaatccttgtcaaatgaactcagtagaactaatgagatgatagcagaggtcagtacgcaacttactgtggagaaagagcagaccagatccagatctctattcactgcttatgctacaaggccagtcctagagtcaccttgcgttggaaatcttaatgatagtgaaggtctcaacagaaaacatattccaagaaaaaagaggtctgctcttaaggacatggagagctacttgttgaagatgcagcagaagttgcaaaatgatctaactgcagaagtagcagctgctactaaatatgaacctggatcctatatagcttctcctctaggatttacacacaaggaaaatctgaatcaagatccagttttggaagtaacaaaagaatatgcacagattttaagaagaaaatacatactctgaaagataaggcaattttatttgggctattcacatgatattttgtttcccattaaatatatgatgtgaacatttttactaaagggaaatattctatattatacatgtctgatgaaaatttatatagtattttaaataatgtttcttggcctcttcagctaacttttaagtggattttgcaaatgaaaaccagtattactgagttttacatactcgaactgcccaaatgtttgctgtttaaacagccaaataatcaagttgccattagtaatttagtggagccaattgatggcttgtttgtattttataattttatctttatacatagtgatagatttaagtttagatagacatcattttggtatactggtactgtggtcattgtcaatgtttggatgtattacgattgttatagtgcaatcaaacttagataattttaattttaagcactgatttatttagatctttccttgtggaaaaataaggtttgcctaaggctttttgcttttttatttattgtttcatttctttattagattaacttttgggaaacagtcttaaaattggagaaaatttccacattttaggaaaaacagctttccccctgtgggccatttgagagtaaattgctgacattatgccatcacatctggtatgtgggtattcccacaagtcaggacattttatataactacttcataatcggaaagttaacatcaatacacttgatcatttaattctcagtttcttttcaagttttcttaattgtctataatgttctttgtagcagaaggatcccattcaggtccatgaatttcatttagttgtcatgactctttcagtctggaacagttcctcagtttttctttgacctttatgaccttaaatcttttgaagagtaaagtccaataatacagaatgtccctccattggatttctctgaactttttttatgataagatttagatgataattttttttttggcaagagtatcacagaagttatcccatgatcttctcactgcattctatcaggtgacctgcaattattattattttttattttcatcttttaagttcaggggtacatgtgcaggatgtgcaggatgtccaggtttgttacataggtaaatatgtgccatggtggtttgctgcacagatcatcccatcacctaggtattaataatagcccagcatccattagctgttcttcacgatgctctcccttctttcacccgccaccatcccacatgcccctgtgtgtgttgttccccgccatgtgtccatgtgttctcattattcagctcccacttgtaagtgagagcatgcagtatttcattttctatttctgcgttggtttgctgaggat

SEQ ID NO: 120817 - DNA, 5830 bp, Homo sapiens
  Payload ID: 3667
  Gene Symbol: CCDC144A
  Gene Name: coiled-coil domain containing 144A
  Uniprot ID: A2RUR9
  ENST ID: ENST00000360524
  CDS Start-End: 77-4360
cggtcctcctttcgcagattggaaaccgcgggctatcctgctgggaggttgtggccgaggcagtagctcgctactgatggcctcctggggtggagaaaagcggggaggggctgaggggtctccgaagccggcagtctacgccacgaggaagacccctagcgtcgggagccagggggaccagtggtacttgggctacccgggggaccagtggtcctcgggcttcccctacagctggtggaaaaacagcgtcggcagcgagagcaagcacggtgagggcgccttagaccagccccagcacgacgtccgcctggaagatcttggcgagctccacagagctgcccggtcgggcgacgtccctggggtggagcacatcttagctcctggagacactggcgtggacaagagggataggaagaagagcattcagcaactagttcctgaatataaggaaaaacagacacctgaaagtcttcctcaaaataacaatccagattggcatcctactaatttgacccttagtgatgagacttgtcagagatccaagaatctgaaagttgatgataaatgtccatctgtatcaccatcaatgcctgaaaatcagtcagcaaccaaagaactgggacagatgaacttaacagaacgagaaaagatggacactggagttgtacttctctcagggaatgatactctccatgacctgtgccaatcacagctaccagaaaacaaagagagcaaagaagcagaacaagactcggagctgacatcagaggaagagcaagaaagacttaaaggatgcgaaaataagcagccacagaaaacgtctcaagaaccagaaatggctaaggattgcgatagagaggatatacctatatatccagtacttcctcatgtgcaaaaatctgaggaaatgtggattgaacaaggcaaattagagtggaaaaaccaattaaaactcgtcataaatgagttaaagcagaggtttggtgaaatttatgaaaaatacaaaattccggcttgtcctgaggaagagccactacttgataactctacaagaggaacagatgtaaaggatattccctttaatttgacaaataacatacctggttgtgaggaagaagatgcatctgaaatatctgtctcagtggtattcgagacatttcctgaacaaaaagaacccagtctcaaaaatatcatccatccatactatcatccatactctgggtcccaggaacatgtttgccagtcatcttctaagtttcatttacatgaaaataaattagactgcgacaatgataacaaaccaggcattggacatatttttagtacagataagaactttcataatgatgcaagcactaagaaagcaaggaacccagaagtggttatggttgaaatgaaagaagaccaagagtttgatttgcaaatgacaaaaaatatgaaccaaaatagtgacagtggcagtacaaacaactataaaagcctgaaacctaaattagaaaatctgagttctttaccaccagattctgacagaacatcagaagtatatctacatgaagaattacagcaagacatgcaaaagtttaagaatgaggtcaacacattagaagaagagttcctggctttgaagaaagaagatgttcaacttcataaagatgttgaagaagaaatggagaagcacagaagtaatagcacagaattatcaggaaccctaactgatggtactactgttggcaatgatgatgatggactaaatcagcagattcctaggaaggaaaatggagagcatgacaggcctgcagataaaacatctaatgaaaagaacgaggtcaaaaaccaaatatatcctgaggctgactttgctgactcaatggagccatctgaaatagcctcagaggattgtgaattgtctcactctgtttatgagaattttatgttgctgattgaacaacttagaatggagtataaagattctgctagcctaccaagaatccaagacacattttgtttgtgtgaacacttactgaaacttaagaataatcactgtgaccaacttacagtaaaacttaaacaaatggaaaatatggtcagtgtactacaaaatgagctatctgaaacaaaaaagacaaaattacagttagaacttcaaaaaattgaatgggagaaagagctgtacgatttgagacttgccttaaaacaagaaaatgaggagaaaagaaatgccgatatgttgtataataaagatagtgaacagttaagaataaaagaagaggagtgtgggaaagtggttgaaacaaagcaacaacttaaatggaatctgagaagacttgttaaggaattgaggacagtaagaaataacttggatctggttgtgcaggagagaaacgatgcccagaagcaactttctgaagaacaggatgccagaatattacaagatcagattctgacgagtaaacaaaaggaactagaaatggctcgaaagaaaatgaattctgagatttctcataggcatcagaaagaaaaggatctctttcatgaagattgcatgttgcaggaagaaattgccttgctgagactggaaatagatacaataaaaaatcagaacaagcaaaaggaaaagaaatattttgaggacattgaggctgtgaaagaaaagaatgataaccttcaaaaaattataaaactaaatgaggaaacattaacagaaacaatactccagtacagtggacagctgaacaatctgacagctgagaacaaaatactcaattctgaactggagaatgggaaacagaaccaagaaagactagaaatagaaatggaatcataccgttgtagactagctgctgctgtacgtgactgtgatcaaagtcagacagcaagagacctaaaacttgatttccagagaacaagacaagagtgggttcgtttacatgacaaaatgaaggttgatatgtctggcctacaagctaagaatgagattctttctgaaaaactttctaatgctgaaagtaaaattaacagcctacaaattcagctccataacacaagagatgctcttggaagagagagtttgattttggaacgtgtgcaaagagacctcagccaaacacagtgtcagaagaaagaaactgaacaaatgtaccaaattgaacaaagcaaactgaagaaatacattgccaagcaggaatctgtagaggagagattatctcaactacaaagtgaaaatatgttgcttcgacagcaactggatgatgctcacaagaaagctaacagtcaagaaaagacaagcagtactatccaagaccagtttcattctgctgccaaaaatcttcaagctgagagtgaaaagcagattctttcactacaagagaagaacaaggagctgatggatgaatataatcatttaaaagaaagaatggatcaatgtgagaaagagaaagcaggaagaaaaattgaccttacagaagcacaggaaactgtaccttcacgatgtctacatctggatgcagagaatgaagttcttcaacttcaacagacattattctctatgaaagcaatacaaaagcaatgtgaaacactacagaagaataagaagcagctgaaacaagaagtagtaaacctcaaaagttatatggaaagaaatatgttagaacgtggtaaagctgaatggcataaactgttgattgaagaaagagcaaggaaggagatagaagaaaaattaaacgaagccattctcaccttgcagaaacaagcagcagtatctcatgaacagttagtacagttaagggaggataatactacttcaataaaaactcagatggaactcacaatcaaagatctggaatctgaaatctccagaataaaaacttcgcaagccgactttaataaaaccgaattggaaagatataaggaactctacctagaagaagtgaaagttagagaatccttgtcaaatgaactcagtagaactaatgagatgatagcagaggtcagtacgcaacttactgtggagaaagagcagaccagatccagatctctattcactgcttatgctacaaggccagtcctagagtcaccttgcgttggaaatcttaatgatagtgaaggtctcaacagaaaacatattccaagaaaaaagaggtctgctcttaaggacatggagagctacttgttgaagatgcagcagaagttgcaaaatgatctaactgcagaagtagcaggatccagccaaactggactgcacagaattccacagtgctcgtccttctcctccagctctttgcacttgcttctttgctctatctgccaacctttttttctcatccttcagctgctactaaatatgaacctggatcctatatagcttctcctctaggatttacacacaaggaaaatctgaatcaagatccagttttggaagtaacaaaagaatatgcacagattttaagaagaaaatacatactctgaaagataaggcaattttatttgggctattcacatgatattttgtttcccattaaatatatgatgtgaacatttttactaaagggaaatattctatattatacatgtctgatgaaaatttatatagtattttaaataatgtttcttggcctcttcagctaacttttaagtggattttgcaaatgaaaaccagtattactgagttttacatactcgaactgcccaaatgtttgctgtttaaacagccaaataatcaagttgccattagtaatttagtggagccaattgatggcttgtttgtattttataattttatctttatacatagtgatagatttaagtttagatagacatcattttggtatactggtactgtggtcattgtcaatgtttggatgtattacgattgttatagtgcaatcaaacttagataattttaattttaagcactgatttatttagatctttccttgtggaaaaataaggtttgcctaaggctttttgcttttttatttattgtttcatttctttattagattaacttttgggaaacagtcttaaaattggagaaaatttccacattttaggaaaaacagctttccccctgtgggccatttgagagtaaattgctgacattatgccatcacatctggtatgtgggtattcccacaagtcaggacattttatataactacttcataatcggaaagttaacatcaatacacttgatcatttaattctcagtttcttttcaagttttcttaattgtctataatgttctttgtagcagaaggatcccattcaggtccatgaatttcatttagttgtcatgactctttcagtctggaacagttcctcagtttttctttgacctttatgaccttaaatcttttgaagagtaaagtccaataatacagaatgtccctccattggatttctctgaactttttttatgataagatttagatgataattttttttttggcaagagtatcacagaagttatcccatgatcttctcactgcattctatcaggtgacctgcaattattattattttttattttcatcttttaagttcaggggtacatgtgcaggatgtgcaggatgtccaggtttgttacataggtaaatatgtgccatggtggtttgctgcacagatcatcccatcacctaggtattaataatagcccagcatccattagctgttcttcacgatgctctcccttctttcacccgccaccatcccacatgcccctgtgtgtgttgttccccgccatgtgtccatgtgttctcattattcagctcccacttgtaagtgagagcatgcagtatttcattttctatttctgcgttggtttgctgaggat

SEQ ID NO: 120818 - DNA, 8686 bp, Homo sapiens
  Payload ID: 3667
  Gene Symbol: CCDC144A
  Gene Name: coiled-coil domain containing 144A
  ENST ID: ENST00000399273
  CDS Start-End: 161-4438
gaggctttgcggtggctgttggcttggcggtggtcgcttggcttggcgtggcagtgatcgcttggcttggcatttctggcttggcggtcctcctttcgcagattggaaaccgcgggctatcctgctgggaggttgtggccgaggcagtagctcgctactgatggcctcctggggtggagaaaagcggggaggggctgaggggtctccgaagccggcagtctacgccacgaggaagacccctagcgtcgggagccagggggaccagtggtacttgggctacccgggggaccagtggtcctcgggcttcccctacagctggtggaaaaacagcgtcggcagcgagagcaagcacggtgagggcgccttagaccagccccagcacgacgtccgcctggaagatcttggcgagctccacagagctgcccggtcgggcgacgtccctggggtggagcacatcttagctcctggagacactggcgtggacaagagggataggaagaagagcattcagcaactagttcctgaatataaggaaaaacagacacctgaaagtcttcctcaaaataacaatccagattggcatcctactaatttgacccttagtgatgagacttgtcagagatccaagaatctgaaagttgatgataaatgtccatctgtatcaccatcaatgcctgaaaatcagtcagcaaccaaagaactgggacagatgaacttaacagaacgagaaaagatggacactggagttgtacttctctcagggaatgatactctccatgacctgtgccaatcacagctaccagaaaacaaagagagcaaagaagcagaacaagactcggagctgacatcagaggaagagcaagaaagacttaaaggatgcgaaaataagcagccacagaaaacgtctcaagaaccagaaatggctaaggattgcgatagagaggatatacctatatatccagtacttcctcatgtgcaaaaatctgaggaaatgtggattgaacaaggcaaattagagtggaaaaaccaattaaaactcgtcataaatgagttaaagcagaggtttggtgaaatttatgaaaaatacaaaattccggcttgtcctgaggaagagccactacttgataactctacaagaggaacagatgtaaaggatattccctttaatttgacaaataacatacctggttgtgaggaagaagatgcatctgaaatatctgtctcagtggtattcgagacatttcctgaacaaaaagaacccagtctcaaaaatatcatccatccatactatcatccatactctgggtcccaggaacatgtttgccagtcatcttctaagtttcatttacatgaaaataaattagactgcgacaatgataacaaaccaggcattggacatatttttagtacagataagaactttcataatgatgcaagcactaagaaagcaaggaacccagaagtggttatggttgaaatgaaagaagaccaagagtttgatttgcaaatgacaaaaaatatgaaccaaaatagtgacagtggcagtacaaacaactataaaagcctgaaacctaaattagaaaatctgagttctttaccaccagattctgacagaacatcagaagtatatctacatgaagaattacagcaagacatgcaaaagtttaagaatgaggtcaacacattagaagaagagttcctggctttgaagaaagaagatgttcaacttcataaagatgttgaagaagaaatggagaagcacagaagtaatagcacagaattatcaggaaccctaactgatggtactactgttggcaatgatgatgatggactaaatcagcagattcctaggaaggaaaatggagagcatgacaggcctgcagataaaacatctaatgaaaagaacgaggtcaaaaaccaaatatatcctgaggctgactttgctgactcaatggagccatctgaaatagcctcagaggattgtgaattgtctcactctgtttatgagaattttatgttgctgattgaacaacttagaatggagtataaagattctgctagcctaccaagaatccaagacacattttgtttgtgtgaacacttactgaaacttaagaataatcactgtgaccaacttacagtaaaacttaaacaaatggaaaatatggtcagtgtactacaaaatgagctatctgaaacaaaaaagacaaaattacagttagaacttcaaaaaattgaatgggagaaagagctgtacgatttgagacttgccttaaaacaagaaaatgaggagaaaagaaatgccgatatgttgtataataaagatagtgaacagttaagaataaaagaagaggagtgtgggaaagtggttgaaacaaagcaacaacttaaatggaatctgagaagacttgttaaggaattgaggacagtaagaaataacttggatctggttgtgcaggagagaaacgatgcccagaagcaactttctgaagaacaggatgccagaatattacaagatcagattctgacgagtaaacaaaaggaactagaaatggctcgaaagaaaatgaattctgagatttctcataggcatcagaaagaaaaggatctctttcatgaagattgcatgttgcaggaagaaattgccttgctgagactggaaatagatacaataaaaaatcagaacaagcaaaaggaaaagaaatattttgaggacattgaggctgtgaaagaaaagaatgataaccttcaaaaaattataaaactaaatgaggaaacattaacagaaacaatactccagtacagtggacagctgaacaatctgacagctgagaacaaaatactcaattctgaactggagaatgggaaacagaaccaagaaagactagaaatagaaatggaatcataccgttgtagactagctgctgctgtacgtgactgtgatcaaagtcagacagcaagagacctaaaacttgatttccagagaacaagacaagagtgggttcgtttacatgacaaaatgaaggttgatatgtctggcctacaagctaagaatgagattctttctgaaaaactttctaatgctgaaagtaaaattaacagcctacaaattcagctccataacacaagagatgctcttggaagagagagtttgattttggaacgtgtgcaaagagacctcagccaaacacagtgtcagaagaaagaaactgaacaaatgtaccaaattgaacaaagcaaactgaagaaatacattgccaagcaggaatctgtagaggagagattatctcaactacaaagtgaaaatatgttgcttcgacagcaactggatgatgctcacaagaaagctaacagtcaagaaaagacaagcagtactatccaagaccagtttcattctgctgccaaaaatcttcaagctgagagtgaaaagcagattctttcactacaagagaagaacaaggagctgatggatgaatataatcatttaaaagaaagaatggatcaatgtgagaaagagaaagcaggaagaaaaattgaccttacagaagcacaggaaactgtaccttcacgatgtctacatctggatgcagagaatgaagttcttcaacttcaacagacattattctctatgaaagcaatacaaaagcaatgtgaaacactacagaagaataagaagcagctgaaacaagaagtagtaaacctcaaaagttatatggaaagaaatatgttagaacgtggtaaagctgaatggcataaactgttgattgaagaaagagcaaggaaggagatagaagaaaaattaaacgaagccattctcaccttgcagaaacaagcagcagtatctcatgaacagttagtacagttaagggaggataatactacttcaataaaaactcagatggaactcacaatcaaagatctggaatctgaaatctccagaataaaaacttcgcaagccgactttaataaaaccgaattggaaagatataaggaactctacctagaagaagtgaaagttagagaatccttgtcaaatgaactcagtagaactaatgagatgatagcagaggtcagtacgcaacttactgtggagaaagagcagaccagatccagatctctattcactgcttatgctacaaggccagtcctagagtcaccttgcgttggaaatcttaatgatagtgaaggtctcaacagaaaacatattccaagaaaaaagaggtctgctcttaaggacatggagagctacttgttgaagatgcagcagaagttgcaaaatgatctaactgcagaagtagcagctgctactaaatatgaacctggatcctatatagcttctcctctaggatttacacacaaggaaaatctgaatcaagatccagttttggaagtaacaaaagaatatgcacagattttaagaagaaaatacatactctgaaagataaggcaattttatttgggctattcacatgatattttgtttcccattaaatatatgatgtgaacatttttactaaagggaaatattctatattatacatgtctgatgaaaatttatatagtattttaaataatgtttcttggcctcttcagctaacttttaagtggattttgcaaatgaaaaccagtattactgagttttacatactcgaactgcccaaatgtttgctgtttaaacagccaaataatcaagttgccattagtaatttagtggagccaattgatggcttgtttgtattttataattttatctttatacatagtgatagatttaagtttagatagacatcattttggtatactggtactgtggtcattgtcaatgtttggatgtattacgattgttatagtgcaatcaaacttagataattttaattttaagcactgatttatttagatctttccttgtggaaaaataaggtttgcctaaggctttttgcttttttatttattgtttcatttctttattagattaacttttgggaaacagtcttaaaattggagaaaatttccacattttaggaaaaacagctttccccctgtgggccatttgagagtaaattgctgacattatgccatcacatctggtatgtgggtattcccacaagtcaggacattttatataactacttcataatcggaaagttaacatcaatacacttgatcatttaattctcagtttcttttcaagttttcttaattgtctataatgttctttgtagcagaaggatcccattcaggtccatgaatttcatttagttgtcatgactctttcagtctggaacagttcctcagtttttctttgacctttatgaccttaaatcttttgaagagtaaagtccaataatacagaatgtccctccattggatttctctgaactttttttatgataagatttagatgataattttttttttggcaagagtatcacagaagttatcccatgatcttctcactgcattctatcaggtgacctgcaattattattattttttattttcatcttttaagttcaggggtacatgtgcaggatgtgcaggatgtccaggtttgttacataggtaaatatgtgccatggtggtttgctgcacagatcatcccatcacctaggtattaataatagcccagcatccattagctgttcttcacgatgctctcccttctttcacccgccaccatcccacatgcccctgtgtgtgttgttccccgccatgtgtccatgtgttctcattattcagctcccacttgtaagtgagagcatgcagtatttcattttctatttctgcgttggtttgctgaggataatgttctgcagctccacccatgtccctgcaaaggacatgtctcattccttttcatggctgcatagtattccatggtgtatatgtaccacattttctttatccagtttatcattgatgggcttttaggttgattctttgtctttgctattgtgaatagtgctgcaatgaacatacgtgtgcgtgtatctttatactagaattagttatattcctttgggtatataccaagtaatgggattgctgggttaaatggtatttcaggttctagatctttgaggaatcaccacactgtcttccacactggttgaactaatttacactcctatcaacagtgtaaaagcattcctgtttctccataatcttgccagcatcttttcatttttttgaattatagccattctgactgttgtgagatggtgtctcattgtggttttgatttgcatttctcagatgatcagtgatgttgaagtttttttgtttgttggctgcatgtatgccttcttttgaaaagtgtctgtttgtgtcctttgaccactttctaatggggttgagtttttttttcttgtaaatttgtttaagttccttgtagatgctggatattagacctttgtcagatggatagagtgcaaaaattttctcccattctgtaggttgtcggtttactctgttgataggttcttaatgctgtgcagaagctctttagtttaattagatcccatttgtcaattttggcttttgttgcaattgcttttggcatcttcgtcatgaaatctttgcccttgcctgtgtcctgaatggcattgcctaggttttcttccaggatttttatagttttgggttgtagatttaagtctttaatccatcttgagttaacttttgtatatgggttaaggaaggggtcccgtttcaatttgctgcatatggctagccagttctcccagcaccatttattaaatagggaatcttttccccattgcttccttttgtcaggtttgtcaaagatcacatggttgtaggtgtgtggtcttatttctgggttctctattctgttccattggtctatgtgtcggttcttgtaccagcactatgctgttttggttactgtagtcttgtagtatgtttgaagctgggtagcatgatgcctctagctttgctcttcttgcttaggattgtcttggctatttgggctcttttttggttccatatgaattttaaaatagctttttctaggtctgtaaagaatgtgaatagtagtttaatgggcctagcatttaatttacagattgccttgggcagtgtggtcattttcacgatattgaaccttcctgtctgtgagcatatgtttttccatttgtttgtgtcatctctgatttctttgaataatggtttatagttatccttgaaaaggtccttcacttttcttgttagctgtattcctaggtattatactcttcttgtggcaattgtgaatgggagttaattcatgagttttctctcggcttgcctgttgttggtgtataggaatgctagtgacttttgcacattgattttgtatcctgagactttgttgaagttgcttatcagctaagaagtttttgagctgagatgatggagttttctagatataggatcatatcatctgcaaacaaagatagtttgacttcctgtcttcctatttgaatagcttttctttctttctcttgcctgattgccttggtgagaatttctaatactgtgttgaataggagtggtgagagagggcatctttgtcttgtgtcagttttcaagggaacgcttccaggttttcaggtactcaggcaacaaatagcgttacaatagaatagtacctcacatctcaatgctaatgttgaacgtaaatggcctaaatgctccacttaaaagatatagaatggcagaatgggtaagaattcaccaaccaagttgctgctgtcttcaggagactcacctaacacatacggactcacataaacttaaggcaaagggttggaaaaagacacttcgtctaaatggacacatcaaaagcgagcaggagtagctgttcttatatcagacaaaacggactttaagacaacagcagttttaaaaagacaaagagggacattatataatgataaaaggactagttcaacaggaaaatatcacagtcctaaatatatatgcacctaatactggagatcccaaatttataaaacaattactactagacataagaaatgaggtagttggcaacacaataatagtgggggatgttaatactccgctggcagcactaggcagatcaccaagacagaaagtcaacaaagaaacaatggacttaaactataccctggaacatatggacttaacagatgcttacagaacattctacccaacaagcatagaatatacattgtatacatcagaacacgggacattctccaaaatagaccatatgatagggcacaaaacaagtctcagtaaatttaagaaaatcagaattatatcaagtactctctcagaccacagtggaataaaattggaaattaattccaaaaggaacactcaaaagcatgcaaatacatggtaattaaataacctactcctgaatgattgttgggtcaacaatgatatcaagagggaaatttaaaaattctttgaactgaacgataatagtgacacaacctatcaaaaactctgggatacagcaaaagtggagctaagaagaaaattcatagcattaaatgcctatatcaaaaagtctgaaagagcacaaataaacaatctaaggtcacacctcacagaattggagaaactagaacagtccaaatccaaacccagcagaagaaaagaaataacaaaatcagaacaaaactaaatgaaa

SEQ ID NO: 120819 - DNA, 534 bp, Homo sapiens
  Payload ID: 3667
  Gene Symbol: CCDC144A
  Gene Name: coiled-coil domain containing 144A
  ENST ID: ENST00000420937
  CDS Start-End: 1-534
cactggcgtggacaagagggataggaagaagagcattcagcaactagttcctgaatataaggaaaaacagacacctgaaagtcttcctcaaaataacaatccagattggcatcctactaatttgacccttagtgatgagacttgtcagagatccaagaatctgaaagttgatgataaatgtccatctgtatcaccatcaatgcctgaaaatcagtcagcaaccaaagaactgggacagatgaacttaacagaacgagaaaagatggacactggagttgtacttctctcagggaatgatactctccatgacctgtgccaatcacagctaccagaaaacaaagagagcaaagaagcagaacaagactcggagctgacatcagaggaagagcaagaaagacttaaaggatgcgaaaataagcagccacagaaaacgtctcaagaaccagaaatggctaaggattgcgatagagaggatatacctatatatccagtacttcctcatgtgcaaaaatctgaggaaatgtggattgaaca

SEQ ID NO: 120820 - DNA, 3333 bp, Homo sapiens
  Payload ID: 3668
  Gene Symbol: CCDC146
  Gene Name: coiled-coil domain containing 146
  Uniprot ID: Q8IYE0
  ENST ID: ENST00000285871
  CDS Start-End: 128-2995
ataccaaggacgcgacttcttgtttggagagggtggagctttggagtgagacccaggaggccaaatcccaaagagaaaaataggagcctaaataaggatcaggaccaagggaagggaatcgtgaaaaatggaagacagtagcacagacacagaaaaagaagaggaagaggagaaagatgaaaaggatcaagagcccatttatgccatagtgcccacaattaacattcaagatgagcggtttgttgatttatctgaaactccagctttcatttttctgcatgagttacatgctatgggaaaacttcctggaaccagaatggcagcgttaaaagccaagtataccttgctgcatgacgccgtgatgagcacacaagagtcagaggtccaactgctacagaatgccaaacgtttcactgagcaaatacaacagcagcagtttcacctgcagcaagctgataattttccagaagcattctccacggaggtctccaaaatgagagaacaacttctcaagtatcaaaatgaatataatgcagtgaaggaaagagagttccataatcagtacagattaaatagcttaaaggaagaaaaaatcatcatagtaaaagaatttgagaagataacaaagccaggagaaatggagaagaagatgaaaatattgagagaaagcactgaagaattacgtaaagaaataatgcagaagaaattagaaattaaaaatttacgagaagatttggcatctaaacaaaagcaattattaaaagagcagaaggaactagaagaattgttgggacatcaggtcgtcctaaaggatgaagtggcccaccatcaaaccattccagtacaaattggaaaagagatagaaaaaataacacgcaaaaaagtagaaatggaaaagaaaaaaattgtcttggaacaagaagtcaaaacgctaaatgactccctaaagaaagttgaaaacaaggttagtgctatagtggatgagaaggaaaatgtaataaaggaagttgaaggcaaacgagccttacttgaaatcaaagaacgagaacataaccaattggtcaagctattggaattagccagagagaatgaagcaacttcattaactgaaagagggatcttggatctcaatttacgcaacagtctcattgacaagcagaactaccatgatgaactttctcgtaagcaaagagagaaagaacgagattttcgaaatttaagaaagatggaactgctcttgaaagtgtcctgggatgcacttaggcaaactcaagcactgcatcaaaggcttctattagagatggaagctatccccaaagatgattctacattatctgagagaaggcgagagcttcacaaggaagttgaagtagctaagaggaatttggcccaacagaaaattatatcagaaatggagtctaagttagtagaacaacaacttgcagaagaaaacaagcttttaaaggagcaagaaaacatgaaagagctagtagtcaaccttctccgcatgactcaaatcaaaattgatgaaaaggaacaaaagtccaaggatttcctgaaagctcagcaaaaatacaccaacattgttaaagaaatgaaagcaaaggatcttgaaatcaggatacacaagaagaaaaaatgtgaaatttatcggagactgagagagtttgctaaactgtatgacaccattcgaaatgaaagaaacaaatttgttaacttactccacaaagctcatcagaaagtaaatgaaataaaagaaaggcataaaatgtcattaaatgaacttgaaattctgagaaatagtgccgttagtcaagaaagaaagctacaaaattccatgctgaaacacgccaacaatgttaccatcagagagagcatgcaaaacgatgtgcgcaaaattgtatcaaaacttcaggaaatgaaagaaaagaaggaagcccagttaaataacattgacagacttgccaacacgatcacaatgatcgaagaggagatggtgcagcttcgcaaaagatacgaaaaagctgttcagcatcgaaatgaaagtggcgttcagctgatagagcgggaagaagaaatatgcattttttatgaaaaaataaatatccaagagaagatgaaactaaatggagaaattgaaatacatctactggaagaaaagatccaattcctgaaaatgaagattgctgagaagcaaagacaaatttgtgtgacccagaaattactgccagccaagaggtccctggatgccgacctagctgtgctccaaattcagttttcacagtgtacagacagaattaaagacctggagaaacagttcgtaaagcctgatggtgagaatagagctcgcttccttccagggaaagatctgaccgaaaaagaaatgatccaaaaattagacaagctggaactacaactggccaagaaggaggagaagctgctggagaaggatttcatctatgagcaggtctccaggctcacagacaggctctgcagcaaaactcagggctgcaagcaggacacactgctcttagccaagaagatgaatggctatcaaagaaggatcaaaaatgcaactgagaaaatgatggctcttgttgctgagctgtccatgaaacaagccctaaccattgaactccaaaaggaagtcagggagaaagaagacttcatcttcacttgcaattccaggatagaaaaaggtctgccactcaataaggaaattgagaaagaatggttgaaagtccttcgagatgaagaaatgcacgccttggccatcgctgaaaagtctcaggagttcttggaagcagataatcgccagctgcccaatggtgtttacacaactgcagagcagcgtccgaatgcctacatcccagaagcagatgccactcttcctttgccaaaaccttatggtgctttggctccttttaaacccagtgaacctggagccaatatgaggcacataaggaaacctgttataaagccagttgaaatctgaatatgtgaacaaatccaggcctctcaaggaaaagacttcaaccaggcttccttgtacccacaggtgaaaaatgtgagcataatacttctaatattattgataagtaaggtaaccacaattagtcagcaacagagtacaacagggtttctatttacccaccaactactatacctttcatgacgttgaatgggacatagaactgtcctacatttatgtcaaagtatatatttgaatcgcttatattttctttttcactctttatattgagtacattccagaaatttgtagtaggcaaggtgctataaaaatgcactaaaaataaatctgttctcaatgaa

SEQ ID NO: 120821 - DNA, 557 bp, Homo sapiens
  Payload ID: 3668
  Gene Symbol: CCDC146
  Gene Name: coiled-coil domain containing 146
  ENST ID: ENST00000415750
  CDS Start-End: 47-557
acatatcccaggaggcaatgcgcaggggagcacggaatcgtgaaaaatggaagacagtagcacagacacagaaaaagaagaggaagaggagaaagatgaaaaggatcaagagcccatttatgccatagtgcccacaattaacattcaagatgagcggtttgttgatttatctgaaactccagctttcatttttctgcatgagttacatgctatgggaaaacttcctggaaccagaatggcagcgttaaaagccaagtataccttgctgcatgacgccgtgatgagcacacaagagtcagaggtccaactgctacagaatgccaaacgtttcactgagcaaatacaacagcagcagtttcacctgcagcaagctgataattttccagaagcattctccacggaggtctccaaaatgagagaacaacttctcaagtatcaaaatgaatataatgcagtgaaggaaagagagttccataatcagtacagattaaatagcttaaaggaagaaaaaatcatcatagtaaaagaatttgagaagataacaaagccaggagtaa

SEQ ID NO: 120822 - DNA, 3122 bp, Homo sapiens
  Payload ID: 3669
  Gene Symbol: CCDC148
  Gene Name: coiled-coil domain containing 148
  Uniprot ID: Q8NFR7
  ENST ID: ENST00000283233
  CDS Start-End: 315-2090
atagagaccgatgctgttcagcgcgagagggcctggagagggtgggtgtgagagagaaggtgtctcaggtctcgggcgcgggagggggtggcggagaggacagggagattccccagcgctggctctgaaatctggggcaggctttccttgccttactgccaatcccaactgtgcctggtagggtttgtccctggcgtcaaaggtaggaacagctgagcccttagatgtacccctgacggcgagagcccaggagtgggcgtttcacttttcctgcgtttggggagtccctgaggctatgccctttgacctttgacatgtgtgcagcttctgcttctccagataatctggtattccatatgaaaaatgagatgagaaacatcaagtacaaaccagtagactatcaacaattgcgtgcattaactgaagcaaagaaattggcttctgcctctgcaaagctaaagatcagaaaagcaatgttgacttcaaagttatccaaagaacaaacactaataaaacaacacaagcaagtgtggtggcaggaataccagaggctgaatgaagtcagatgtaaaatggaatctgaaataaaatcccttctcaatgaagagaacattggaaatgaatgtctttgtgaccttacaaattttgagcaagagctatcagaacaacagtgcacatatcttaaaaatgtaataaatcctattcagcagctgagagcagatctaaaatacagacagcatcacactttgcagcattcacacccacatattgagtttaactccatgaaagtattggaagaggttgactttgtgaagaaacaattgaaaactgtctttgaaagacttaggctggagcaacagagaatagaaaatgatctttcagactggagtataaagattctagatcattctttggaagaaaagactaacccgcttagtgaactgcccattgaattagaaagtttggaatgcccataccctgatttgaaatcttcaattctcagtgagttctataagtttacacagaaatatcagaagaagcttcaagactttaatctgcagttggaagacatatacagaaactgtcaactaagtgaagaagaccactggatttaccaggctattttggatcagtaccctggagatctctttggaagaaggactctgtatctggacatgttacaaagatattttcctcacaaatctaggcatgatttggttgaacacgagaaatattgtgaccaatatcgctttgctatagagcagcaaaatatcctgatatcaaattggaataaaaataagaaagactttatacagaaggctgtgctgacactcactgaggcttgtgcaacacatgaaatggagagcatgttggctaaggacaagaaaaagcaacaggaattgtgtgctgatctgaaagccaaggttcgtcaatggcgagcccaccaagaagaggtagcaagactggaaatggaaatttctgccagaagaagagaaaaggaagaggagaaagagaaactgtggaagaagaaggaattgttgcaaagagcagagaagaaaaaaaaaataaaaaaatactgggccaagaaaaaacagaagtggcaagaaatggaaatgagagatcttcagcgtctagaagaactgaagaaattaatcgctgaacagtcactaaaagacagagaaagggttaaatatagacaagaattattggaaaggcgtttgatggagaaaaaggaagtggcccttcaagaagctcatgaagacaaagagagagcacggcggctagaagcccttaggaaacaggttgctgttgttgctcaatttgatcctgttagaatgatgtcagatacaatggcatcaaaagctagaatgggcattgaaattgaagaagaatttattcttcaaaagccactcttcacattgaatacatacaatgaacagcagataatttctgaccctagacttcgcttcgagttagcacttcgagaagctggacttcatagaacactttatgctaaagagatattaccaaaaattagtcctcaaaaacctccaagaaaggacatggagtctactgtatttaaaatatagagctcatcctcaaattctatatgtaaagagcatttttctttgaaaacatgtatatggataataataattactactttctaaaatgtttgaaatatcagacatagaaatcatagcatctattaaaacaactttgcctttcttttgtgattcttagaattttatgcactatatttcctgtatctttaagttatatttaatagtactaaattcccccaaattatggaacttaattatggcacatatagtacttatactataatttagtaaactacatgttggaggttatgttatcctataaaaagagctcaaaataactttgtgagaattataaattatgtagctgctacctgctaatgttcatttctgcttgttatttcagaatttgactttttaattatggaagcttcattatcattaatacttctattatttcttgattattataagaggagactcaacctttctctaaatttagaaaccaatttggtacaccatgtttactgcaaaccaatcatccaaacaatttcattttgcaaattagcccttaagaataaattagaaattagaaatagcatttcaagcatgggaatatctgttttggtttggaaatatatatatttgtgtgattgtttagaagaaatatttaaaatttcataatatttggaatgctgtcaaaaattccaaattatctattaaatatttagatgattttatagaaaaggagcatttaaaataaaactcaaacataaatatttgactatttctaaaaaataatttttcaagcagaataacaagttagtgttgttgaaagttgccattgttacagttaagattaccccactcctttttctgtctattgcagctccctgacatttcccacctacctcccaggggttgcagcctctgtgcaattactggaataatgtaaaaaaaaaaaagcccaatccaactagtggaatctttgactttatgattgtccccaacatcatggaaataaaaaatacaagtacagtcccgttagaataaatcttc

SEQ ID NO: 120823 - DNA, 1160 bp, Homo sapiens
  Payload ID: 3669
  Gene Symbol: CCDC148
  Gene Name: coiled-coil domain containing 148
  Uniprot ID: Q8NFR7
  ENST ID: ENST00000409889
  CDS Start-End: 264-1031
gagagaaggtgtctcaggtctcgggcgcgggagggggtggcggagaggacagggagattccccagcgctggctctgaaatctggggcaggctttccttgccttactgccaatcccaactgtgcctggtagggtttgtccctggcgtcaaaggtaggaacagctgagcccttagatgtacccctgacggcgagagcccaggagtgggcgtttcacttttcctgcgtttggggagtccctgaggctatgccctttgacctttgacatgtgtgcagcttctgcttctccagataatctggtattccatatgaaaaatgagatgagaaacatcaagtacaaaccagtagactatcaacaattgcgtgcattaactgaagcaaagaaattggcttctgcctctgcaaagctaaagatcagaaaagcaatgttgacttcaaagttatccaaagaacaaacactaataaaacaacacaagcaagtgtggtggcaggaataccagaggctgaatgaagtcagatgtaaaatggaatctgaaataaaatcccttctcaatgaagagaacattggaaatgaatgtctttgtgaccttacaaattttgagcaagagctatcagaacaacagtgcacatatcttaaaaatgtaataaatcctattcagcagctgagagcagatctaaaatacagacagcatcacactttgcagcattcacacccacatattgagtttaactccatgaaagtattggaagaggttgactttgtgaagaaacaattgaaaactgtctttgaaagacttaggctggagcaacagagaatagaaaatgatctttcagactggagtataaagattctagatcattctttggaagaaaagactaacccgcttagtgaactgcccattgaattagaaagtttggaatgcccataccctgatttgaaatcttcaattctcagtgagttctataagtttacacagaaatatcagaagaagcttcaagactttaatctgcagttggaagacatatacaggtgataagataaaactgagtcctgtgtagacttttgacactaactttttatttttgtttgggatcactatacttccaacttactgtatagttactatgtaactggaatacaatcaataaatgtttagactgac

SEQ ID NO: 120824 - DNA, 2523 bp, Homo sapiens
  Payload ID: 3669
  Gene Symbol: CCDC148
  Gene Name: coiled-coil domain containing 148
  ENST ID: ENST00000409187
  CDS Start-End: 152-1954
tatgtgactgttgggaagtaggagatcaagaatcactttttccatgtgggtatccaacagaaccaggaccatttattaaagactgttctttccatactgcacagcagtatgactcacttcttcataaatcaggtgatcatatacggaaaacatgaatcaaagagaccaaccattcatgacaattcagagaaatgatagctcagataatctggtattccatatgaaaaatgagatgagaaacatcaagtacaaaccagtagactatcaacaattgcgtgcattaactgaagcaaagaaattggcttctgcctctgcaaagctaaagatcagaaaagcaatgttgacttcaaagttatccaaagaacaaacactaataaaacaacacaagcaagtgtggtggcaggaataccagaggctgaatgaagtcagatgtaaaatggaatctgaaataaaatcccttctcaatgaagagaacattggaaatgaatgtctttgtgaccttacaaattttgagcaagagctatcagaacaacagtgcacatatcttaaaaatgtaataaatcctattcagcagctgagagcagatctaaaatacagacagcatcacactttgcagcattcacacccacatattgagtttaactccatgaaagtattggaagaggttgactttgtgaagaaacaattgaaaactgtctttgaaagacttaggctggagcaacagagaatagaaaatgatctttcagactggagtataaagattctagatcattctttggaagaaaagactaacccgcttagtgaactgcccattgaattagaaagtttggaatgcccataccctgatttgaaatcttcaattctcagtgagttctataagtttacacagaaatatcagaagaagcttcaagactttaatctgcagttggaagacatatacagaaactgtcaactaagtgaagaagaccactggatttaccaggctattttggatcagtaccctggagatctctttggaagaaggactctgtatctggacatgttacaaagatattttcctcacaaatctaggcatgatttggttgaacacgagaaatattgtgaccaatatcgctttgctatagagcagcaaaatatcctgatatcaaattggaataaaaataagaaagactttatacagaaggctgtgctgacactcactgaggcttgtgcaacacatgaaatggagagcatgttggctaaggacaagaaaaagcaacaggaattgtgtgctgatctgaaagccaaggttcgtcaatggcgagcccaccaagaagaggtagcaagactggaaatggaaatttctgccagaagaagagaaaaggaagaggagaaagagaaactgtggaagaagaaggaattgttgcaaagagcagagaagaaaaaaaaaataaaaaaatactgggccaagaaaaaacagaagtggcaagaaatggaaatgagagatcttcagcgtctagaagaactgaagaaattaatcgctgaacagtcactaaaagacagagaaagggttaaatatagacaagaattattggaaaggcgtttgatggagaaaaaggaagtggcccttcaagaagctcatgaagacaaagagagagcacggcggctagaagcccttaggaaacaggttgctgttgttgctcaatttgatcctgttagaatgatgtcagatacaatggcatcaaaagctagaatgggcattgaaattgaagaagaatttattcttcaaaagccactcttcacattgaatacatacaatgaacagcagataatttctgaccctagacttcgcttcgagttagcacttcgagaagctggacttcatagaacactttatgctaaagagatattaccaaaaattagtcctcaaaaacctccaagaaaggacatggagtctactgtatttaaaatatagagctcatcctcaaattctatatgtaaagagcatttttctttgaaaacatgtatatggataataataattactactttctaaaatgtttgaaatatcagacatagaaatcatagcatctattaaaacaactttgcctttcttttgtgattcttagaattttatgcactatatttcctgtatctttaagttatatttaatagtactaaattcccccaaattatggaacttaattatggcacatatagtacttatactataatttagtaaactacatgttggaggttatgttatcctataaaaagagctcaaaataactttgtgagaattataaattatgtagctgctacctgctaatgttcatttctgcttgttatttcagaatttgactttttaattatggaagcttcattatcattaatacttctattatttcttgattattataagaggagactcaacctttctctaaatttagaaaccaatttggtacaccatgtttactgcaaaccaatcatccaaacaatttcattttgcaaattagcccttaagaataaattagaaattagaaa

SEQ ID NO: 120825 - DNA, 2075 bp, Homo sapiens
  Payload ID: 3669
  Gene Symbol: CCDC148
  Gene Name: coiled-coil domain containing 148
  ENST ID: ENST00000454257
  CDS Start-End: 161-325
actgccaatcccaactgtgcctggtagggtttgtccctggcgtcaaaggtaggaacagctgagcccttagatgtacccctgacggcgagagcccaggagtgggcgtttcacttttcctgcgtttggggagtccctgaggctatgccctttgacctttgacatgtgtgcagcttctgcttctccagataatctggtattccatatgaaaaatgagatgagaaacatcaagtacaaaccagtagactatcaacaattgcgtgcattaactgaagcaaagaaattggcttctgcctctgcaaagctaaagaaactgtcaactaagtgaagaagaccactggatttaccaggctattttggatcagtaccctggagatctctttggaagaaggactctgtatctggacatgttacaaagatattttcctcacaaatctaggcatgatttggttgaacacgagaaatattgtgaccaatatcgctttgctatagagcagcaaaatatcctgatatcaaattggaataaaaataagaaagactttatacagaaggctgtgctgacactcactgaggcttgtgcaacacatgaaatggagagcatgttggctaaggacaagaaaaagcaacaggaattgtgtgctgatctgaaagccaaggttcgtcaatggcgagcccaccaagaagaggtagcaagactggaaatggaaatttctgccagaagaagagaaaaggaagaggagaaagagaaactgtggaagaagaaggaattgttgcaaagagcagagaagaaaaaaaaaataaaaaaatactgggccaagaaaaaacagaagtggcaagaaatggaaatgagagatcttcagcgtctagaagaactgaagaaattaatcgctgaacagtcactaaaagacagagaaagggttaaatatagacaagaattattggaaaggcgtttgatggagaaaaaggaagtggcccttcaagaagctcatgaagacaaagagagagcacggcggctagaagcccttaggaaacaggttgctgttgttgctcaatttgatcctgttagaatgatgtcagatacaatggcatcaaaagctagaatgggcattgaaattgaagaagaatttattcttcaaaagccactcttcacattgaatacatacaatgaacagcagataatttctgaccctagacttcgcttcgagttagcacttcgagaagctggacttcatagaacactttatgctaaagagatattaccaaaaattagtcctcaaaaacctccaagaaaggacatggagtctactgtatttaaaatatagagctcatcctcaaattctatatgtaaagagcatttttctttgaaaacatgtatatggataataataattactactttctaaaatgtttgaaatatcagacatagaaatcatagcatctattaaaacaactttgcctttcttttgtgattcttagaattttatgcactatatttcctgtatctttaagttatatttaatagtactaaattcccccaaattatggaacttaattatggcacatatagtacttatactataatttagtaaactacatgttggaggttatgttatcctataaaaagagctcaaaataactttgtgagaattataaattatgtagctgctacctgctaatgttcatttctgcttgttatttcagaatttgactttttaattatggaagcttcattatcattaatacttctattatttcttgattattataagaggagactcaacctttctctaaatttagaaaccaatttggtacaccatgtttactgcaaaccaatcatccaaacaatttcattttgcaaattagcccttaagaataaattagaaattagaaatagcatttcaagcatgggaatatctgttttggtttggaaatatatatatttgtgtgattgtttagaagaaatatttaaaatttcataatatttggaatgctgtcaaaaattccaaattatctattaaatatttagatgattttatagaaaaggagcatttaaaataaaactcaaacataaatatttg

SEQ ID NO: 120826 - DNA, 1447 bp, Homo sapiens
  Payload ID: 3669
  Gene Symbol: CCDC148
  Gene Name: coiled-coil domain containing 148
  ENST ID: ENST00000417066
  CDS Start-End: 315-362
atagagaccgatgctgttcagcgcgagagggcctggagagggtgggtgtgagagagaaggtgtctcaggtctcgggcgcgggagggggtggcggagaggacagggagattccccagcgctggctctgaaatctggggcaggctttccttgccttactgccaatcccaactgtgcctggtagggtttgtccctggcgtcaaaggtaggaacagctgagcccttagatgtacccctgacggcgagagcccaggagtgggcgtttcacttttcctgcgtttggggagtccctgaggctatgccctttgacctttgacatgtgtgcagcttctgcttctccagatgtaaaatggaatctgaaataaaatcccttctcaatgaagagaacattggaaatgaatgtctttgtgaccttacaaattttgagcaagagctatcagaacaacagtgcacatatcttaaaaatgtaataaatcctattcagcagctgagagcagatctaaaatacagacagcatcacactttgcagcattcacacccacatattgagtttaactccatgaaagtattggaagaggttgactttgtgaagaaacaattgaaaactgtctttgaaagacttaggctggagcaacagagaatagaaaatgatctttcagactggagtataaagattctagatcattctttggaagaaaagactaacccgcttagtgaactgcccattgaattagaaagtttggaatgcccataccctgatttgaaatcttcaattctcagtgagttctataagtttacacagaaatatcagaagaagcttcaagactttaatctgcagttggaagacatatacagaaactgtcaactaagtgaagaagaccactggatttaccaggctattttggatcagtaccctggagatctctttggaagaaggactctgtatctggacatgttacaaagatattttcctcacaaatctaggcatgatttggttgaacacgagaaatattgtgaccaatatcgctttgctatagagcagcaaaatatcctgatatcaaattggaataaaaataagaaagactttatacagaaggctgtgctgacactcactgaggcttgtgcaacacatgaaatggagagcatgttggctaaggacaagaaaaagcaacaggaattgtgtgctgatctgaaagccaagtctcaggtatgtctttatcagcagcatgaaaatggactaatacagtaaattggtaccagtagagtgaagtgttgctgaaaagatacccgaaaatgtggaagtgactttggaactggtatcaggcagaggttggaacagtgtggaaggctcagaagaagacgggaaaatgtgggaaagtttggaacctcctagagactttttgaatggttttgacaaaaatgctgatagtgatatgaacaatgaggtcca

SEQ ID NO: 120827 - DNA, 1471 bp, Homo sapiens
  Payload ID: 3669
  Gene Symbol: CCDC148
  Gene Name: coiled-coil domain containing 148
  ENST ID: ENST00000451554
  CDS Start-End: 270-392
gtgtgagagagaaggtgtctcaggtctcgggcgcgggagggggtggcggagaggacagggagattccccagcgctggctctgaaatctggggcaggctttccttgccttactgccaatcccaactgtgcctggtagggtttgtccctggcgtcaaaggtaggaacagctgagcccttagatgtacccctgacggcgagagcccaggagtgggcgtttcacttttcctgcgtttggggagtccctgaggctatgccctttgacctttgacatgtgtgcagcttctgcttctccagatcagaaaagcaatgttgacttcaaagttatccaaagaacaaacactaataaaacaacacaagcaagtgtggtggcaggaataccagaggctgaatgaagtcagatgtaaaatggaatctgaaataaaatcccttctcaatgaagagaacattggaaatgaatgtctttgtgaccttacaaattttgagcaagagctatcagaacaacagtgcacatatcttaaaaatgtaataaatcctattcagcagctgagagcagatctaaaatacagacagcatcacactttgcagcattcacacccacatattgagtttaactccatgaaagtattggaagaggttgactttgtgaagaaacaattgaaaactgtctttgaaagacttaggctggagcaacagagaatagaaaatgatctttcagactggagtataaagattctagatcattctttggaagaaaagactaacccgcttagtgaactgcccattgaattagaaagtttggaatgcccataccctgatttgaaatcttcaattctcagtgagttctataagtttacacagaaatatcagaagaagcttcaagactttaatctgcagttggaagacatatacagaaactgtcaactaagtgaagaagaccactggatttaccaggctattttggatcagtaccctggagatctctttggaagaaggactctgtatctggacatgttacaaagatattttcctcacaaatctaggcatgatttggttgaacacgagaaatattgtgaccaatatcgctttgctatagagcagcaaaatatcctgatatcaaattggaataaaaataagaaagactttatacagaaggctgtgctgacactcactgaggcttgtgcaacacatgaaatggagagcatgttggctaaggacaagaaaaagcaacaggaattgtgtgctgatctgaaagccaagtctcaggtatgtctttatcagcagcatgaaaatggactaatacagtaaattggtaccagtagagtgaagtgttgctgaaaagatacccgaaaatgtggaagtgactttggaactggtatcaggcagaggttggaacagtgtggaaggctcagaagaagacgggaaaatgtgggaaagtttggaacctcctagagactttttgaatggttttgac

SEQ ID NO: 120828 - DNA, 1786 bp, Homo sapiens
  Payload ID: 3669
  Gene Symbol: CCDC148
  Gene Name: coiled-coil domain containing 148
  ENST ID: ENST00000448656
  CDS Start-End: 128-280
tccctggcgtcaaaggtaggaacagctgagcccttagatgtacccctgacggcgagagcccaggagtgggcgtttcacttttcctgcgtttggggagtccctgaggctatgccctttgacctttgacatgtgtgcagcttctgcttctccagataatctggtattccatatgaaaaatgagatgagaaacatcaagtacaaaccagtagactatcaacaattgcgtgcattaactgaagcaaagaaattggcttctgcctctgcaaagctaaagatgtaaaatggaatctgaaataaaatcccttctcaatgaagagaacattggaaatgaatgtctttgtgaccttacaaattttggttgactttgtgaagaaacaattgaaaactgtctttgaaagacttaggctggagcaacagagaatagaaaatgatctttcagactggagtataaagattctagatcattctttggaagaaaagactaacccgcttagtgaactgcccattgaattagaaagtttggaatgcccataccctgatttgaaatcttcaattctcagtgagttctataagtttacacagaaatatcagaagaagcttcaagactttaatctgcagttggaagacatatacagaaactgtcaactaagtgaagaagaccactggatttaccaggctattttggatcagtaccctggagatctctttggaagaaggactctgtatctggacatgttacaaagatattttcctcacaaatctaggcatgatttggttgaacacgagaaatattgtgaccaatatcgctttgctatagagcagcaaaatatcctgatatcaaattggaataaaaataagaaagactttatacagaaggctgtgctgacactcactgaggcttgtgcaacacatgaaatggagagcatgttggctaaggacaagaaaaagcaacaggaattgtgtgctgatctgaaagccaaggttcgtcaatggcgagcccaccaagaagaggtagcaagactggaaatggaaatttctgccagaagaagagaaaaggaagaggagaaagagaaactgtggaagaagaaggaattgttgcaaagagcagagaagaaaaaaaaaataaaaaaatactgggccaagaaaaaacagaagtggcaagaaatggaaatgagagatcttcagcgtctagaagaactgaagaaattaatcgctgaacagtcactaaaagacagagaaagggttaaatatagacaagaattattggaaaggcgtttgatggagaaaaaggaagtggcccttcaagaagctcatgaagacaaagagagagcacggcggctagaagcccttaggaaacaggttgctgttgttgctcaatttgatcctgttagaatgatgtcagatacaatggcatcaaaagctagaatgggcattgaaattgaagaagaatttattcttcaaaagccactcttcacattgaatacatacaatgaacagcagataatttctgaccctagacttcgcttcgagttagcacttcgagaagctggacttcatagaacactttatgctaaagagatattaccaaaaattagtcctcaaaaacctccaagaaaggacatggagtctactgtatttaaaatatagagctcatcctcaaattctatatgtaaagagcatttttctttgaaaacatgtatatggataataataattactactttctaaaatgtttgaaatatcagacatagaaatcatagcatctattaaaacaactttgcctttc

SEQ ID NO: 120829 - DNA, 2127 bp, Homo sapiens
  Payload ID: 3670
  Gene Symbol: CCDC149
  Gene Name: coiled-coil domain containing 149
  Uniprot ID: Q6ZUS6
  ENST ID: ENST00000389609
  CDS Start-End: 145-1734
aaaatgctacgcttaaattttcctggagtccagatgtccttctgaatccactaaaccttgtgaagcgatgtgaacgtcagtcagcactacttattcataagtagtggatagttgccacgtcattaactcatcatcatcaccatcatggtcgtcatcgtcgtcgtcatcatcatcatcatcgccagagcggccacttgggattctgagtacctggtgtgtaagaggaagctggagagtaagaaggaagccctgctgatcctctccaaggagctggacacctgtcaacaggaaagggaccagtacaaactcatggccaatcagctccgggagcgccaccagtcactgaagaagaagtaccgagagctgattgatggagatccatcacttcctcctgaaaaaaggaaacaggctaatcttgcacaactattgagagattctcaggaccgaaataaacatctgggagaagaaattaaagaacttcagcaaaggcttggagaagtccagggcgacaacaagctcttgaggatgacgattgccaaacaaaggctcggagacgaagcaatcggcgtgcgacactttgcagcccatgagcgtgaagacttggtgcagcagctagagcgagctaaggaacagattgagtctctggagcacgacctgcaggcttctgtggacgagcttcaggatgttaaagaagaacggtcttcctaccaggacaaagtggagaggctcaaccaggagctgaaccatatcctgagtgggcacgagaaccgcatcattgacgtggacgccctgtgtatggagaacaggtaccttcaagagagattaaagcaactccatgaagaggtcaacctcttgaaatcaaacattgccaaatacaagaatgctctggagagacggaaaaactcgaagggccagggtaaatccagcagcagtgctctgacaggagtcctgtctgcaaagcaagttcaggatctgctatctgaggatcatggatgcagcctcccagctactccgcagtccatttctgacctgaaatctctggcaacagccctgttggaaacaatccacgagaaaaacatggtcattcagcaccagaggcaaaccaacaaaatcctagggaatcgggtggctgagctggaaaaaaaattaagaactctggaagtttctggtttgtggagtcttccagggggcaaggacaccatactgttcagcgaccccactcttcctagtggacagaggtcgagatccccactgctgaagtttgtcgagcagcccactgagaacaaagcagatcccaaggatggggaggctcagaagcaagaagaagatgaaagttgtgccgctgctgaggcgttgacagcgcctgaggatgctgggaggcccgctgtcaactccccagcaaatcagagccgcgggaaccaatgcaagctctttcatccttcattaccccagttaccttctgaggaagaagtaaacagccttgggagggaaataattaaactgacaaaggaacaggcagctgcagaactggaagaggtcagaagagagagtcccatagaaggtcagaggagtgagacggggccagccccgccaggcctggccatccagggggagctccctaaatctcacctggactccttcgaggccagccggccagcagccaaagcttccacaccggaagacggcaaagggatcccagagggcggaggcatgaggagcaccgtgaaaacctgaaggggagagggatctgacacaatgacacattgaaagccccagagagggtcaagaatgaagcatcggaatggtgcgctcacgtcgccttctcctgaaatacctccgagtctgcaagtgagaaaacgcactgatcctgttgcaaactgtgaatattctgatgatgccagtacagtttgatttattaaatgtaggtcctcaagcttctcagtgtcatctcttttctgccagagagtgctactgtgaacagggccaggcccaggaatcgtgtccaccatatggctggttttcagcatccgtctttctgtcagcttttgttttatcagagataagatgtttttgtattagcatttaatgttgtcaatcaaaattatgggaagagctagaaactgatgg

SEQ ID NO: 120830 - DNA, 3869 bp, Homo sapiens
  Payload ID: 3670
  Gene Symbol: CCDC149
  Gene Name: coiled-coil domain containing 149
  Uniprot ID: Q6ZUS6
  ENST ID: ENST00000504487
  CDS Start-End: 8-1597
ccagcgcatggaggaggaggccatgaacggcgaccggactgagagcgactggcaggggctggtgagcgagtacctggtgtgtaagaggaagctggagagtaagaaggaagccctgctgatcctctccaaggagctggacacctgtcaacaggaaagggaccagtacaaactcatggccaatcagctccgggagcgccaccagtcactgaagaagaagtaccgagagctgattgatggagatccatcacttcctcctgaaaaaaggaaacaggctaatcttgcacaactattgagagattctcaggaccgaaataaacatctgggagaagaaattaaagaacttcagcaaaggcttggagaagtccagggcgacaacaagctcttgaggatgacgattgccaaacaaaggctcggagacgaagcaatcggcgtgcgacactttgcagcccatgagcgtgaagacttggtgcagcagctagagcgagctaaggaacagattgagtctctggagcacgacctgcaggcttctgtggacgagcttcaggatgttaaagaagaacggtcttcctaccaggacaaagtggagaggctcaaccaggagctgaaccatatcctgagtgggcacgagaaccgcatcattgacgtggacgccctgtgtatggagaacaggtaccttcaagagagattaaagcaactccatgaagaggtcaacctcttgaaatcaaacattgccaaatacaagaatgctctggagagacggaaaaactcgaagggccagggtaaatccagcagcagtgctctgacaggagtcctgtctgcaaagcaagttcaggatctgctatctgaggatcatggatgcagcctcccagctactccgcagtccatttctgacctgaaatctctggcaacagccctgttggaaacaatccacgagaaaaacatggtcattcagcaccagaggcaaaccaacaaaatcctagggaatcgggtggctgagctggaaaaaaaattaagaactctggaagtttctggtttgtggagtcttccagggggcaaggacaccatactgttcagcgaccccactcttcctagtggacagaggtcgagatccccactgctgaagtttgtcgagcagcccactgagaacaaagcagatcccaaggatggggaggctcagaagcaagaagaagatgaaagttgtgccgctgctgaggcgttgacagcgcctgaggatgctgggaggcccgctgtcaactccccagcaaatcagagccgcgggaaccaatgcaagctctttcatccttcattaccccagttaccttctgaggaagaagtaaacagccttgggagggaaataattaaactgacaaaggaacaggcagctgcagaactggaagaggtcagaagagagagtcccatagaaggtcagaggagtgagacggggccagccccgccaggcctggccatccagggggagctccctaaatctcacctggactccttcgaggccagccggccagcagccaaagcttccacaccggaagacggcaaagggatcccagagggcggaggcatgaggagcaccgtgaaaacctgaaggggagagggatctgacacaatgacacattgaaagccccagagagggtcaagaatgaagcatcggaatggtgcgctcacgtcgccttctcctgaaatacctccgagtctgcaagtgagaaaacgcactgatcctgttgcaaactgtgaatattctgatgatgccagtacagtttgatttattaaatgtaggtcctcaagcttctcagtgtcatctcttttctgccagagagtgctactgtgaacagggccaggcccaggaatcgtgtccaccatatggctggttttcagcatccgtctttctgtcagcttttgttttatcagagataagatgtttttgtattagcatttaatgttgtcaatcaaaattatgggaagagctagaaactgatggggtttttaatcaggtccccatcttggtcaaggttaggcagctggagaggaaggtataattgagcaaaacgtgtccagaggacccatggctgcaccccatcaagtcagggcccaggaggactgcctggcatgggtgtgcttggcattgtgcccacagcactgctgtcgtggtacagactggcagttggaaggggccttaagccggctgagaagtttgggcttctgggttgaaatccacagccccggttgaggcctgtgtgctgagtgccagagctggagttttctagcttgtaaatctggagaattaactgatctgaagtgactgggaggggtgagcataaaagccggggaacaggactcccagtggtggtctggttttttttgtgagatgagatgagagctaccacctggaaatgctcattctctgcattcagcctgtctcacatacaggattgtatggccatttcaggtttgggaaagatctacctgctgggagccagtctagtttcctgcaccacctggaacttccaaacccttcactccttcaacagaatgttgaggctgcctcatttgtgccaccaagtacgggaatcttaaagacagaaacagagctcatgaccttttatgggaaagagagaggaaaacaaaacaacttcacaacagcatggcaaggggggatgtggaaccaaggacatgatacagggatgggaaaggagggcatgctcaattctagctggttctttcctttcagataaaaatgagcttttctagttggcatccggcactgcagaaaactaaaagtcatccagccatagctttttccttccctggaaagcctgagactagatcccaaagctcagaatgcctctgagaaccagaatcactcctttgagaggcgctccttgcaggaaaaagagaggctcccagagtggtagcctctcagtgaaaatgcatcctaaaaattcaatgtttataccaggctcatgacactaagatgtgacatctggacacgaggggtcagccacgtggatacatccctcccagattgcatctccaggaatcactctgctagcagaatgggcgccccatcccttactatgctgctcctcctcaaagtgcagcccagaaggacccaggcctttgatgcacattgggtgggtctcccactactttagttgaaatgggagcatgctggagtcggcgttctgttgcttctggtgagaaggacatcccattgacccctggccaccaggtccagtattccatccttccttctgtcccagcctatcgccctccccaccaggcccacccccacaacttctcctcaagggaggttgctcccgcagctggagggcttgcacagaccagcagtcacagaaatcattcttcctgctgtactgggccttaactgcctgcaaatgtccagcactactgcataggatgccagagccaccgaaggaaaacacagccaagtttaataataataaaaggaaaaatctcagcctgcagaactctggttttgacccaccatcggccagatgcacatcttcagggcctgttgagcaccttctgaaaagcagggctcgtaatagactccagcacattccatcagagtcaggaaaactgcagtgagtcccagagaatctagggtgcagggcagggagcaggagtcataaggagtgataacctaaactgtgtgtagtcagcggggagggtcttatgttatcaggtgaaatgagagccagtaagttagttgatcctgtcacagatataaccctgataacaccccatagatacgcgacacgtgtgtcctgcccctgctttccccatccaacatggttcttctgttccacagacattaaaggggctttctgcaatta

SEQ ID NO: 120831 - DNA, 1079 bp, Homo sapiens
  Payload ID: 3670
  Gene Symbol: CCDC149
  Gene Name: coiled-coil domain containing 149
  Uniprot ID: Q6ZUS6
  ENST ID: ENST00000502801
  CDS Start-End: 76-501
ggggcccgggcggcggcggcgacgcgacgtcgcgaggaggaggaggcggcgggggtccaggaggccggccagcgcatggaggaggaggccatgaacggcgaccggactgagagcgactggcaggggctggtgagcgagtacctggtgtgtaagaggaagctggagagtaagaaggaagccctgctgatcctctccaaggagctggacacctgtcaacaggaaagggaccagtacaaactcatggccaatcagctccgggagcgccaccagtcactgaagaagaagtaccgagagctgattgatggagatccatcacttcctcctgaaaaaaggaaacaggctaatcttgcacaactattgagagattctcaggaccgaaataaacatctgggagaagaaattaaagaacttcagcaaaggcttggagaagtccagggcgacaacaaggggaggctcagaagcaagaagaagatgaaagttgtgccgctgctgaggcgttgacagcgcctgaggatgctgggaggcccgctgtcaactccccagcaaatcagagccgcgggaaccaatgcaagctctttcatccttcattaccccagttaccttctgaggaagaagtaaacagccttgggagggaaataattaaactgacaaaggaacaggcagctgcagaactggaagaggtcagaagagagagtcccatagaaggtcagaggagtgagacggggccagccccgccaggcctggccatccagggggagctccctaaatctcacctggactccttcgaggccagccggccagcagccaaagcttccacaccggaagacggcaaagggatcccagagggcggaggcatgaggagcaccgtgaaaacctgaaggggagagggatctgacacaatgacacattgaaagccccagagagggtcaagaatgaagcatcggaatggtgcgctcacgtcgccttctcctgaaatacctccgagtctgcaagtgagaaaacgcactgatcctgttgcaaactgtgaatattctgatgatgccagtacagtttgatttattaaatgtaggtcctcaagc

SEQ ID NO: 120832 - DNA, 2362 bp, Homo sapiens
  Payload ID: 3670
  Gene Symbol: CCDC149
  Gene Name: coiled-coil domain containing 149
  ENST ID: ENST00000635206
  CDS Start-End: 16-1638
gaggccggccagcgcatggaggaggaggccatgaacggcgaccggactgagagcgactggcaggggctggtgagcgagtacctggtgtgtaagaggaagctggagagtaagaaggaagccctgctgatcctctccaaggagctggacacctgtcaacaggaaagggaccagtacaaactcatggccaatcagctccgggagcgccaccagtcactgaagaagaagtaccgagagctgattgatggagatccatcacttcctcctgaaaaaaggaaacaggctaatcttgcacaactattgagagattctcaggaccgaaataaacatctgggagaagaaattaaagaacttcagcaaaggcttggagaagtccagggcgacaacaagctcttgaggatgacgattgccaaacaaaggctcggagacgaagcaatcggcgtgcgacactttgcagcccatgagcgtgaagacttggtgcagcagctagagcgagctaaggaacagattgagtctctggagcacgacctgcaggcttctgtggacgagcttcaggatgttaaagaagaacggtcttcctaccaggacaaagtggagaggctcaaccaggagctgaaccatatcctgagtgggcacgagaaccgcatcattgacgtggacgccctgtgtatggagaacaggtaccttcaagagagattaaagcaactccatgaagaggtcaacctcttgaaatcaaacattgccaaatacaagaatgctctggagagacggaaaaactcgaagggccagggtaaatccagcagcagtgctctgacaggagtcctgtctgcaaagcaagttcaggatctgctatctgaggatcatggatgcagcctcccagctactccgcagtccatttctgacctgaaatctctggcaacagccctgttggaaacaatccacgagaaaaacatggtcattcagcaccagaggcaaaccaacaaaatcctagggaatcgggtggctgagctggaaaaaaaattaagaactctggaagtttctggtttgtggagtcttccaggcctgagctacaatgtttcagtaggatttgggaggggcaaggacaccatactgttcagcgaccccactcttcctagtggacagaggtcgagatccccactgctgaagtttgtcgagcagcccactgagaacaaagcagatcccaaggatggggaggctcagaagcaagaagaagatgaaagttgtgccgctgctgaggcgttgacagcgcctgaggatgctgggaggcccgctgtcaactccccagcaaatcagagccgcgggaaccaatgcaagctctttcatccttcattaccccagttaccttctgaggaagaagtaaacagccttgggagggaaataattaaactgacaaaggaacaggcagctgcagaactggaagaggtcagaagagagagtcccatagaaggtcagaggagtgagacggggccagccccgccaggcctggccatccagggggagctccctaaatctcacctggactccttcgaggccagccggccagcagccaaagcttccacaccggaagacggcaaagggatcccagagggcggaggcatgaggagcaccgtgaaaacctgaaggggagagggatctgacacaatgacacattgaaagccccagagagggtcaagaatgaagcatcggaatggtgcgctcacgtcgccttctcctgaaatacctccgagtctgcaagtgagaaaacgcactgatcctgttgcaaactgtgaatattctgatgatgccagtacagtttgatttattaaatgtaggtcctcaagcttctcagtgtcatctcttttctgccagagagtgctactgtgaacagggccaggcccaggaatcgtgtccaccatatggctggttttcagcatccgtctttctgtcagcttttgttttatcagagataagatgtttttgtattagcatttaatgttgtcaatcaaaattatgggaagagctagaaactgatggggtttttaatcaggtccccatcttggtcaaggttaggcagctggagaggaaggtataattgagcaaaacgtgtccagaggacccatggctgcaccccatcaagtcagggcccaggaggactgcctggcatgggtgtgcttggcattgtgcccacagcactgctgtcgtggtacagactggcagttggaaggggccttaagccggctgagaagtttgggcttctgggttgaaatccacagccccggttgaggcctgtgtgctgagtgccagagctggagttttctagcttgtaaatctggagaattaactgatctgaagtgactgggagggg

SEQ ID NO: 120833 - DNA, 3893 bp, Homo sapiens
  Payload ID: 3671
  Gene Symbol: CCDC15
  Gene Name: coiled-coil domain containing 15
  Uniprot ID: Q0P6D6
  ENST ID: ENST00000344762
  CDS Start-End: 260-3115
ataaggctacggatgggcgggacggagcagcccaccgcaaagtggcggtctacttgaggcggttaccttagtactccgagtagactgagtctgtggcgagctgcgggccgattcctggccagtgccatctcagccggagcaggcctcggggcctcagaagcaggcttttatctggcccgaggctcccagccgttcagcgcgtcttcccataacctataccgattattgggactctcggctgcagacacaggagtcacagatgctgggaagtatggcccgaaagaaacctcgaaatacctcaaggttgcccctggctttaaaccccctgaagagcaaggacgtgttggcagtgctggctgagaggaacgaggctatagtaccagttggggcatgggtggaacctgcctcaccaggtagttcggaaatcccagcatatacatcagcatatttaattgaagaagaactaaaggaacagctaagaaaaaaacaagaagctttgaaacattttcagaaacaagttaaataccgagtaaatcaacaaattaggttgagaaaaaagcaacagcttcagaagtcttatgaaagagcacaaaaagaaggctccatagccatgcagtcttcagcaacacacttaacttccaaaaggacaagtgtttttccaaacaatttgaatgttgctattggaagttctaggttacctccttccctgatgcctggggatggaatagaggatgaagagaatcagaacgaattattccaacaacaagcccaggctcttagtgaaactatgaaacaggcacgtcaccggctagcatcctttaaaaccgtgattaaaaaaaagggatcagtgtttccagatgatggaaggaaaagctttcttaccagagaggaagtgctttccaggaaaccagcatccactgggataaatacaggaataagaggagagttgcccattaaggtccatcaaggtcttttagctgctgtaccttaccagaattatatggaaaatcaggaacttgactatgaggaacctgactatgaggaatcttcatctcttgtaactgatgagaaagggaaagaagatttgtttgggagaggccagcaggaccagcaggctatccattctgaagataagaacaaacctttcagcagagttcagaaagtaaaattcaaaaatccattatttgttctgatggaagaggaagaacaaaagcagttacattttgagggccttcaggatattctgccagaagcccaggattattttctagaagcccaaggtgatttgctggaaacccagggtgatttgacaggaatccagagtgttaagccagatacccaggctgttgaaatgaaggttcaggttactgagccagaaggccaggccattgagccagaaggccagcctattaagacagaaactcagggtattatgctgaaagcccagagtattgagctagaagaagggagtattgtgttgaaaacccaggattttctacccacaaatcaggctcttctaacgaaaaaccaggatgttttactcaaagaccactgtgttctccctaaagaccagagtattctactcaaatatcaggaccaggacttcctacccagagaccagcatgttctccacaaagaccaagatattctgccaaaatatcaggaccagaattttctacctaaggaccagaattttttatctagagaccagcatgttctccccaaagaccaagatattctgccaaaatatcaggaccagaattttctacctaaggaccagaattttttgtctagagaccagcatgttctccccaaagaccagaatattctacctaaatatcaaggccaggattttctacctaaagaccaggactttttatctagagaccagcatgttctccccaaagactggaatattctacccaaatgtcaggaccaggattttctacccagagaccaaggtgttcttcccaaagaccaaaatattctacccatatgtcaggaccaggattttctacccagagaccaaggttatcttcctaaagaccaaaatattctacccatatgtcaggaccgggattttctacccagagacctgcatgttctctccaacgaccagaatattctacccaaatgtcaggaccaagattttctaccaaaatatcagaaagtacactttaaggagccatactctgatatgacagatgagaaagggagagaagacttttctctggcagactatcagtgtttgcctcccaaatcccaggaccaggatgacatcaaaaatcagcaacctgcatcttttatgagagaagaaagagtgagagaagaattgcctctggactatcatcaatatgttgtacctaaaatccaggaccaagactcccctagagaacagaacaagcatatcaaactaccctcatcttttgagaaatgggagattgcaagaggaaatactcctggagtgcccttggcttatgataggtatcaatcaggattgagcactgaattccaagctccactggcatttcagtctgacgtggataaagaagaagataagaaagagcgtcaaaagcagtacctgagacatagacgacttttcatggatattgagagagaacaagttaaagaacaacaaaggcaaaaagaacaaaagaagaaaattgaaaaaattaagaaaaagagagagcaagaatgttatgctgcagagcagaggatcctaagaatgaactttcatgaagatccatattcaggagagaagttgagtgagatattagcccagttacaacttcaagaaataaaaggaaccagagaaaaacaacagagagaaaaagaatacctgagatatgtagaagctttacgagcccaaatccaggagaaaatgcagctgtataatattactttacctccactatgctgttgtggtcctgatttttgggatgctcatcctgatacctgtgccaacaactgtattttctataaaaaccacagagcatatactcgggcactacattcattcatcaattcctgtgatgtccctgggggtaattcaactcttcgagtcgcaattcataattttgcttctgcacacaggcggactttgaaaaatctataataagaatctgaaattaactggtagtattttggcttttacttaaaatcatccctgagagagtatttaagaaaagctgttcaagttataaaatatataatctgggaagaaatactgtctcatataataattagattgtaatcattgttttaatctctgtctgggaaccaagattgaaagctgacttacttctctcttctgtcttgtgaaccatacggagcctattattttaaaatatgatcagacaagtaaggcttctcttactttgctctgctctgatcagaagagctcatgtgaagtctttgagattctcttatttatcatctttctaaaactgtgtttttgagcttgacagtactgaaaatgtctggatgaagcagaaaagaaagtgatgaaatgtgtttctgagcatcagagaccatctatattgccattaccttttctagttgtatataagaattcaagattagaagaatttagatttgttgcacatttttttcctcagcattttttcctcttgttttttaaaatgtattgcctctttccccattcagtgacactggacataggaatttttaattgtgtaattttctgttgcaaaaagggtaaataaatcctttgtcttttgaatatcttctatgtgaaataattgtgagtgacatttgaaaaagtgaatctgaagtcaaagtgagtaaattccttatttccctattttttaaaaacctggtatatgacatggctacagggcaaatgaaataaaaattgccatagttggtatgaa

SEQ ID NO: 120834 - DNA, 3924 bp, Homo sapiens
  Payload ID: 3671
  Gene Symbol: CCDC15
  Gene Name: coiled-coil domain containing 15
  ENST ID: ENST00000529051
  CDS Start-End: 260-3148
ataaggctacggatgggcgggacggagcagcccaccgcaaagtggcggtctacttgaggcggttaccttagtactccgagtagactgagtctgtggcgagctgcgggccgattcctggccagtgccatctcagccggagcaggcctcggggcctcagaagcaggcttttatctggcccgaggctcccagccgttcagcgcgtcttcccataacctataccgattattgggactctcggctgcagacacaggagtcacagatgctgggaagtatggcccgaaagaaacctcgaaatacctcaaggttgcccctggctttaaaccccctgaagagcaaggacgtgttggcagtgctggctgagaggaacgaggctatagtaccagttggggcatgggtggaacctgcctcaccaggtagttcggaaatcccagcatatacatcagcatatttaattgaagaagaactaaaggaacagctaagaaaaaaacaagaagctttgaaacattttcagaaacaagttaaataccgagtaaatcaacaaattaggttgagaaaaaagcaacagcttcagaagtcttatgaaagagcacaaaaagaaggctccatagccatgcagtcttcagcaacacacttaacttccaaaaggacaagtgtttttccaaacaatttgaatgttgctattggaagttctaggttacctccttccctgatgcctggggatggaatagaggatgaagagaatcagaacgaattattccaacaacaagcccaggctcttagtgaaactatgaaacaggcacgtcaccggctagcatcctttaaaaccgtgattaaaaaaaagggatcagtgtttccagatgatggaaggaaaagctttcttaccagagaggaagtgctttccaggaaaccagcatccactgggataaatacaggaataagaggagagttgcccattaaggtccatcaaggtcttttagctgctgtaccttaccagaattatatggaaaatcaggaacttgactatgaggaacctgactatgaggaatcttcatctcttgtaactgatgagaaagggaaagaagatttgtttgggagaggccagcaggaccagcaggctatccattctgaagataagaacaaacctttcagcagagttcagaaagtaaaattcaaaaatccattatttgttctgatggaagaggaagaacaaaagcagttacattttgagggccttcaggatattctgccagaagcccaggattattttctagaagcccaaggtgatttgctggaaacccagggtgatttgacaggaatccagagtgttaagccagatacccaggctgttgaaatgaaggttcaggttactgagccagaaggccaggccattgagccagaaggccagcctattaagacagaaactcagggtattatgctgaaagcccagagtattgagctagaagaagggagtattgtgttgaaaacccaggattttctacccacaaatcaggctcttctaacgaaaaaccaggatgttttactcaaagaccactgtgttctccctaaagaccagagtattctactcaaatatcaggaccaggacttcctacccagagaccagcatgttctccacaaagaccaagatattctgccaaaatatcaggaccagaattttctacctaaggaccagaattttttatctagagaccagcatgttctccccaaagaccaagatattctgccaaaatatcaggaccagaattttctacctaaggaccagaattttttgtctagagaccagcatgttctccccaaagaccagaatattctacctaaatatcaaggccaggattttctacctaaagaccaggactttttatctagagaccagcatgttctccccaaagactggaatattctacccaaatgtcaggaccaggattttctacccagagaccaaggtgttcttcccaaagaccaaaatattctacccatatgtcaggaccaggattttctacccagagaccaaggttatcttcctaaagaccaaaatattctacccatatgtcaggaccgggattttctacccagagacctgcatgttctctccaacgaccagaatattctacccaaatgtcaggaccaagattttctaccaaaatatcagaaagtacactttaaggagccatactctgatatgacagatgagaaagggagagaagacttttctctggcagactatcagtgtttgcctcccaaatcccaggaccaggatgacatcaaaaatcagcaacctgcatcttttatgagagaagaaagagtgagagaagaattgcctctggactatcatcaatatgttgtacctaaaatccaggaccaagactcccctagagaacagaacaagcatatcaaactaccctcatcttttgagaaatgggagattgcaagaggaaatactcctggagtgcccttggcttatgataggtatcaatcaggattgagcactgaattccaagctccactggcatttcagtctgacgtggataaagaagaagataagaaagagcgtcaaaagcagtacctgagacatagacgacttttcatggatattgagagagaacaagttaaagaacaacaaaggcaaaaagaacaaaagaagaaaattgaaaaaattaagaaaaagagagagcaagaatgttatgctgcagagcagaggatcctaagaatgaactttcatgaagatccatattcaggagagaagttgagtgagatattagcccagttacaacttcaagaaataaaaggaaccagagaaaaacaacagagagaaaaagaatacctgagttcactttgcctgattatactttatttgtacagatatgtagaagctttacgagcccaaatccaggagaaaatgcagctgtataatattactttacctccactatgctgttgtggtcctgatttttgggatgctcatcctgatacctgtgccaacaactgtattttctataaaaaccacagagcatatactcgggcactacattcattcatcaattcctgtgatgtccctgggggtaattcaactcttcgagtcgcaattcataattttgcttctgcacacaggcggactttgaaaaatctataataagaatctgaaattaactggtagtattttggcttttacttaaaatcatccctgagagagtatttaagaaaagctgttcaagttataaaatatataatctgggaagaaatactgtctcatataataattagattgtaatcattgttttaatctctgtctgggaaccaagattgaaagctgacttacttctctcttctgtcttgtgaaccatacggagcctattattttaaaatatgatcagacaagtaaggcttctcttactttgctctgctctgatcagaagagctcatgtgaagtctttgagattctcttatttatcatctttctaaaactgtgtttttgagcttgacagtactgaaaatgtctggatgaagcagaaaagaaagtgatgaaatgtgtttctgagcatcagagaccatctatattgccattaccttttctagttgtatataagaattcaagattagaagaatttagatttgttgcacatttttttcctcagcattttttcctcttgttttttaaaatgtattgcctctttccccattcagtgacactggacataggaatttttaattgtgtaattttctgttgcaaaaagggtaaataaatcctttgtcttttgaatatcttctatgtgaaataattgtgagtgacatttgaaaaagtgaatctgaagtcaaagtgagtaaattccttatttccctattttttaaaaacctggtatatgacatggctacagggcaaatgaaataaaaattgccatagttggtatg

SEQ ID NO: 120835 - DNA, 3685 bp, Homo sapiens
  Payload ID: 3672
  Gene Symbol: CCDC150
  Gene Name: coiled-coil domain containing 150
  Uniprot ID: Q8NCX0
  ENST ID: ENST00000389175
  CDS Start-End: 136-3441
agttcccgacatgccctgccacgggtgcgcctgcgtaccggagctactgcgccggggagcgggttggtttaaaatgctgtgttagttccacggaaacccgctcgcctgctgcagtacggagcctcaggcggacagatggactgtaaggtacatatggaaactacagtgtccagaccggtcctttctccaacccacatcaacgctacagcttctgaaacattcacagtacttcagcaaaggatgagaatagttgaggaacagaccagttcactgagggatgacctaataatgttggattttggtgaaaaaagaggctatttggaagctccagactgtttagaagacctggacagccagaaagtcattagtcctatccaaaatgaagcaatttgtgcaggaaaaacagatattttatggaagaactgtgagtttctggtaaatcgaatgtgccgtcttgaaagcctcatgcagtccttgaagatgaacatctttcggctgcaaactgaaaaggatttgaatcctcagaaaacagcttttctgaaagatcgactgaatgcaatacaggaagagcattctaaggacctgaagctgttgcatctcgaagttatgaatttgcgccagcaactgagagctgtaaaagaggaagaagacaaggcacaagatgaggtgcaaaggttgactgccactctgaagattgcctcgcagacaaagaagaatgcagccattattgaagaggaactgaagaccacaaaacgtaaaatgaaccttaaaattcaagagctaaggagacaactggctcaggagaagtaccttagggaatctttagagaaatcagcatcagccatgctcctcaaaatacaagaaatgggatcaacagtggaggtagaacgaaaacaggtgcacattttgcagcaaaactgcattgctctacgtgattctatacagagcgctcaagaactactggcccaggaacaaaaaaaaaaagaagagttggagattgctacttcacagctcaaatctgatctaacttctagagatgacctcatttccaagttggttgaagaaaataagaacctgcagatatctttcaacaaggaacatgaagaaaatgcatatttgaggtccgaaataatgtctcttcatgaagcatcagaaaaagcacaagttttgaatgaccaattgactaaaaagtgttcagagttgagctgcatgcttcagactgttactatggaaaaagccagaatcattgctgaccatcaggccattctgcaggtagagcagaaaatgatgacgcagacatttcaagaacaaaacttattgctggatgcagcccatgccagtatcacaaatgaactacagactgttcagaatgagaaaacccaactccaggcacatctggatcatttaatccttgagcataaccagtgtatccagaaagcacaggatgctgaaaagagaacagctgtgcaaaaagagctgctagaatcaactattgcaagattgcgaggtgaattggaagcatcaatgcaagagaagaagtctctgctagaggagaaagaaagatttcagagggaggttaataaaacagaaaaagaaatagtgcaagaaagatgcaatttggaaaaggaattagctaaaaacaaggtagacataaatacattaactcataacctgcagactcttgaagaagagaataagcacctggcagatcaaatggcttccctagaacttcagcaagtcacttctgattaccatgggcttgcccaacagaaggtggaaaaaatcactgaaagtaaaaataaactggcctatgaaaacggaaaactccagataaaagttaaacagctagaagaacaagtacagtcttttactgacaccagcttacagaatgatcatctacgcaagatgaataagtatttacagactaaatatgctcaggcaaactcagaactcagtgccaagagggtacacctgcagcaggcagatgctcacctgaaagaagtgaaatctattcttgaaagaagtaaagaggagctgtcccgaacagtgaagtgtcgtaatgcggccctgaaagagagtcagaagttgaaagaagacctcgaggctgtggaggacagggaaaacaagaaggtgggaaactttcagcgacaattggcagaagctaaagaagacaactgcaaagtcacaatcatgttggagaatgtgctggcttctcacagtaagatgcaaggtgctctggagaaagtacaaatagagcttgggcggagggattcagagattgcaggcctcaagaaagaaagggatctcaatcaacagagggtgcagaagctggaagctgaagtggaccagtggcaggccaggatgcttgtcatggaggaccagcacaacagtgagattgaatctctacaaaaagctctaggtgtagctagagaagacaacaggaaacttgctatgagtctggaacaagctctccagacaaataatcatctgcaaacaaagctagatcacattcaagagcaattggaaagcaaagaacttgagcgacagaatttggaaaccttcaaagaccggatgactgaagagtccaaagtggaagcagaattgcatgctgaacgcatagaagctctaagaaagcagtttcaaaccgagagagaaactacaaagaaagtggcacaacgggaagtggctgagctgaagaaagcccttgatgaagctaacttcagatcagtggaagtgtcccggaccaaccgagagctgcgacagaaacttgcagagctagaaaaaatactagaaagtaacaaggagaaaataaagaatcaaaagacccaaattaagctccacttgtcagctaaggcgaataatgctcagaatatagaaaggatgaagcaaatagaaaaagaattgaagcaaatggagctaattaaggatcaatatcagaaaaagaactatgaacagtctttgagtatccagagatttgtgtgtgaaatgactaacctgcagaaagagatgcagatgttggctaagagccaatatgatgcctcagtgcggaataaacagcaagagctgcacctagaagcagagcggaaaataaggcaggagctagagaatcggtgccaggaattggaagaaactgtcagacacctgaagaaatgtaaagaggcaacagagaatacgctgaaagaagccagtgtggaatcagaacagataacagctaatctggaagaagctcatcgctggtttaagcacaggtttgatggtctacaacttgagctgacaaaaaaccggttgcagaggccttctggggaagacaggtggcaggaaaaggaccaagatgtaaaacatgatgtcatgtccaaccaatctgttctgcatcgatgggagagaaaacagaatcttaggcccatgcccaagaagtatcattctgaggtacagaggaagtgatgtccttgacaagggagcttctttatgtgtagctacactccatgattccaagagcccagcagccggggctggcctgtttctagagtcataagaacatgaagtctttgatgtgggctgaagattttggacctgagtttatcactttatgaactcttatatcagtacaaaactacccctttttttgtcccttttcacattttccacccaataaatttgtgttaatttgttgtatgataggagatgg

SEQ ID NO: 120836 - DNA, 2243 bp, Homo sapiens
  Payload ID: 3672
  Gene Symbol: CCDC150
  Gene Name: coiled-coil domain containing 150
  ENST ID: ENST00000409270
  CDS Start-End: 241-2007
ttaaaggaggcctcattagatgcgctctctgacagggaagttggcataaggtctgtttctttgctgggtcatattttacagtgtgatctcttcactctgaaagcagagaaacacattttcaatatattttccattacggctccttctagaacactgtgttgtttctcctagtaaaggggctattccttgaaaaataactctaggtttagctgattttattgtttttattaataattgacgatgcctctaagaaaaaggaaatccccagagaggactgcatcttcaaaatcccccgaaatctctaggtcccatgtaaacagtataaaggaaagaacgtcatcagttggtttgcctagtgttattccaaactctacacgccgtgtgagctttgcacctaacctgccttctatgaaaacatctcaggatattggagactctaggatctctctaaagactcttttgaatgctattaaaaccatggagggaagactggaaggcaaaatagagattctagcctcaagacctttaataaatgatgaatcaccaaattttcttaaacaggactcggtgaaatctattcttgaaagaagtaaagaggagctgtcccgaacagtgaagtgtcgtaatgcggccctgaaagagagtcagaagttgaaagaagacctcgaggctgtggaggacagggaaaacaagaaggtgggaaactttcagcgacaattggcagaagctaaagaagacaactgcaaagtcacaatcatgttggagaatgtgctggcttctcacagtaagatgcaaggtgctctggagaaagtacaaatagagcttgggcggagggattcagagattgcaggcctcaagaaagaaagggatctcaatcaacagagggtgcagaagctggaagctgaagtggaccagtggcaggccaggatgcttgtcatggaggaccagcacaacagtgagattgaatctctacaaaaagctctaggtgtagctagagaagacaacaggaaacttgctatgagtctggaacaagctctccagacaaataatcatctgcaaacaaagctagatcacattcaagagcaattggaaagcaaagaacttgagcgacagaatttggaaaccttcaaagaccggatgactgaagagtccaaagtggaagcagaattgcatgctgaacgcatagaagctctaagaaagcagtttcaaaccgagagagaaactacaaagaaagtggcacaacgggaagtggctgagctgaagaaagcccttgatgaagctaacttcagatcagtggaagtgtcccggaccaaccgagagctgcgacagaaacttgcagagctagaaaaaatactagaaagtaacaaggagaaaataaagaatcaaaagacccaaattaagctccacttgtcagctaaggcgaataatgctcagaatatagaaaggatgaagcaaatagaaaaagaattgaagcaaatggagctaattaaggatcaatatcagaaaaagaactatgaacagtctttgagtatccagagatttgtgtgtgaaatgactaacctgcagaaagagatgcagatgttggctaagagccaatatgatgcctcagtgcggaataaacagcaagagctgcacctagaagcagagcggaaaataaggcaggagctagagaatcggtgccaggaattggaagaaactgtcagacacctgaagaaatgtaaagaggcaacagagaatacgctgaaagaagccagtgtggaatcagaacagataacagctaatctggaagaagctcatcgctggtttaagcacaggtttgatggtctacaacttgagctgacaaaaaaccggttgcagaggccttctggggaagacaggtggcaggaaaaggaccaagatgtaaaacatgatgtcatgtccaaccaatctgttctgcatcgatgggagagaaaacagaatcttaggcccatgcccaagaagtatcattctgaggtacagaggaagtgatgtccttgacaagggagcttctttatgtgtagctacactccatgattccaagagcccagcagccggggctggcctgtttctagagtcataagaacatgaagtctttgatgtgggctgaagattttggacctgagtttatcactttatgaactcttatatcagtacaaaactacccctttttttgtcccttttcacattttccacccaataaatttgtgttaatttgttgtatgata

SEQ ID NO: 120837 - DNA, 3047 bp, Homo sapiens
  Payload ID: 3672
  Gene Symbol: CCDC150
  Gene Name: coiled-coil domain containing 150
  ENST ID: ENST00000431807
  CDS Start-End: 214-420
acgcattccctgagcgccgccggatgccggcctgggtcccgcccagggctgagggccctcctgggccgggaaaactacagttcccgacatgccctgccacgggtgcgcctgcgtaccggagctactgcgccggggagcgggttggtttaaaatgctgtgttagttccacggaaacccgctcgcctgctgcagtacggagcctcaggcggacagatggactgtaaggtacatatggaaactacagtgtccagaccggtcctttctccaacccacatcaacgctacagcttctgaaacattcacagtacttcagcaaaggatgagaatagttgaggaacagaccagttcactgagggatgacctaataatgttggattttggtgaaaaaagaagaatgcagccattattgaagaggaactgaagaccacaaaacgtaaaatgaaccttaaaattcaagagcttctagagatgacctcatttccaagttggttgaagaaaataagaacctgcagatatctttcaacaaggaacatgaagaaaatgcatatttgaggtccgaaataatgtctcttcatgaagcatcagaaaaagcacaagttttgaatgaccaattgactaaaaagtgttcagagttgagctgcatgcttcagactgttactatggaaaaagccagaatcattgctgaccatcaggccattctgcaggtagagcagaaaatgatgacgcagacatttcaagaacaaaacttattgctggatgcagcccatgccagtatcacaaatgaactacagactgttcagaatgagaaaacccaactccaggcacatctggatcatttaatccttgagcataaccagtgtatccagaaagcacaggatgctgaaaagagaacagctgtgcaaaaagagctgctagaatcaactattgcaagattgcgaggtgaattggaagcatcaatgcaagagaagaagtctctgctagaggagaaagaaagatttcagagggaggttaataaaacagaaaaagaaatagtgcaagaaagatgcaatttggaaaaggaattagctaaaaacaaggtagacataaatacattaactcataacctgcagactcttgaagaagagaataagcacctggcagatcaaatggcttccctagaacttcagcaagtcacttctgattaccatgggcttgcccaacagaaggtggaaaaaatcactgaaagtaaaaataaactggcctatgaaaacggaaaactccagataaaagttaaacagctagaagaacaagtacagtcttttactgacaccagcttacagaatgatcatctacgcaagatgaataagtatttacagactaaatatgctcaggtgaaatctattcttgaaagaagtaaagaggagctgtcccgaacagtgaagtgtcgtaatgcggccctgaaagagagtcagaagttgaaagaagacctcgaggctgtggaggacagggaaaacaagaaggtgggaaactttcagcgacaattggcagaagctaaagaagacaactgcaaagtcacaatcatgttggagaatgtgctggcttctcacagtaagatgcaaggtgctctggagaaagtacaaatagagcttgggcggagggattcagagattgcaggcctcaagaaagaaagggatctcaatcaacagagggtgcagaagctggaagctgaagtggaccagtggcaggccaggatgcttgtcatggaggaccagcacaacagtgagattgaatctctacaaaaagctctaggtgtagctagagaagacaacaggaaacttgctatgagtctggaacaagctctccagacaaataatcatctgcaaacaaagctagatcacattcaagagcaattggaaagcaaagaacttgagcgacagaatttggaaaccttcaaagaccggatgactgaagagtccaaagtggaagcagaattgcatgctgaacgcatagaagctctaagaaagcagtttcaaaccgagagagaaactacaaagaaagtggcacaacgggaagtggctgagctgaagaaagcccttgatgaagctaacttcagatcagtggaagtgtcccggaccaaccgagagctgcgacagaaacttgcagagctagaaaaaatactagaaagtaacaaggagaaaataaagaatcaaaagacccaaattaagctccacttgtcagctaaggcgaataatgctcagaatatagaaaggatgaagcaaatagaaaaagaattgaagcaaatggagctaattaaggatcaatatcagaaaaagaactatgaacagtctttgagtatccagagatttgtgtgtgaaatgactaacctgcagaaagagatgcagatgttggctaagagccaatatgatgcctcagtgcggaataaacagcaagagctgcacctagaagcagagcggaaaataaggcaggagctagagaatcggtgccaggaattggaagaaactgtcagacacctgaagaaatgtaaagaggcaacagagaatacgctgaaagaagccagtgtggaatcagaacagataacagctaatctggaagaagctcatcgctggtttaagcacaggtttgatggtctacaacttgagctgacaaaaaaccggttgcagaggccttctggggaagacaggtggcaggaaaaggaccaagatgtaaaacatgatgtcatgtccaaccaatctgttctgcatcgatgggagagaaaacagaatcttaggcccatgcccaagaagtatcattctgaggtacagaggaagtgatgtccttgacaagggagcttctttatgtgtagctacactccatgattccaagagcccagcagccggggctggcctgtttctagagtcataagaacatgaagtctttgatgtgggctgaagattttggacctgagtttatcactttatgaactcttatatcagtacaaaactacccctttttttgtcccttttcacattttccacccaataaatttgtgttaatttgttgtatgatagg

SEQ ID NO: 120838 - DNA, 2639 bp, Homo sapiens
  Payload ID: 3672
  Gene Symbol: CCDC150
  Gene Name: coiled-coil domain containing 150
  ENST ID: ENST00000424427
  CDS Start-End: 259-807
gatgaggtcacagagttgttaaaggaggcctcattagatgcgctctctgacagggaagttggcataaggtctgtttctttgctgggtcatattttacagtgtgatctcttcactctgaaagcagagaaacacattttcaatatattttccattacggctccttctagaacactgtgttgtttctcctagtaaaggggctattccttgaaaaataactctaggtttagctgattttattgtttttattaataattgacgatgcctctaagaaaaaggaaatccccagagaggactgcatcttcaaaatcccccgaaatctctaggtcccatgtaaacagtataaaggaaagaacgtcatcagttggtttgcctagtgttattccaaactctacacgccgtgtgagctttgcacctaacctgccttctatgaaaacatctcaggatattggagactctaggatctctctaaagactcttttgaatgctattaaaaccatggagggaagactggaaggcaaaatagagattctagcctcaagacctttaataaatgatgaatcaccaaattttcttaaacaggactcggtgaaatctattcttgaaagaagtaaagaggagctgtcccgaacagtgaagtgtcgtaatgcggccctgaaagagagtcagaagttgaaagaagacctcgaggctgtggaggacagggaaaacaagaaggtgggaaactttcagcgacaattggcagaagctaaagaagacaactgcaaagtcacaatcatgttggagaatgtgctggcttctcacagttaaagaataaatggtctgagtttaatagggcatattgcctctatgttatgagagaacaaggatctcaatcaacagagggtgcagaagctggaagctgaagtggaccagtggcaggccaggatgcttgtcatggaggaccagcacaacagtgagattgaatctctacaaaaagctctaggtgtagctagagaagacaacaggaaacttgctatgagtctggaacaagctctccagacaaataatcatctgcaaacaaagctagatcacattcaagagcaattggaaagcaaagaacttgagcgacagaatttggaaaccttcaaagaccggatgactgaagagtccaaagtggaagcagaattgcatgctgaacgcatagaagctctaagaaagcagtttcaaaccgagagagaaactacaaagaaagtggcacaacgggaagtggctgagctgaagaaagcccttgatgaagctaacttcagatcagtggaagtgtcccggaccaaccgagagctgcgacagaaacttgcagagctagaaaaaatactagaaagtaacaaggagaaaataaagaatcaaaagacccaaattaagctccacttgtcagctaaggcgaataatgctcagaatatagaaaggatgaaggttgtatgggaaacctcttctcacttcctggataccctgtgaggatgtagtcagtcaatggtgtctagggaagacaggttttagaaccctagcagccccatgtattctctgggaattatagccagttgtctttggggagactttttcagtggagtcactgctgtgtaaatgtttgatttctcatttgctgccagtgtcacattccggctccctatctgtcccttccgtgttgattgtactggactttgctcttttgggatcagtgggctagatgggaaagaaagctcagcaggaactggtaactttgggtctcatattggattctttctgtcatcctataggcaaaaagagcaagccagtttttccactgatcatctttttatgttattttccaattacttttagcaaatagaaaaagaattgaagcaaatggagctaattaaggatcaatatcagaaaaagaactatgaacagtctttgagtatccagagatttgtgtgtgaaatgactaacctgcagaaagagatgcagatgttggctaagagccaatatgatgcctcagtgcggaataaacagcaagagctgcacctagaagcagagcggaaaataaggcaggagctagagaatcggtgccaggaattggaagaaactgtcagacacctgaagaaatgtaaagaggcaacagagaatacgctgaaagaagccagtgtggaatcagaacagataacagctaatctggaagaagctcatcgctggtttaagcacaggtttgatggtctacaacttgagctgacaaaaaaccggttgcagaggccttctggggaagacaggtggcaggaaaaggaccaagatgtaaaacatgatgtcatgtccaaccaatctgttctgcatcgatgggagagaaaacagaatcttaggcccatgcccaagaagtatcattctgaggtacagaggaagtgatgtccttgacaagggagcttctttatgtgtagctacactccatgattccaagagcccagcagccggggctggcctgtttctagagtcataagaacatgaagtctttgatgtgggctgaagattttggacctgagtttatcactttatgaactcttatatcagtacaaaactacccctttttttgtcccttttcacattttccacccaataaatttgtgttaatttgttgt

SEQ ID NO: 120839 - DNA, 2614 bp, Homo sapiens
  Payload ID: 3672
  Gene Symbol: CCDC150
  Gene Name: coiled-coil domain containing 150
  Uniprot ID: Q8NCX0
  ENST ID: ENST00000448409
  CDS Start-End: 212-1465
tgacagggaagttggcataaggtctgtttctttgctgggtcatattttacagtgtgatctcttcactctgaaagcagagaaacacattttcaatatattttccattacggctccttctagaacactgtgttgtttctcctagtaaaggggctattccttgaaaaataactctaggtttagctgattttattgtttttattaataattgacgatgcctctaagaaaaaggaaatccccagagaggactgcatcttcaaaatcccccgaaatctctaggtcccatgtaaacagtataaaggaaagaacgtcatcagttggtttgcctagtgttattccaaactctacacgccgtgtgagctttgcacctaacctgccttctatgaaaacatctcaggatattggagactctaggatctctctaaagactcttttgaatgctattaaaaccatggagggaagactggaaggcaaaatagagattctagcctcaagacctttaataaatgatgaatcaccaaattttcttaaacaggactcggtgaaatctattcttgaaagaagtaaagaggagctgtcccgaacagtgaagtgtcgtaatgcggccctgaaagagagtcagaagttgaaagaagacctcgaggctgtggaggacagggaaaacaagaaggtgggaaactttcagcgacaattggcagaagctaaagaagacaactgcaaagtcacaatcatgttggagaatgtgctggcttctcacagtaagatgcaaggtgctctggagaaagtacaaatagagcttgggcggagggattcagagattgcaggcctcaagaaagaaagggatctcaatcaacagagggtgcagaagctggaagctgaagtggaccagtggcaggccaggatgcttgtcatggaggaccagcacaacagtgagattgaatctctacaaaaagctctaggtgtagctagagaagacaacaggaaacttgctatgagtctggaacaagctctccagacaaataatcatctgcaaacaaagctagatcacattcaagagcaattggaaagcaaagaacttgagcgacagaatttggaaaccttcaaagaccggatgactgaagagtccaaagtggaagcagaattgcatgctgaacgcatagaagctctaagaaagcagtttcaaaccgagagagaaactacaaagaaagtggcacaacgggaagtggctgagctgaagaaagcccttgatgaagctaacttcagatcagtggaagtgtcccggaccaaccgagagctgcgacagaaacttgcagagctagaaaaaatactagaaagtaacaaggagaaaataaagaatcaaaagacccaaattaagctccacttgtcagctaaggcgaataatgctcagaatatagaaaggatgaaggttgtatgggaaacctcttctcacttcctggataccctgtgaggatgtagtcagtcaatggtgtctagggaagacaggttttagaaccctagcagccccatgtattctctgggaattatagccagttgtctttggggagactttttcagtggagtcactgctgtgtaaatgtttgatttctcatttgctgccagtgtcacattccggctccctatctgtcccttccgtgttgattgtactggactttgctcttttgggatcagtgggctagatgggaaagaaagctcagcaggaactggtaactttgggtctcatattggattctttctgtcatcctataggcaaaaagagcaagccagtttttccactgatcatctttttatgttattttccaattacttttagcaaatagaaaaagaattgaagcaaatggagctaattaaggatcaatatcagaaaaagaactatgaacagtctttgagtatccagagatttgtgtgtgaaatgactaacctgcagaaagagatgcagatgttggctaagagccaatatgatgcctcagtgcggaataaacagcaagagctgcacctagaagcagagcggaaaataaggcaggagctagagaatcggtgccaggaattggaagaaactgtcagacacctgaagaaatgtaaagaggcaacagagaatacgctgaaagaagccagtgtggaatcagaacagataacagctaatctggaagaagctcatcgctggtttaagcacaggtttgatggtctacaacttgagctgacaaaaaaccggttgcagaggccttctggggaagacaggtggcaggaaaaggaccaagatgtaaaacatgatgtcatgtccaaccaatctgttctgcatcgatgggagagaaaacagaatcttaggcccatgcccaagaagtatcattctgaggtacagaggaagtgatgtccttgacaagggagcttctttatgtgtagctacactccatgattccaagagcccagcagccggggctggcctgtttctagagtcataagaacatgaagtctttgatgtgggctgaagattttggacctgagtttatcactttatgaactcttatatcagtacaaaactacccctttttttgtcccttttcacattttccacccaataaatttgtgttaatttgttgta

SEQ ID NO: 120840 - DNA, 2107 bp, Homo sapiens
  Payload ID: 3673
  Gene Symbol: CCDC151
  Gene Name: coiled-coil domain containing 151
  Uniprot ID: A5D8V7
  ENST ID: ENST00000356392
  CDS Start-End: 89-1876
aggaatccgagctgacggatccctgacaggggcgactgactcctagttatccccctaacccctaggggccttcagccccaaccccatcatgacatctcctctgtgcagggcggcctccgccaacgccctgcctcctcaggaccaggcttcgacgccctcttccagggtcaagggcagggaggcttcgggcaaacccagccacctccgaggcaagggcacagcccaggcgtggaccccaggccgttccaagggaggatccttccacagaggtgcagggaagccctctgtgcactctcaggtggctgagttacataaaaagatacaactgttagagggtgaccggaaggctttttttgagagctctcagtggaacatcaagaagaaccaggagaccatcagtcagctccgcaaggagactaaggcactggaactaaagctgctggacctgctcaagggagatgagaaagtggtccaggcagtgattcgcgaatggaagtgggagaagccatacctgaagaacaggacaggacaggccctggagcacctagaccaccggctgagggagaaggtgaagcagcagaacgccctgcggcaccaggtggtgttgcggcagaggcggctggaggagctccagctgcagcacagcctgcgccttctggagatggcggaggcgcaaaacagacacacggaggtggccaagaccatgcggaacctggagaaccgcctggagaaggcccagatgaaggcgcaggaggccgagcacattaccagcgtgtacctgcagctcaaggcctatctaatggacgagagcctcaacttggagaaccggctggactccatggaggctgaggtggtgaggaccaaacatgagctggaggcactgcacgtggtgaaccaagaggccctcaatgcccgggacattgccaagaaccagctgcagtacctagaggagaccttggttcgagagcgcaagaagcgggaacgctacataagtgagtgcaagaagcgcgccgaggagaagaaactggagaacgagcgcatggagcgcaagacccaccgcgagcacctgctgctacagtccgacgacaccatccaggacagcctgcatgccaaggaggaggagctgcggcagcgctggagcatgtaccagatggaggtgatctttggcaaggtcaaggacgccactggcactgacgagacgcactcgttggtgcggcggttcctggcccagggcgacaccttcgcgcagttggagacgctcaagagcgagaacgagcagacgttggtgaggctgaagcaggagaagcaacaactgcagcgggagctggaagacctcaagtactcgggggaggccacgctggtgagccagcagaaactgcaagccgaggcgcaggagcgtctcaagaaggaggagcggcggcacgccgaggccaaggaccagctggagcgcgccttgcgggcgatgcaagtggccaaggacagcctggagcacctggccagcaagctgatccacatcactgtggaggacggccgcttcgcgggaaaggagctggatccccaggcagataactatgtgccaaacctgctgggcctcgtggaggaaaagctgctgaaactgcaggcgcagctccagggccacgacgtgcaggagatgctgtgccacatcgctaaccgcgagttcctcgccagcttagagggaaggctgcccgaatacaacacccgcatcgccctgccccttgccacttccaaggacaagttttttgacgaagagagtgaggaggaggacaacgaggtagtgacccgcgcatcactcaagatccgttcccagaaattaatcgaaagtcacaagaagcaccgtcgctctcggaggtcctagactcgtcctgacacccaccaggcggcccccttcggagcccccgatccctccgggtctagcgcaggccccacggggccccttcaggggctgaacgcggcccggaccgggaacggaggcggccagcggcgcccggaggggaggaaggggccgggccagacgttcccacagtaaatctccccagctgggtccgccccggcctcagagttgcgcaataaatgttaccgaccatgc

SEQ ID NO: 120841 - DNA, 1943 bp, Homo sapiens
  Payload ID: 3673
  Gene Symbol: CCDC151
  Gene Name: coiled-coil domain containing 151
  ENST ID: ENST00000591179
  CDS Start-End: 106-1713
gcatttttcagagccctaggaatccgagctgacggatccctgacaggggcgactgactcctagttatccccctaacccctaggggccttcagccccaaccccatcatgacatctcctctgtgcagggcggcctccgccaacgccctgcctcctcaggaccaggcttcgacgccctcttccagggtcaagggcagggaggcttcgggcaaacccagccacctccgaggcaagggcacagcccaggcgtggaccccaggccgttccaagggaggatccttccacagaggtgcagggaagccctctgtgcactctcaggtggctgagttacataaaaagatacaactgttagagggtgaccggaaggctttttttgagagctctcagtggaacatcaagaagaaccaggagaccatcagtcagctccgcaaggagactaaggcactggaactaaagctgctggacctgctcaaggccctggagcacctagaccaccggctgagggagaaggtgaagcagcagaacgccctgcggcaccaggtggtgttgcggcagaggcggctggaggagctccagctgcagcacagcctgcgccttctggagatggcggaggcgcaaaacagacacacggaggtggccaaggacgagagcctcaacttggagaaccggctggactccatggaggctgaggtggtgaggaccaaacatgagctggaggcactgcacgtggtgaaccaagaggccctcaatgcccgggacattgccaagaaccagctgcagtacctagaggagaccttggttcgagagcgcaagaagcgggaacgctacataagtgagtgcaagaagcgcgccgaggagaagaaactggagaacgagcgcatggagcgcaagacccaccgcgagcacctgctgctacagtccgacgacaccatccaggacagcctgcatgccaaggaggaggagctgcggcagcgctggagcatgtaccagatggaggtgatctttggcaaggtcaaggacgccactggcactgacgagacgcactcgttggtgcggcggttcctggcccagggcgacaccttcgcgcagttggagacgctcaagagcgagaacgagcagacgttggtgaggctgaagcaggagaagcaacaactgcagcgggagctggaagacctcaagtactcgggggaggccacgctggtgagccagcagaaactgcaagccgaggcgcaggagcgtctcaagaaggaggagcggcggcacgccgaggccaaggaccagctggagcgcgccttgcgggcgatgcaagtggccaaggacagcctggagcacctggccagcaagctgatccacatcactgtggaggacggccgcttcgcgggaaaggagctggatccccaggcagataactatgtgccaaacctgctgggcctcgtggaggaaaagctgctgaaactgcaggcgcagctccagggccacgacgtgcaggagatgctgtgccacatcgctaaccgcgagttcctcgccagcttagagggaaggctgcccgaatacaacacccgcatcgccctgccccttgccacttccaaggacaagttttttgacgaagagagtgaggaggaggacaacgaggtagtgacccgcgcatcactcaagatccgttcccagaaattaatcgaaagtcacaagaagcaccgtcgctctcggaggtcctagactcgtcctgacacccaccaggcggcccccttcggagcccccgatccctccgggtctagcgcaggccccacggggccccttcaggggctgaacgcggcccggaccgggaacggaggcggccagcggcgcccggaggggaggaaggggccgggccagacgttcccacagtaaatctccccagctgggtccgccccggcctcagagttgcgcaataaatgttaccgaccatg

SEQ ID NO: 120842 - DNA, 2448 bp, Homo sapiens
  Payload ID: 3673
  Gene Symbol: CCDC151
  Gene Name: coiled-coil domain containing 151
  ENST ID: ENST00000591345
  CDS Start-End: 163-510
aggcggttacctggcaaccgagagatgcggagcgcaaccacctagcggtcggaaagtgcatttttcagagccctaggaatccgagctgacggatccctgacaggggcgactgactcctagttatccccctaacccctaggggccttcagccccaaccccatcatgacatctcctctgtgcagggcggcctccgccaacgccctgcctcctcaggaccaggcttcgacgccctcttccagggtcaagggcagggaggcttcgggcaaacccagccacctccgaggcaagggcacagcccaggcgtggaccccaggccgttccaagggaggatccttccacagaggtgcagggaagccctctgtgcactctcaggtggctgagttacataaaaagatacaactgttagaatctcactctgttgccaggtgggagtgcagtggaacgatttcggctcactgcaacctccgcctcccggaatctcttgaacccgggaggcggaggctgtggtgagccgagattgcaccattgcactgcagcctgggcaacaagagtgaaactccatctcaaaaaaaaaaaaaaagttgatgattgcaaaaaaggtctttcctctgggatgttgcacccatgcacccacccagtaactgtgtgtctgtccacctcacctgcctgccagagggtgaccggaaggctttttttgagagctctcagtggaacatcaagaagaaccaggagaccatcagtcagctccgcaaggagactaaggcactggaactaaagctgctggacctgctcaagggagatgagaaagtggtccaggcagtgattcgcgaatggaagtgggagaagccatacctgaagaacaggacaggacaggccctggagcacctagaccaccggctgagggagaaggtgaagcagcagaacgccctgcggcaccaggtggtgttgcggcagaggcggctggaggagctccagctgcagcacagcctgcgccttctggagatggcggaggcgcaaaacagacacacggaggtggccaagaccatgcggaacctggagaaccgcctggagaaggcccagatgaaggcgcaggaggccgagcacattaccagcgtgtacctgcagctcaaggcctatctaatggacgagagcctcaacttggagaaccggctggactccatggaggctgaggtggtgaggaccaaacatgagctggaggcactgcacgtggtgaaccaagaggccctcaatgcccgggacattgccaagaaccagctgcagtacctagaggagaccttggttcgagagcgcaagaagcgggaacgctacataagtgagtgcaagaagcgcgccgaggagaagaaactggagaacgagcgcatggagcgcaagacccaccgcgagcacctgctgctacagtccgacgacaccatccaggacagcctgcatgccaaggaggaggagctgcggcagcgctggagcatgtaccagatggaggtgatctttggcaaggtcaaggacgccactggcactgacgagacgcactcgttggtgcggcggttcctggcccagggcgacaccttcgcgcagttggagacgctcaagagcgagaacgagcagacgttggtgaggctgaagcaggagaagcaacaactgcagcgggagctggaagacctcaagtactcgggggaggccacgctggtgagccagcagaaactgcaagccgaggcgcaggagcgtctcaagaaggaggagcggcggcacgccgaggccaaggaccagctggagcgcgccttgcgggcgatgcaagtggccaaggacagcctggagcacctggccagcaagctgatccacatcactgtggaggacggccgcttcgcgggaaaggagctggatccccaggcagataactatgtgccaaacctgctgggcctcgtggaggaaaagctgctgaaactgcaggcgcagctccagggccacgacgtgcaggagatgctgtgccacatcgctaaccgcgagttcctcgccagcttagagggaaggctgcccgaatacaacacccgcatcgccctgccccttgccacttccaaggacaagttttttgacgaagagagtgaggaggaggacaacgaggtagtgacccgcgcatcactcaagatccgttcccagaaattaatcgaaagtcacaagaagcaccgtcgctctcggaggtcctagactcgtcctgacacccaccaggcggcccccttcggagcccccgatccctccgggtctagcgcaggccccacggggccccttcaggggctgaacgcggcccggaccgggaacggaggcggccagcggcgcccggaggggaggaaggggccgggccagacgttcccacagtaaatctccccagctgggtccgccccggcctcagagttgcgcaataaatgttaccgaccatgc

SEQ ID NO: 120843 - DNA, 1867 bp, Homo sapiens
  Payload ID: 3673
  Gene Symbol: CCDC151
  Gene Name: coiled-coil domain containing 151
  ENST ID: ENST00000586836
  CDS Start-End: 423-1637
cacacccacacatgcaccctccggttgccccctgtaagaaactgaggtgccctcccacccgctcgttcacacctacacgaggccggagcaaagagggtgaccggaaggctttttttgagagctctcagtggaacatcaagaagaaccaggagaccatcagtcagctccgcaaggagactaaggcactggaactaaagctgctggacctgctcaagggagatgagaaagtggtccaggcagtgattcgcgaatggaagtgggagaagccatacctgaagaacaggacaggacaggccctggagcacctagaccaccggctgagggagaaggtgaagcagcagaacgccctgcggcaccaggtggtgttgcggcagaggcggctggaggagctccagctgcagcacagcctgcgccttctggagatggcggaggcgcaaaacagacacacggaggtggccaagaccatgcggaacctggagaaccgcctggagaaggcccagatgaaggcgcaggaggccgagcacattaccagcgtgtacctgcagctcaaggcctatctaatggacgagagcctcaacttggagaaccggctggactccatggaggctgaggtggtgaggaccaaacatgagctggaggcactgcacgtggtgaaccaagaggccctcaatgcccgggacattgccaagaaccagctgcagtacctagaggagaccttggttcgagagcgcaagaagcgggaacgctacataagtgagtgcaagaagcgcgccgaggagaagaaactggagaacgagcgcatggagcgcaagacccaccgcgagcacctgctgctacagtccgacgacaccatccaggacagcctgcatgccaaggaggaggagctgcggcagcgctggagcatgtaccagatggaggtgatctttggcaaggtcaaggacgccactggcactgacgagacgcactcgttggtgcggcggttcctggcccagggcgacaccttcgcgcagttggagacgctcaagagcgagaacgagcagacgttggtgaggctgaagcaggagaagcaacaactgcagcgggagctggaagacctcaagtactcgggggaggccacgctggtgagccagcagaaactgcaagccgaggcgcaggagcgtctcaagaaggaggagcggcggcacgccgaggccaaggaccagctggagcgcgccttgcgggcgatgcaagtggccaaggacagcctggagcacctggccagcaagctgatccacatcactgtggaggacggccgcttcgcgggaaaggagctggatccccaggcagataactatgtgccaaacctgctgggcctcgtggaggaaaagctgctgaaactgcaggcgcagctccagggccacgacgtgcaggagatgctgtgccacatcgctaaccgcgagttcctcgccagcttagagggaaggctgcccgaatacaacacccgcatcgccctgccccttgccacttccaaggacaagttttttgacgaagagagtgaggaggaggacaacgaggtagtgacccgcgcatcactcaagatccgttcccagaaattaatcgaaagtcacaagaagcaccgtcgctctcggaggtcctagactcgtcctgacacccaccaggcggcccccttcggagcccccgatccctccgggtctagcgcaggccccacggggccccttcaggggctgaacgcggcccggaccgggaacggaggcggccagcggcgcccggaggggaggaaggggccgggccagacgttcccacagtaaatctccccagctgggtccgccccggcctcagagttgcgcaataaatgttaccgaccatg

SEQ ID NO: 120844 - DNA, 3431 bp, Homo sapiens
  Payload ID: 3674
  Gene Symbol: CCDC152
  Gene Name: coiled-coil domain containing 152
  Uniprot ID: Q4G0S7
  ENST ID: ENST00000361970
  CDS Start-End: 88-852
ccggaggaggggacagcattcaggggtgtaccaggccccagaggcagcggaaagggagactgtggggaactaggagcaacagcaggcatggaccaaagcagtgaaggatgtatgaaaaagattagcagtgtgaatcttgacaaacttataaatgacttctcacagatagaaaagaaaatggtagaaaccaatggaaagaacaatatactggatattcagttggaaaaaagtaattgcctattaaaagtaatgcaagcaaaggaggtctccattaaagaagaatgtgctactcttcataatataataaaagggctacaacagaccattgaatatcaacagaatttgaaaggtgaaaatgaacaactaaaaataagtgctgatcttataaaagagaagttaaagtctcatgaacaggaatataagaataatattgccaaacttgtaagtgaaatgaaaatcaaagaggagggatataagaaagaaataagcaaactttatcaggacatgcagagaaaagttgaattaaatgaagaaaagcacaaagaactaatagagaaaaaggagatggaaatttcagagttaaatgcaaagctaagaagtcaagaaaaagaaaaacaaaatgaaataatcaagctacaactagaatttgatgccaaactagcaagagttcagactaaatcaaaatcatatcaggattctactgttttgccacaaagtatctacagaaggaaacttcagcattttcaagaagaaaaaaacaaggagattgcaattcttcgtaataccattcgcgatttagagcaacgcctttctgttggcaaagattctcaccttaagcgtagacggttttgagcttagcagtaaattcattagttggtatttatttaaaagcaatcgaaagtttcacttctgttttcaatatatgcatacagcctacataacaaacgaagtcagctttaaggtttttattgaatttatttggacaaatccgtactgtatccaattctgtactgcattcttgcttaatagtattaaccataaaggaggtcaggtttatagggtttggtttacctattaaaccatcattgactatggaaatacttactaagcaatatagagacagacaatattatctttccccttatatcttttaagacagccactcaagttttagaagagtatgatacaacattagagaaagaaagatacaaaggctttattcatgtgtgatagtaaaaatcaggatgagtcttagatatacaaaagataaatggatatttaaaatagttatatatgcttttttagcaaaatattcacgtgttaagtatttctggatcttaaaatacaaaatccacttattttattagttaaaagtagaagattgaaaagacaaagtaatattgttttgagagataagtaaagaaaaaaatggaaagcatgtctttgttgttcttcctccattctaaactgctaattatccaacagaaacccctaggtcatagtttacgtttctattctcattaaagcaaatagaacactggaaaaagaaaaaaaaagacatattaaccaaaagctgcaatcacctttcagttgctccatcataaaaaatatggtttgagtcaatatttctatgacataaaatttaaaatctggaagccaattcagtagatttctccatgtttgcacaaatctaatttctatttttggttcactaatttggtagtttataaaaatgctggaaatgaaattgtgtctagactaaattggggagtatgtcctattttaaatatttagtttgaaggtcattctcacttttttgcctgattctttcagcgtcaactggcactggcttctgtgggtataagctgctgacttatttgtcaggcagctggaggcaaacgtcactgacaagattcagttatgttctcctctgcccgaagtccctgtcagctacataaagatgggaggttttctttacactgtcaggtgattgcagaccctgttttttcaaatatcagatgtcgacaatggcagcatcagctcctaggagccaactctgaatctgtgggcaatttacagagtaattgatttatacatctctttcgacagagcttcttttgtaaatcttgtaaatcttcacttgctggcatatctcggttctctgggtgaccctgcctatgctgacccttgtgcttatggtggtgatgaaggcctggaggagcaggatgagtaggagcatttggtgctcctggttgctgattctctgaaagctcactgctgccaaggtgctgatgtccatgattgtgatgatgctcatgatggtaatgaggcgatggagtttcaactgttttatccacagtagccaaagatacacgtttacaaaagtcttcatctttgagagtctggaacaaatttataaatcactttttaacaagcttatagagataggaataatgcgtgaaaaatgatttgtagagctaacatgtgaaattccaactagttaattagaatcgagctggctttgtattatattaatgagaaagagtctgatgttagtctcaacacctagacattttattaaaggcttaaaaagaaagccaaaccactgtacttatatttgcagaagcaaatgaagtaaactggcaaaaggaacttggattgcaggaaagtcaaagtaatatcaaatcctaaattcagttgatctgggccgagcatggtggctcatgcctgtaatcccaccactttgggtggccgaggggggcagattacttgggctcaggagtcggagaccagcctgggcaacatggcgagatcctgtctctgcaaaatatacaaaaattagctgggtgtggtgtcagatgcctgtagtcccagctacttgtgaggctgaggtgggaggatcgtttgagcctgcaagatggaggttgcagtgagctcagatggtgccactgcactccagcctgggtgacagagtcagaccctatctcaaaaaaataaaaaataaataaaaaatcagttgaactatatggaaacttctgtacctgtgtcaacggtgcatcttatctaatactatatgatactgtaatctaatattatctctgataattcaaaaatgctaataaactctgctcaaatgtgttagtttttcatacttcatcctatgccaggaaatgttttgaacttcaccaaagctttgctaatgtctccctaccataaggctgtcagctgaaaatagcaaattactgcccgactcccattgaccataatatccattccgcatgatcctagttctttaatttactggaagtctttactgttttgtggtacctactaatcagagactcaaagcctatagatacagaaatgtaacagtaaatctcaacctaaggctaatttgcaaataaaattacaaaatcaacttagaacccaaa

SEQ ID NO: 120845 - DNA, 1237 bp, Homo sapiens
  Payload ID: 3674
  Gene Symbol: CCDC152
  Gene Name: coiled-coil domain containing 152
  Uniprot ID: Q4G0S7
  ENST ID: ENST00000388827
  CDS Start-End: 71-667
attcaggggtgtaccaggccccagaggcagcggaaagggagactgtggggaactaggagcaacagcaggcatggaccaaagcagtgaaggatgtatgaaaaagattagcagtgtgaatcttgacaaacttataaatgacttctcacagatagaaaagaaaatggtagaaaccaatggaaagaacaatatactggatattcagttggaaaaaagtaattgcctattaaaagtaatgcaagcaaaggaggtctccattaaagaagaatgtgctactcttcataatataataaaagggctacaacagaccattgaatatcaacagaatttgaaagttgaattaaatgaagaaaagcacaaagaactaatagagaaaaaggagatggaaatttcagagttaaatgcaaagctaagaagtcaagaaaaagaaaaacaaaatgaaataatcaagctacaactagaatttgatgccaaactagcaagagttcagactaaatcaaaatcatatcaggattctactgttttgccacaaagtatctacagaaggaaacttcagcattttcaagaagaaaaaaacaaggagattgcaattcttcgtaataccattcgcgatttagagcaacgcctttctgttggcaaagattctcaccttaagcgtagacggttttgagcttagcagtaaattcattagttggtatttatttaaaagcaatcgaaagtttcacttctgttttcaatatatgcatacagcctacataacaaacgaagtcagctttaaggtttttattgaatttatttggacaaatccgtactgtatccaattctgtactgcattcttgcttaatagtattaaccataaaggaggtcaggtttatagggtttggtttacctattaaaccatcattgactatggaaatacttactaagcaatatagagacagacaatattatctttccccttatatcttttaagacagccactcaagttttagaagagtatgatacaacattagagaaagaaagatacaaaggctttattcatgtgtgatagtaaaaatcaggatgagtcttagatatacaaaagataaatggatatttaaaatagttatatatgcttttttagcaaaatattcacgtgttaagtatttctggatcttaaaatacaaaatccacttattttattagttaaaagtagaagattgaaaagacaaagtaatattgttttgagagataagtaaag

SEQ ID NO: 120846 - DNA, 1295 bp, Homo sapiens
  Payload ID: 3675
  Gene Symbol: CCDC153
  Gene Name: coiled-coil domain containing 153
  Uniprot ID: Q494R4
  ENST ID: ENST00000503566
  CDS Start-End: 1-633
atgccacctaaaaacaaagaaaaagggaagaaatctggggcacagaagaagaaaaagaactggggtgcagatgtggtggccgagtccaggcacaggctggtggtgctggagaaggagctgctccgagaccacttggctctacggagggatgaagcccgtcgagccaaggcttccgaagaccagctgaggcagaggctgcaaggggtggaggctgagctggaaggggcccgaagtgaagggaaggccatatatgcagagatgagtcgccagtgccatgccctgcaggaggatatgcaaacccgcagcaagcagctggaggaagaagtcaaaggccttcgggggcagctagaggcatgccaaagggaggctgcagctgcccgggaagaggctgaacaagctctcggagagcgggaccaggccctggctcagcttcgggcccacatggcagacatggaggcgaagtatgaggaaatcttacacgacagtctggacaggctcttggccaagctgagagccatcaagcagcagtgggatggggcagcactgagacttcacgccaggcacaaggagcagcaacgccagtttggactcaccccccctggatctttgaggccaccagcccctagtctctagtgttctctgaggccccagcaataaagtgtcttgatgtagaactcaatagagctgtgggctctggccgtttggcagagagaagtggatcttatttttatttttatttttatttagttttcttctttttttgtttttgttgttgtttatttttaggagtggctgtcatacagacatctcagttctgggttgacccattatccctgagattcagtgattgataggaaataaatttgaccaggtctcaacctctctcctgcaggagccgcatcccaccccttgagcctgaggcccttttggtcccttcacaccactgccccttacccccaccaacacaaacacaggcagtcagatttatggcgaatggccatttctataacaaatgcaacggtgaccaagcaccaccctcccgcaatgctaaggcacccacagagggcaggcatagctggtctccaaatttttgcattacactcaagggtcctggagtcatatctagaaaaggtccagatggcttcaatcctagccagacccacagccacaccttcatccttgggacacagctctctaaaactcccatatgacatcctctggagcctcagactccttcagggacctgtctgaggcctccaaccacaccctctgctggcaggtgggcctgcaggaag

SEQ ID NO: 120847 - DNA, 1173 bp, Homo sapiens
  Payload ID: 3675
  Gene Symbol: CCDC153
  Gene Name: coiled-coil domain containing 153
  Uniprot ID: Q494R4
  ENST ID: ENST00000415318
  CDS Start-End: 497-1129
tctaggtcagtaccctagagtccatgggtccactattcctctgcgtctcatttctctgaagtgggaaactccctggactacctattcctgcacttattaccctcattctacagtgtactgaagaggatcttcggtggtctgggagttttgtttgtttgagacagggtctccctctgtcatccaggctggagtgcagtggtgcaatcatagctcactgctgcctcaacctcccaggctcaagtgattctcctgcttcagcctcccaagtagctgagactacagttgcctggacaacatacagcctctggaaacccaaccttccagccctcagtcctgccctcaagagaaatttgccaccaaggattggctcccaggacccaggccccgcctcaggctcctcgctagttgggccttctctctgccactccccacgagtgggtcactccacggggagccccaacgctggcaggagaggatcctacaggacagcaaggagatgccacctaaaaacaaagaaaaagggaagaaatctggggcacagaagaagaaaaagaactggggtgcagatgtggtggccgagtccaggcacaggctggtggtgctggagaaggagctgctccgagaccacttggctctacggagggatgaagcccgtcgagccaaggcttccgaagaccagctgaggcagaggctgcaaggggtggaggctgagctggaaggggcccgaagtgaagggaaggccatatatgcagagatgagtcgccagtgccatgccctgcaggaggatatgcaaacccgcagcaagcagctggaggaagaagtcaaaggccttcgggggcagctagaggcatgccaaagggaggctgcagctgcccgggaagaggctgaacaagctctcggagagcgggaccaggccctggctcagcttcgggcccacatggcagacatggaggcgaagtatgaggaaatcttacacgacagtctggacaggctcttggccaagctgagagccatcaagcagcagtgggatggggcagcactgagacttcacgccaggcacaaggagcagcaacgccagtttggactcaccccccctggatctttgaggccaccagcccctagtctctagtgttctctgaggccccagcaataaagtgtcttgatgtagaactc

SEQ ID NO: 120848 - DNA, 2212 bp, Homo sapiens
  Payload ID: 3676
  Gene Symbol: CCDC154
  Gene Name: coiled-coil domain containing 154
  Uniprot ID: A6NI56
  ENST ID: ENST00000389176
  CDS Start-End: 168-2192
gaaggcagccagacgagggcagcagctcgtccctcaaggcccagagctctcacgggacttcctctggctcctgacccccctggcctgtgcccagctctgggcaacctcagaggccccaaggcccaagctacagccgagggcagggtggccggtgcagcccagcagccatgtcagagttggctgacagtggaccctcaggggcatcggccccttcccagctgagagccgtcaccctggaagacctggggctcctcctggcaggaggcctggccagccccgagcccttgagcctggaggagctctcggagaggtatgagtccagccatccgacatccacggcctctgtccccgagcaggacaccgccaagcactggaaccagctggagcagtgggtggtggagctgcaggccgaggtggcctgcctgcgggagcacaagcagcgctgtgagcgcgccacgcggagcctgctgcgggagctgctccaggtgcgggcccgcgtgcagctgcagggctcagagctgaggcagttgcagcaggaggcgcggccggcagcccaggcccccgaaaaggaggcgccggagttctctggtctccagaaccagatgcaggccctggacaaaaggctggtggaggtccgggaagccttgacccggctcaggaggaggcaggtgcaacaggaggcggagagaaggggcgccgagcaagaggccggcctcagactggccaagctgaccgacttgctgcagcaggaggagcagggccgggaggtggcctgcggcgccctgcagaagaaccaagaggacagcagccggagggtggacctggaggtggccagaatgcaggcccaggtgaccaagctcggcgaagaggtgagcctgcgcttcctgaagagggaggccaagctgtgcggcttcctgcagaagagcttcctggccctggagaagagaatgaaggcctcggagagctcacggctgaagctggagggcagcctgcggggcgagctggagagccggtgggagaagcttcgggggctgatggaggagcgcctgcgggccctgcaggggcagcatgaggtggggccgggcgggcggcgggcagaggagagccacctcctggagcagtgccagggcctggatgctgccgtggcccagctgaccaagtttgtgcagcagaaccaggcgtcgctgaaccgtgtcctactggccgaggagaaagcctgggacgccaaggggcgcttggaggaaagccgggctggggagctggccgcctatgtgcaggagaacctggaggccgcacagctggctggcgagctggcccggcaggagatgcatggagagctggtgctgctccgagagaagagccgggctctggaggcatccgtggcgcagctggccgggcagttaaaggagctgagtggccatctcccggctctgagcagccggctcgatctgcaggagcagatgctgggcctcaggctgtccgaggcaaagaccgaatgggaaggtgcagagaggaagtccctggaggacctggccaggtggcggaaggaggtgaccgaacacctgcgaggggtgcgggagaaggtggatggcctcccccagcagatagagagtgtctccgacaagtgcctgcttcataagagcgactcagacctcaggatttccgccgaaggcaaggccagggagttcaaggttggggccctgcggcaggagctggccacgctactatcatccgtgcagctgctaaaggaagacaaccctgggcggaagatcgcggagatgcagggcaagctggccacgaaccaaataatgaagctggaaaactgcgtccaggccaacaagaccatccagaacctcaggttcaacactgaggcccggctgcgcacgcaggagatggccaccctgtgggagagtgtgctccggctgtggagtgaggagggcccgcggacgccgctgggcagctggaaggcgctcccatccctggtgaggccgcgggtcttcatcaaggacatggcgcctggcaaggtggtgcccatgaactgctggggcgtgtaccaggctgtgaggtggctgcgctggaaggcgtccctcataaagctcagggccctgcggaggccaggaggggtcctggagaagccccacagccaggagcaggtgcagcagctcacaccctcactgtttatccagaaataaacgtgctggctttgtactca

SEQ ID NO: 120849 - DNA, 2561 bp, Homo sapiens
  Payload ID: 3676
  Gene Symbol: CCDC154
  Gene Name: coiled-coil domain containing 154
  ENST ID: ENST00000409671
  CDS Start-End: 973-2541
tctggggagagaaggaaggttctggaacggccccgctgccccacacctgcctccctggggaccctgagaaggcagccagacgagggcagcagctcgtccctcaaggcccagagctctcacgggacttcctctggctcctgacccccctggcctgtgcccagctctgggcaacctcagaggccccaaggcccaagctacagccgagggcagggtggccggtgcagcccagcagccatgtcaggtgaccagagcggaggagcggggcccagggaggggcttgccacaggtgtgagggtggggaccgctctgcttctgaccccgggctccctccagctcgcttgttcctgccgcccagtgctgtgtgtcttcaggcagggccctggacttgtctgagccaagcccgtctggatcctgtgtgacccaaggagacgcgttgagctctgggtggtgggcgagggtcctgcgggggtttggggccttgttcccgtaagctccagtgggggccgggccccaaggggcaagctcccaagatgcctccttgtagagttggctgacagtggaccctcaggggcatcggccccttcccagctgagagccgtcaccctggaagacctggggctcctcctggcaggaggcctggccagccccgagcccttgagcctggaggagctctcggagaggtatgagtccagccatccgacatccacggcctctgtccccgagcaggacaccgccaagcactggaaccagctggagcagtgggtggtggagctgcaggccgaggtggcctgcctgcgggagcacaagcagcgctgtgagcgcgccacgcggagcctgctgcgggagctgctccaggtgcgggcccgcgtgcagctgcagggctcagagctgaggcagttgcagcaggaggcgcggccggcagcccaggcccccgaaaaggaggcgccggagttctctggtctccagaaccagatgcaggccctggacaaaaggctggtggaggtccgggaagccttgacccggctcaggaggaggcaggtgcaacaggaggcggagagaaggggcgccgagcaagaggccggcctcagactggccaagctgaccgacttgctgcagcaggaggagcagggccgggaggtggcctgcggcgccctgcagaagaaccaagaggacagcagccggagggtggacctggaggtggccagaatgcaggcccaggtgaccaagctcggcgaagaggtgagcctgcgcttcctgaagagggaggccaagctgtgcggcttcctgcagaagagcttcctggccctggagaagagaatgaaggcctcggagagctcacggctgaagctggagggcagcctgcggggcgagctggagagccggtgggagaagcttcgggggctgatggaggagcgcctgcgggccctgcaggggcagcatgaggagagccacctcctggagcagtgccagggcctggatgctgccgtggcccagctgaccaagtttgtgcagcagaaccaggcgtcgctgaaccgtgtcctactggccgaggagaaagcctgggacgccaaggggcgcttggaggaaagccgggctggggagctggccgcctatgtgcaggagaacctggaggccgcacagctggctggcgagctggcccggcaggagatgcatggagagctggtgctgctccgagagaagagccgggctctggaggcatccgtggcgcagctggccgggcagttaaaggagctgagtggccatctcccggctctgagcagccggctcgatctgcaggagcagatgctgggcctcaggctgtccgaggcaaagaccgaatgggaaggtgcagagaggaagtccctggaggacctggccaggtggcggaaggaggtgaccgaacacctgcgaggggtgcgggagaaggtggatggcctcccccagcagatagagagtgtctccgacaagtgcctgcttcataagagcgactcagacctcaggatttccgccgaaggcaaggccagggagttcaaggttggggccctgcggcaggagctggccacgctactatcatccgtgcagctgctaaaggaagacaaccctgggcggaagatcgcggagatgcagggcaagctggccacgtttcagaaccaaataatgaagctggaaaactgcgtccaggccaacaagaccatccagaacctcaggttcaacactgaggcccggctgcgcacgcaggagatggccaccctgtgggagagtgtgctccggctgtggagtgaggagggcccgcggacgccgctgggcagctggaaggcgctcccatccctggtgaggccgcgggtcttcatcaaggacatggcgcctggcaaggtggtgcccatgaactgctggggcgtgtaccaggctgtgaggtggctgcgctggaaggcgtccctcataaagctcagggccctgcggaggccaggaggggtcctggagaagccccacagccaggagcaggtgcagcagctcacaccctcactgtttatccagaaataaacgtgctggctttgtactca

SEQ ID NO: 120850 - DNA, 708 bp, Homo sapiens
  Payload ID: 3676
  Gene Symbol: CCDC154
  Gene Name: coiled-coil domain containing 154
  ENST ID: ENST00000483702
  CDS Start-End: 1-300
cagttaaaggagctgagtggccatctcccggctctgagcagccggctcgatctgcaggagcagatgctgggcctcaggctgtccgaggcaaagaccgaatgggaaggtgcagagaggaagtccctggaggacctggccaggtggcggaaggaggtgaccgaacacctgcgaggggtgcgggagaaggtggatggcctcccccagcagatagagagtgtctccgacaagtgcctgcttcataagagcgactcagacctcaggatttccgccgaaggcaaggccagtttcagaaccaaataatgaagctggaaaactgcgtccaggccaacaagaccatccagaacctcaggttcaacactgaggcccggctgcgcacgcaggagatggccaccctgtgggagagtgtgctccggctgtggagtgaggagggcccgcggacgccgctgggcagctggaaggcgctcccatccctggtgaggccgcgggtcttcatcaaggacatggcgcctggcaaggtggtgcccatgaactgctggggcgtgtaccaggctgtgaggtggctgcgctggaaggcgtccctcataaagctcagggccctgcggaggccaggaggggtcctggagaagccccacagccaggagcaggtgcagcagctcacaccctcactgtttatccagaaataaacgtgctggctttgtactcattaga

SEQ ID NO: 120851 - DNA, 2378 bp, Homo sapiens
  Payload ID: 3677
  Gene Symbol: CCDC155
  Gene Name: coiled-coil domain containing 155
  Uniprot ID: Q8N6L0
  ENST ID: ENST00000447857
  CDS Start-End: 206-1894
ctccttttgctttttctggcgggaaaagctcacgcgcacctcccccaactcaactgccgttcgtcgttcgtggatgtccgttgtgtcccgagactaggacgtggctccaggagtgctcgggccagctggtccttttcccatccctccccatgaaggagggaggctggtagctttgccagcagctgcgccgcggcaggggtggcccatggacctgcccgagggcccggtgggtggccccactgcggaaatgtacctccgggagcggcctgaggaggcaaggctgggaatgccggtcagcttggaggagcaaatactcaactccacgttcgaagcttgtgaccctcagaggacaggcactgtggctgtggcccaggtgctggcctacctggaggctgtgacaggccagggcccccaggatgcacgcctccaaacattggccaacagcctggaccccaatggggagggccctaaggccactgtggacttggacactttcctggttgtcatgcgtgactggattgctgcctgtcaactacatgggggattagagctggaagaggagaccgccttccagggagccctgacctcccggcaactgccatctggatgcccagaagctgaggagccagccaacctggagagcttcggaggcgaagaccccagacccgagctacaagccacagctgacctgctgagcagcctggaggacctggagctcagcaaccgacgtctggttggggagaatgccaaattgcagcggagcatggagacagctgaggaggggtcagcacgccttggggaggagatcttggctctgcgtaagcagcttcacagcacccagcaggccctgcagtttgccaaggccatggatgaggagctggaggacctgaagactctggccaggagcctggaggaacagaatcgcagccttctggcccaagcccggcaggcggaaaaggagcagcagcatctggtggctgagatggagactctgcaggaggagaacgggaagctgcttgccgagcgggatggagtgaaaaagagaagtcaggagctggccatggagaaggacactttgaagcggcagctctttgagtgtgaacacctcatttgccaaagagacaccatcctctctgagcgcactcgcgatgtggagagcctggcccagaccctggaagaatacagagtgacgacgcaggaactgaggctggagatttcacgcctggaggagcagctgagtcagacctatgaggggcccgatgagctacctgaaggggcccagctgagaagagtgggctggaccgagctgctacccccatcgctgggcttggagatcgaggccattcgacagaaacaggaagtggcaactgctgatctctccaaccctctgtgtggggtgtggcagtgggaggaagtcatccatgagaccagtgaggaaactgagtttccatctgaagccccagctgggggacagagaaacttccagggagagccagcgcaccctgaagaaggaaggaaggagccatccatgtggttgaccagaagagaggaagaggaggatgcagagagccaggtcacggctgatctccctgtccctctaggagcccctcgccctggagacatcccagaaaaccctccagagagacctgcgcggcgggaactccagcaagccctggtgcctgtgatgaaaaagctggtcccagtcaggaggagggcctggggccagctctgcctgcccccacagcggctcagagtcactcgacatccactgatcccagctcctgtcctgggcctgctgctgctgctgctgctctctgtcctgctgcttggcccgtccccacctcccacctggccccacctccagctctgctacctccagccccctccagtgtgagaggctctacttgcccctcagagcagtgtctagctcaataaatcccctggccctctctccactgggatccccattgttagtccactgttgcgcaggcttaccctagatagagtacaggggatccacatccctgtatttttatgtgaagtctcctagttttttaatgctgacatttcttaacaatagcaaaactcccccagtaatggattaagcactaaggattattccctcacaaaacaagcctggcgagggcagctgtgggcacacagctaagtctcggttgccttggggtcagggcctcagtgattctcctgtcccctccctcatgctcaggagttggcagttgtagcttcctacatcacatctgcgggaaacggaaatttcttccttcctttttataaagagaggcagtagcctcagtgtgcagtgggtagattcaaatcatattcataataaaagagaagcagttgcctgcccagagcca

SEQ ID NO: 120852 - DNA, 531 bp, Homo sapiens
  Payload ID: 3677
  Gene Symbol: CCDC155
  Gene Name: coiled-coil domain containing 155
  ENST ID: ENST00000594905
  CDS Start-End: 305-531
tgtcccgagactaggacgtggctccaggagtgctcgggccagctggtccttttcccatccctccccatgaaggagggaggctggtagctttgccagcagctgcgccgcggcaggggtggcccatggacctgcccgagggcccggtgggtggccccactgcggaaattcaggtgctccagaaggagagactgccctgttggctgggaccccagagcaactcctgactcactgtgggagctcacttactgttgagtgaacggacggattgtacctccgggagcggcctgaggaggcaaggctgggaatgccggtcagcttggaggagcaaatactcaactccacgttcgaagcttgtgaccctcagaggacaggcactgtggctgtggcccaggtgctggcctacctggaggctgtgacaggccagggcccccaggatgcacgcctccaaacattggccaacagcctggaccccaatggggagggccctaaggccactgtggacttggacactttcctggttgtcatgcgtga

SEQ ID NO: 120853 - DNA, 570 bp, Homo sapiens
  Payload ID: 3677
  Gene Symbol: CCDC155
  Gene Name: coiled-coil domain containing 155
  ENST ID: ENST00000598730
  CDS Start-End: 296-570
gttcgtggatgtccgttgtgtcccgagactaggacgtggctccaggagtgctcgggccagctggtccttttcccatccctccccatgaaggagggaggctggtagctttgccagcagctgcgccgcggcaggggtggcccatggacctgcccgagggcccggtgggtggccccactgcggaaagaaagaggtaacaccaaccccattttccagaggaagaaactgaggcccaagagaagttgagtccattgccccagtgtacctccgggagcggcctgaggaggcaaggctgggaatgccggtcagcttggaggagcaaatactcaactccacgttcgaagcttgtgaccctcagaggacaggcactgtggctgtggcccaggtgctggcctacctggaggctgtgacaggccagggcccccaggatgcacgcctccaaacattggccaacagcctggaccccaatggggagggccctaaggccactgtggacttggacactttcctggttgtcatgcgtgactggattgctgcctgtcaactacatgggggattagagctggaagagga

SEQ ID NO: 120854 - DNA, 776 bp, Homo sapiens
  Payload ID: 3677
  Gene Symbol: CCDC155
  Gene Name: coiled-coil domain containing 155
  ENST ID: ENST00000594043
  CDS Start-End: 198-776
cgaaatcctagcgaagcccccccatattgtgggagagatacccctgcgtcagggccccccagatcctgaccacttgggaggccgaggcgggcggatcacgaggagtgctcgggccagctggtccttttcccatccctccccatgaaggagggaggctggtagctttgccagcagctgcgccgcggcaggggtggcccatggacctgcccgagggcccggtgggtggccccactgcggaaatgtacctccgggagcggcctgaggaggcaaggctgggaatgccggtcagcttggaggagcaaatactcaactccacgttcgaagcttgtgaccctcagaggacaggcactgtggctgtggcccaggtgctggcctacctggaggctgtgacaggccagggcccccaggatgcacgcctccaaacattggccaacagcctggaccccaatggggagggccctaaggccactgtggacttggacactttcctggttgtcatgcgtgactggattgctgcctgtcaactacatgggggattagagctggaagaggagaccgccttccagggagccctgacctcccggcaactgccatctggatgcccagaagctgaggagccagccaacctggagagcttcggaggcgaagaccccagacccgagctacaagccacagctgacctgctgagcagcctggaggacctggagctcagcaaccgacgtctggttggggagaatgccaaattgcagcggagcatggagacagctgaggagggg

SEQ ID NO: 120855 - DNA, 473 bp, Homo sapiens
  Payload ID: 3677
  Gene Symbol: CCDC155
  Gene Name: coiled-coil domain containing 155
  ENST ID: ENST00000597993
  CDS Start-End: 127-255
gttgtgtcccgagactaggacgtggctccaggagtgctcgggccagctggtccttttcccatccctccccatgaaggagggaggctggtagctttgccagcagctgcgccgcggcaggggtggcccatggacctgcccgagggcccggtgggtggccccactgcggaaagtgctccagaaggagagactgccctgttggctgggaccccagagcaactcctgactcactgtgggagctcacttactgttgagtgaacggacggatgaaagaggtaacaccaaccccattttccagaggaagaaactgaggcccaagagaagttgagtccattgccccagtgtacctccgggagcggcctgaggaggcaaggctgggaatgccggtcagcttggaggagcaaatactcaactccacgttcgaagcttgtgaccctcagaggacaggcactgtggctgtggcccaggtgctggcc

SEQ ID NO: 120856 - DNA, 2052 bp, Homo sapiens
  Payload ID: 3677
  Gene Symbol: CCDC155
  Gene Name: coiled-coil domain containing 155
  ENST ID: ENST00000600570
  CDS Start-End: 1-1573
caactccacgttcgaagcttgtgaccctcagaggacaggcactgtggctgtggcccaggtgctggcctacctggaggctgtgacaggccagggcccccaggatgcacgcctccaaacattggccaacagcctggaccccaatggggagggccctaaggccactgtggacttggacactttcctggttgtcatgcgtgactggattgctgcctgtcaactacatgggggattagagctggaagaggagaccgccttccagggagccctgacctcccggcaactgccatctggatgcccagaagctgaggagccagccaacctggagagcttcggaggcgaagaccccagacccgagctacaagccacagctgacctgctgagcagcctggaggacctggagctcagcaaccgacgtctggttggggagaatgccaaattgcagcggagcatggagacagctgaggaggggtcagcacgccttggggaggagatcttggctctgcgtaagcagcttcacagcacccagcaggccctgcagtttgccaaggccatggatgaggagctggaggacctgaagactctggccaggagcctggaggaacagaatcgcagccttctggcccaagcccggcaggcggaaaaggagcagcagcatctggtggctgagatggagactctgcaggaggagaacgggaagctgcttgccgagcgggatggagtgaaaaagagaagtcaggagctggccatggagaaggacactttgaagcggcagctctttgagtgtgaacacctcatttgccaaagagacaccatcctctctgagcgcactcgcgatgtggagagcctggcccagaccctggaagaatacagagtgacgacgcaggaactgaggctggagatttcacgcctggaggagcagctgagtcagacctatgaggggcccgatgagctacctgaaggggcccagctgagaagagtgggctggaccgagctgctacccccatcgctgggcttggagatcgaggccattcgacaggaagtggcaactgctgatctctccaaccctctgtgtggggtgtggcagtgggaggaagtcatccatgagaccagtgaggaaactgagtttccatctgaagccccagctgggggacagagaaacttccagggagagccagcgcaccctgaagaaggaaggaaggagccatccatgtggttgaccagaagagaggaagaggaggatgcagagagccaggtcacggctgatctccctgtccctctaggagcccctcgccctggagacatcccagaaaaccctccagagagacctgcgcggcgggaactccagcaagccctggtgcctgtgatgaaaaagctggtcccagtcaggaggagggcctggggccagctctgcctgcccccacagcggctcagagtcactcgacatccactgatcccagctcctgtcctgggcctgctgctgctgctgctgctctctgtcctgctgcttggcccgtccccacctcccacctggccccacctccagctctgctacctccagccccctccagtgtgagaggctctacttgcccctcagagcagtgtctagctcaataaatcccctggccctctctccactgggatccccattgttagtccactgttgcgcaggcttaccctagatagagtacaggggatccacatccctgtatttttatgtgaagtctcctagttttttaatgctgacatttcttaacaatagcaaaactcccccagtaatggattaagcactaaggattattccctcacaaaacaagcctggcgagggcagctgtgggcacacagctaagtctcggttgccttggggtcagggcctcagtgattctcctgtcccctccctcatgctcaggagttggcagttgtagcttcctacatcacatctgcgggaaacggaaatttcttccttcctttttataaagagaggcagtagcctcagtgtgcagtgggtagattcaaatcatattcataataaaagagaagcagttgcctgcccag

SEQ ID NO: 120857 - DNA, 768 bp, Homo sapiens
  Payload ID: 3677
  Gene Symbol: CCDC155
  Gene Name: coiled-coil domain containing 155
  ENST ID: ENST00000595828
  CDS Start-End: 204-768
cgtggctccaggagtgctcgggccagctggtccttttcccatccctccccatgaaggagggaggctggtagctttgccagcagctgcgccgcggcaggggtggcccatggacctgcccgagggcccggtgggtggccccactgcggaaagaaagaggtaacaccaaccccattttccagaggaagaaactgaggcccaagagaatgtacctccgggagcggcctgaggaggcaaggctgggaatgccggtcagcttggaggagcaaatactcaactccacgttcgaagcttgtgaccctcagaggacaggcactgtggctgtggcccaggtgctggcctacctggaggctgtgacaggccagggcccccaggatgcacgcctccaaacattggccaacagcctggaccccaatggggagggccctaaggccactgtggacttggacactttcctggttgtcatgcgtgactggattgctgcctgtcaactacatgggggattagagctggaagaggagaccgccttccagggagccctgacctcccggcaactgccatctggatgcccagaagctgaggagccagccaacctggagagcttcggaggcgaagaccccagacccgagctacaagccacagctgacctgctgagcagcctggaggacctggagctcagcaaccgacgtctggttggggagaatgccaaattgcagcggagcatggagacagctgaggaggggtcagcacgccttggggaggagatcttgg

SEQ ID NO: 120858 - DNA, 3001 bp, Homo sapiens
  Payload ID: 3678
  Gene Symbol: CCDC157
  Gene Name: coiled-coil domain containing 157
  Uniprot ID: Q569K6
  ENST ID: ENST00000338306
  CDS Start-End: 661-2919
cccttcatagcggccggccgcttattcctgtgcgagtaaggagcgcccaggccaaccctccggctgcaggctgaggggcgggggagaggtacctgtttgggctccgtgggcacgggcggcggcgggggcaccgcctgcacgggtccggccggcatgactgcgacgctcagggctgccagtccgcctcggtgtcggtgagcggtgccgcctcaagacagcctccccgctcggtcagtacgacgagctcgcaagatggcggcggccgagcgagttgcggccgcgaaggtacgactggcgcacttccgggaccgtcccctcgccgtgacgcgcttcccgcccctccccgcgggcaccgcggcgtccgacgccgttgccaaggcagcggcctgagcgcccggctagggcttttcggggatcccggtggccgcaggcgcaccgggggcagttccgggagccgaccagacacgaaggctgaagccgcgacgccgaagacagggtctgaagagctactcagagccaaccctgcactggagacaggaagccgggcacctggatgagcctctgacccagagccctggagcccataggctcgtctgagaactagacacactcagtcactccagctccacgggcagacacctgcacagaggatctgtgaggatggcgcacctgctgggcagccaggcctgcatggagagcctgcgcacagacctcaccgacctgcagggtgccatcgtagacgtcttctcccgcgccgggcctgtgcgcttcccctcctggaagttccctgaccgcatggcctgtgacctcgacatggtggccctgctggagcactatgaccatgttccgggtgaccccgagttcacgcagctgtcccatgccgtgctgctggagctggtcatcgacaggctcctgctgctgcttcaaagctgtatgagctacttggagaaccttggctcagagcagatgatgccccctgcacaggctgcggggccctgcatgtccgtggggctcacggtgcggcgcttctgggacagcctgctgaggctgggcacgctccaccagcagccactcccccagaaaggggcaaaccaaagggagactcccacctccaagcccaccaccaagggcgagccagccaggagccctgaatatctgactaccaagttaatcaagccctcctccccagtgctaggcttgccccagacctgccaagagccagagagcatccctgtcagagcctccctgcagttcccagccacgaccttcaagaacaccaggagtgtccactcccagaccattgagacggccctggtgccctgtgacgcatgcgccagcgtccagggaagcctgcagaaggtgggcaaggtggtcatcagcctgtgtcagagccagaacctgccctcgtccttaggccagttccagcaactggtgcaggacagcatggggctcaggccactgccggctgccaccgtgggccgctgggcagcagagcagaggaaagacctgacgcgcctcagtaagcatgtggaggccctcagggcccagctggaggaggctgaagggcagaaggatggcctgaggaagcaggcgggcaagctggagcaggcgctgaaacaggagcagggggcacggcggcgacaggcggaggaggatgagcagtgcctgtctgagtgggagcacgacaaacagcagctgctcacagaaacaagtgacctaaagacaaagatggccaccctggagagagaactgaaacagcagcgggagtccacacaggctgtggaggcaaaggcccagcagctgcaggaggaaggtgagcgcagggcggcagcggagaggcaggtgcagcagctggaggagcaggtgcagcagttggaggcgcaggtgcagctgttggtgggtcggctggagggcgctggccagcaggtctgctgggccagcacggagctggataaggagaaggcccgtgtcgacagcatggtccgccaccaggagtctctgcaggccaagcagcgagccctgctaaagcagctggacagcctggaccaggaacgtgaggagctgcggggcagcctggacgaggctgaggcccagcgggcccgcgtggaggagcagctgcagagcgagcgggagcaggggcaatgccagctcagggcccagcaggagctgctgcagagcctgcagagggagaagcaaggcctggagcaggcgactacggacctgcggctaaccatcctggagctagaacgggagctggaggagctgaaggagcgggagcggctgctggtggccttcccagacctgcacaggcccaccgagacccagatccatggaggcagatccagcagcgtggaatcccagataacatgtcccacagactctggcaacgtcacagatcacatggagaggcaagtgcagtccaacgacatccgcatccgggtcctacaggaggagaacgggcggctccaatcaatgctgtccaaaatccgggaagtggcccagcagggtggcctcaagctgatcccgcaggaccggctctggtccccttccagcaagggaacccagggagcaacaccaccagtccaggccaagagcacatccccagggcctctgggcagacagcaccttcctagcagcaggacgggtaggaccctgctgggccagccctgcacatccccacctcggcagccctgcacatccccacctcggcagccctgcacatccccacctcggcagccctgcacatccccatctcggcagccctgcagccagcccagcaagtccttgctggagggtgtgacccacttggacacctgcacccagaaccccatcaaggtcttggtcaggctgagaaagagactgtcacctggccggggacaggccagctctgcacaccagccccaggagcggcccatgtagcctgtggcccagggctgaggctggatgggaggtggctggcagcccacccactgtaataaagccccagccattggcccacagc

SEQ ID NO: 120859 - DNA, 1759 bp, Homo sapiens
  Payload ID: 3678
  Gene Symbol: CCDC157
  Gene Name: coiled-coil domain containing 157
  ENST ID: ENST00000399824
  CDS Start-End: 664-915
aagcccttcatagcggccggccgcttattcctgtgcgagtaaggagcgcccaggccaaccctccggctgcaggctgaggggcgggggagaggtacctgtttgggctccgtgggcacgggcggcggcgggggcaccgcctgcacgggtccggccggcatgactgcgacgctcagggctgccagtccgcctcggtgtcggtgagcggtgccgcctcaagacagcctccccgctcggtcagtacgacgagctcgcaagatggcggcggccgagcgagttgcggccgcgaaggtacgactggcgcacttccgggaccgtcccctcgccgtgacgcgcttcccgcccctccccgcgggcaccgcggcgtccgacgccgttgccaaggcagcggcctgagcgcccggctagggcttttcggggatcccggtggccgcaggcgcaccgggggcagttccgggagccgaccagacacgaaggctgaagccgcgacgccgaagacagggtctgaagagctactcagagccaaccctgcactggagacaggaagccgggcacctggatgagcctctgacccagagccctggagcccataggctcgtctgagaactagacacactcagtcactccagctccacgggcagacacctgcacagaggatctgtgaggatggcgcacctgctgggcagccaggcctgcatggagagcctgcgcacagacctcaccgacctgcagggtgccatcgtagacgtcttctcccgcgccgggcctgtgcgcttcccctcctggaagttccctgaccgcatggcctgtgacctcgacatggtggccctgctggagcactatgaccatgttccgggtgaccccgagttcacgcagctgtcccatgccgtgctgctggagctggtcatcgacaggtgagggccttgaccaagcctggtcatctcaggatgccagcacctgcccctgaaaccagtggcagctacggaagcccctccagaggcaggggtgatgttggaacaacagtcaccattgagtacctgtcggggccacatcagctcaggactttcaaagtggtcttaccttttatcatgtgtcttgtgttgtgtgctgtgctatcctgtgttaggctctcctagcctgtccacctcaggcagttgatttccattccatcggtctctgtggcaccacagctgtgaccacggtctctcagcctctcccagctgcctcctcagggtttctatgttggggaccccatagttgcttctcagagtttccattccgggctctctttcctgttgtcctgtgggttgtgctgttccctctgcatatcacaaggccggacacgggatgtggttttccaaatcctgacccgctgggaagagccttgctgattctcctgcagcctcatcacttctaagctatcattaaagttaacatggttggccgggcatggtggctcacgcctgtaatctcatcactttgggaggccaaggcgggtgcatcacttgaggtcaggagttcaagaccagcctggccaacatagtgaaaccctgtctctactaaaaatacaaaaattagcttggtgtggtggtgcatgcctgtaattccagctactcaggaggctgaggcatgagaatcgcttgaatctgggaggcagaggttgcagtgaaccaagatcacaccaatgcactccagcctcggtaatggagtaagactttctcaaaaaaaaaaaaaagtgaaaataaaaataaagttaacatgg

SEQ ID NO: 120860 - DNA, 3052 bp, Homo sapiens
  Payload ID: 3678
  Gene Symbol: CCDC157
  Gene Name: coiled-coil domain containing 157
  Uniprot ID: Q569K6
  ENST ID: ENST00000405659
  CDS Start-End: 710-2968
aagcccttcatagcggccggccgcttattcctgtgcgagtaaggagcgcccaggccaaccctccggctgcaggctgaggggcgggggagaggtacctgtttgggctccgtgggcacgggcggcggcgggggcaccgcctgcacgggtccggccggcatgactgcgacgctcagggctgccagtccgcctcggtgtcggtgagcggtgccgcctcaagacagcctccccgctcggtcagtacgacgagctcgcaagatggcggcggccgagcgagttgcggccgcgaaggtacgactggcgcacttccgggaccgtcccctcgccgtgacgcgcttcccgcccctccccgcgggcaccgcggcgtccgacgccgttgccaaggcagcggcctgagcgcccggctagggcttttcggggatcccggtggccgcaggcgcaccgggggcagttccgggagccgaccagacacgaaggctgaagccgcgacgccgaagacagggtctgaagagctactcagagccaaccctgcactggagacaggaagccgggcacctggatgagcctctgacccagagccctggagcccataggctcgtctgagaactagacacactcagtcactccagctccacgggcagacacctgcacagagcagccacgtggctctggctggcagggctcttctctgctcaccccaggatctgtgaggatggcgcacctgctgggcagccaggcctgcatggagagcctgcgcacagacctcaccgacctgcagggtgccatcgtagacgtcttctcccgcgccgggcctgtgcgcttcccctcctggaagttccctgaccgcatggcctgtgacctcgacatggtggccctgctggagcactatgaccatgttccgggtgaccccgagttcacgcagctgtcccatgccgtgctgctggagctggtcatcgacaggctcctgctgctgcttcaaagctgtatgagctacttggagaaccttggctcagagcagatgatgccccctgcacaggctgcggggccctgcatgtccgtggggctcacggtgcggcgcttctgggacagcctgctgaggctgggcacgctccaccagcagccactcccccagaaaggggcaaaccaaagggagactcccacctccaagcccaccaccaagggcgagccagccaggagccctgaatatctgactaccaagttaatcaagccctcctccccagtgctaggcttgccccagacctgccaagagccagagagcatccctgtcagagcctccctgcagttcccagccacgaccttcaagaacaccaggagtgtccactcccagaccattgagacggccctggtgccctgtgacgcatgcgccagcgtccagggaagcctgcagaaggtgggcaaggtggtcatcagcctgtgtcagagccagaacctgccctcgtccttaggccagttccagcaactggtgcaggacagcatggggctcaggccactgccggctgccaccgtgggccgctgggcagcagagcagaggaaagacctgacgcgcctcagtaagcatgtggaggccctcagggcccagctggaggaggctgaagggcagaaggatggcctgaggaagcaggcgggcaagctggagcaggcgctgaaacaggagcagggggcacggcggcgacaggcggaggaggatgagcagtgcctgtctgagtgggagcacgacaaacagcagctgctcacagaaacaagtgacctaaagacaaagatggccaccctggagagagaactgaaacagcagcgggagtccacacaggctgtggaggcaaaggcccagcagctgcaggaggaaggtgagcgcagggcggcagcggagaggcaggtgcagcagctggaggagcaggtgcagcagttggaggcgcaggtgcagctgttggtgggtcggctggagggcgctggccagcaggtctgctgggccagcacggagctggataaggagaaggcccgtgtcgacagcatggtccgccaccaggagtctctgcaggccaagcagcgagccctgctaaagcagctggacagcctggaccaggaacgtgaggagctgcggggcagcctggacgaggctgaggcccagcgggcccgcgtggaggagcagctgcagagcgagcgggagcaggggcaatgccagctcagggcccagcaggagctgctgcagagcctgcagagggagaagcaaggcctggagcaggcgactacggacctgcggctaaccatcctggagctagaacgggagctggaggagctgaaggagcgggagcggctgctggtggccttcccagacctgcacaggcccaccgagacccagatccatggaggcagatccagcagcgtggaatcccagataacatgtcccacagactctggcaacgtcacagatcacatggagaggcaagtgcagtccaacgacatccgcatccgggtcctacaggaggagaacgggcggctccaatcaatgctgtccaaaatccgggaagtggcccagcagggtggcctcaagctgatcccgcaggaccggctctggtccccttccagcaagggaacccagggagcaacaccaccagtccaggccaagagcacatccccagggcctctgggcagacagcaccttcctagcagcaggacgggtaggaccctgctgggccagccctgcacatccccacctcggcagccctgcacatccccacctcggcagccctgcacatccccacctcggcagccctgcacatccccatctcggcagccctgcagccagcccagcaagtccttgctggagggtgtgacccacttggacacctgcacccagaaccccatcaaggtcttggtcaggctgagaaagagactgtcacctggccggggacaggccagctctgcacaccagccccaggagcggcccatgtagcctgtggcccagggctgaggctggatgggaggtggctggcagcccacccactgtaataaagccccagccattggcccacagcaa

SEQ ID NO: 120861 - DNA, 732 bp, Homo sapiens
  Payload ID: 3678
  Gene Symbol: CCDC157
  Gene Name: coiled-coil domain containing 157
  ENST ID: ENST00000445005
  CDS Start-End: 144-732
gacgccgttgccaaggcagcggcctgagcgcccggctagggcttttcggggatcccggtggccgcaggcgcaccgggggcagttccgggagccgaccagacacgaaggctgaagccgcgacgccgaagacaggatctgtgaggatggcgcacctgctgggcagccaggcctgcatggagagcctgcgcacagacctcaccgacctgcagggtgccatcgtagacgtcttctcccgcgccgggcctgtgcgcttcccctcctggaagttccctgaccgcatggcctgtgacctcgacatggtggccctgctggagcactatgaccatgttccgggtgaccccgagttcacgcagctgtcccatgccgtgctgctggagctggtcatcgacaggctcctgctgctgcttcaaagctgtatgagctacttggagaaccttggctcagagcagatgatgccccctgcacaggctgcggggccctgcatgtccgtggggctcacggtgcggcgcttctgggacagcctgctgaggctgggcacgctccaccagcagccactcccccagaaaggggcaaaccaaagggagactcccacctccaagcccaccaccaagggcgagccagccaggagccctgaatatctgactaccaagttaatcaagccctcctccccagtgctaggcttgccccagacctgccaagagccagagagcatccctgtcagagcctccctgc

SEQ ID NO: 120862 - DNA, 894 bp, Homo sapiens
  Payload ID: 3678
  Gene Symbol: CCDC157
  Gene Name: coiled-coil domain containing 157
  ENST ID: ENST00000430839
  CDS Start-End: 292-894
gttgccaaggcagcggcctgagcgcccggctagggcttttcggggatcccggtggccgcaggcgcaccgggggcagttccgggagccgaccagacacgaaggctgaagccgcgacgccgaagacagggtctgaagagctactcagagccaaccctgcactggagacaggaagccgggcacctggatgagcctctgacccagagccctggagcccataggctcgtctgagaactagacacactcagtcactccagctccacgggcagacacctgcacagaggatctgtgaggatggcgcacctgctgggcagccaggcctgcatggagagcctgcgcacagacctcaccgacctgcagggtgccatcgtagacgtcttctcccgcgccgggcctgtgcgcttcccctcctggaagttccctgaccgcatggcctgtgacctcgacatggtggccctgctggagcactatgaccatgttccgggtgaccccgagttcacgcagctgtcccatgccgtgctgctggagctggtcatcgacaggctcctgctgctgcttcaaagctgtatgagctacttggagaaccttggctcagagcagatgatgccccctgcacaggctgcggggccctgcatgtccgtggggctcacggtgcggcgcttctgggacagcctgctgaggctgggcacgctccaccagcagccactcccccagaaaggggcaaaccaaagggagactcccacctccaagcccaccaccaagggcgagccagccaggagccctgaatatctgactaccaagttaatcaagccctcctccccagtgctaggcttgccccagacctgccaagagccagagagcatccctgtcagagcctccctgcagttcccagccacg

SEQ ID NO: 120863 - DNA, 3663 bp, Homo sapiens
  Payload ID: 3679
  Gene Symbol: CCDC158
  Gene Name: coiled-coil domain containing 158
  Uniprot ID: Q5M9N0
  ENST ID: ENST00000388914
  CDS Start-End: 154-3495
gcacgaagcatattaaggtagatatgttctatcgttaattgtagttttgacaggtggcatctcagtaatcaaaaggaagaaaatgaaccaaaagaaccaaagagggaaccattcatacttcaagatctctaataagaagtagcaatatttaatatggaatcaaaagcttgggaatcaaataatgaagatcttttatcaagtagtggtgtcacatctaatggaggttcttcaagttcattttttgtgtcatctattcgtggtacaataattgaaaacacatcttcagctgggactttgacacaggttccttttttccctaaatatgaagtggaacttgattctcctagaaaaatcatcccatctcctggaaaggaacactttgaacgtgttttggaagaatattcacatcaagtcaaagatttacagagaagactaaatgaaagcaatgaattgcatgagaaacaaaagttttatttgaggcagtcagtcattgatttgcaaacaaaacttcaggagatgcaaatggagagagatgctatggctgacatcagacgaagggagagtcagtcccaggaggatttaagaaatcagcttcaaaatacagttcatgaacttgaagctgccaaatgccttaaagaggacatgctgaaagacagcaacacacagatagagcaactacgaaaaatgatgcttagtcatgagggagtgcttcaagaaatccggtcaatcctagttgactttgaagaagcctcaggcaaaaaaatatgtgaacatgacagcatgtctactctgcacttccgcagcttgggctcagctattagtaaaatactaagagaattagacacagagatttcttatcttaaagggaggatatttccagtagaggatcaacttgaagcactgaaatctgaatcacagaacaaaatagaactacttctgcaacaacaccaagataggattgagcagttaataagtgaacatgaagttgaaataacaggacttactgagaaagctagcagtgctcgaagccaagccaatagtatccagagtcaaatggaaatcattcaagagcaagcaagaaaccaaaactctatgtatatgcgtcagctcagcgatctggaatctactgtttctcagctacgttctgaattaagggaagccaaaaggatgtatgaagacaagacagaagagctggaaaagcagttagtccttgccaactcagagctaactgaagcccggacagagcgtgatcaattcagtcaggaatctggaaatttagatgatcaacttcaaaagctgttggctgatctacacaaaagggagaaggagctgagtctggagaaggagcagaataagcgtctgtgggaccgagacacaggcaacagcatcaccattgaccacctgcggcgggaactggacaaccggaacatggaggtgcagcgcctggaagccctgctcaaggccttgaagagcgagtgtcagggccagatggagcggcagatggcagcaattcaaggaaagaatgaaagtctagaaaaagtatcctccttgactgctcagcttgaatccaccaaagagatgctgcgcaaagtagtagaagagttgacagccaagaaaatgactctggagagctcagagaggacaatatcggacctgacaacttctctccaggaaaaagagagagccatcgaggctaccaatgcagagatcacaaagctccgctcccgggtggacttgaaattgcaggagctgcaacacttgaaaaatgaaggggatcatctcagaaatgtgcagacagaatgtgaggccctcaaactgcagatgacagagaaggacaaggtgatcgagattctgcgacagcagattgagaacatgacacagctggtgggccagcatggacgaactgctggagctatgcaagtagaaaaagctcaactggagaaagaaattaatgataggcggatggaactaaaggaacttaagatattaaaagataaaaaagatgcaaagatccgggagcttgaggccagagtgagtgacttggagctggaaaaggtgaagctggtgaatgcaggctctgagcggctccgtgcagtgaaggacatcaaacaagagagagatcaattattaaatgaggtgaaaacaagtaggagtgaattaaacaatctttcagaggagtatgaagtcttaaaaaggaatttccgaaacaaaagtgaagaaatggaaatgactacaaataagttgaaaatgcaattaaaatctgcacagtctgaactagaacagacaagaaatacattaaagtcaatggaaggatctgatggtcatgctatgaaagtggcaatggggatgcaaaagcaaatcacagccaaaagaggtcagatagatgcccttcagagcaagatacagtttttggaagaggcaatgacaaatgcaaataaggagaaacattttctgaaagaagagaaaagtaaactcagtcaggaattgagtactgttgccacagaaaaaaacaagatggctggggagttggaagttctgcgatctcaggaacgccgtttgaaagaaaaggttactaatatggaagtggctctggataaggcatctttgcagtttgcagaatgtcaagatataatacagcgtcaggagcaagaatcagtgcgcttaaaacttcaacacactttggatataaaagaacttcagggccctggatacacctcaaattcttcattgaaaccacgccttctccagccagcatctgttactcgttctcattctaatgtaccatcttcgcagtctacagccagcttcctgtctcatcactctacaaaagctaacacactgaaggaagatccaacaagggacctgaaacagcttctccaagagttgagaagcgtgatcaatgaggagccagctgtgtctctgagcaagacagaggaagatggaagaacatctctgggagccttagaggatagggtaagagattgcattactgaatccagcctgagatcagacatgtgccatagaagcaacaactcgttgagggactccactgaaggaagcaaatcaagtgaaactcttagtagagagccagtcacattacacgcaggagacagggaagatccctctggttgcttcacattcacatctgcagcaagtccatctgtgaaaaactcagcttctcgttcattcaattcttctcctaagaagtctccagtgcactcactcctaactagttcagttgaaggttcaataggttccacatcacagtatagatctgccaaacctattcattcatctgattctgttaaagattcacagtctccgccaatagaaacaacaggaaaaacatgcaggaagcttcagaacagactagaaagcttgcaaactctggtagaagatttacagctgaagaaccaagcaatgtcttcaatgatcagaaatcaagaaaagaggatacagaaagtaaaagaccaggaaaaaatgttactaaaatgactcgttgcttgcctattctttacagaggaatgaggcccaattaattgtggtgttactcgtaattagtgccctgtgtactttttctttttatgtgaaaatttaataaaagataccctgtcttgtaaactctattttgaaataaactattcttgaatccctcacagtaaa

SEQ ID NO: 120864 - DNA, 1728 bp, Homo sapiens
  Payload ID: 3679
  Gene Symbol: CCDC158
  Gene Name: coiled-coil domain containing 158
  Uniprot ID: Q5M9N0
  ENST ID: ENST00000434846
  CDS Start-End: 172-1392
acttcctaaaaaacgatagcacgaagcatattaaggtagatatgttctatcgttaattgtagttttgacaggtggcatctcagtaatcaaaaggaagaaaatgaaccaaaagaaccaaagagggaaccattcatacttcaagatctctaataagaagtagcaatatttaatatggaatcaaaagcttgggaatcaaataatgaagatcttttatcaagtagtggtgtcacatctaatggaggttcttcaagttcattttttgtgtcatctattcgtggtacaataattgaaaacacatcttcagctgggactttgacacaggttccttttttccctaaatatgaagtggaacttgattctcctagaaaaatcatcccatctcctggaaaggaacactttgaacgtgttttggaagaatattcacatcaagtcaaagatttacagagaagactaaatgaaagcaatgaattgcatgagaaacaaaagttttatttgaggcagtcagtcattgatttgcaaacaaaacttcaggagatgcaaatggagagagatgctatggctgacatcagacgaagggagagtcagtcccaggaggatttaagaaatcagcttcaaaatacagttcatgaacttgaagctgccaaatgccttaaagaggacatgctgaaagacagcaacacacagatagagcaactacgaaaaatgatgcttagtcatgagggagtgcttcaagaaatccggtcaatcctagttgactttgaagaagcctcaggcaaaaaaatatgtgaacatgacagcatgtctactctgcacttccgcagcttgggctcagctattagtaaaatactaagagaattagacacagagatttcttatcttaaagggaggatatttccagtagaggatcaacttgaagcactgaaatctgaatcacagaacaaaatagaactacttctgcaacaacaccaagataggattgagcagttaataagtgaacatgaagttgaaataacaggacttactgagaaagctagcagtgctcgaagccaagccaatagtatccagagtcaaatggaaatcattcaagagcaagcaagaaaccaaaactctatgtatatgcgtcagctcagcgatctggaatctactgtttctcagctacgttctgaattaagggaagccaaaaggatgtatgaagacaaggagaacctccagaattcccctttacgaatttggaccagtagaagctgtcactattggctctgtagatttggctttacccttaactttcgctttttgacaacaaaaatatctcctgatgttgattcagcatttatttttactactttgaaagcagttggggctgaattttgtattaaaaaagtgatgatttagtagcactggctggagctatatactgtgcaggaagattctgtgcaaacctctgcatagttctgccaatgcaccgccatgctggcctgtagcatcccttattattccatagctgtgtctttttgagcacagaaaaacagaaaacaccaccaccaacagacaaaccaaacctcgtgtgatttgatatgattggcaatatctctaaaatcaatgtgagattagaatgaaatcccaatactcatttgtccagtgatccaaaccaaaaagtgcattcatagatggtgaaagggaaaaccagtgctactacgtaaaaataaaagaaaaagaaaaaatctttaa

SEQ ID NO: 120865 - DNA, 1062 bp, Homo sapiens
  Payload ID: 3680
  Gene Symbol: CCDC159
  Gene Name: coiled-coil domain containing 159
  Uniprot ID: P0C7I6
  ENST ID: ENST00000458408
  CDS Start-End: 103-996
acacccctctctgtgactcagtctctgagcgttttaatacgatggtgtccccgcgggatcaaacttcagcgtcacagctgaggactggcttcgtggtccctgatgggagagcatgaacaggtgaagcccttggagaccagctcttccaaagtcaaagccaagaccattgtgatgattcccgactcccagaagctcctgcgatgtgaacttgagtcactcaagagccagttacaggcccagaccaaggctttcgagttcctgaaccactcagtgaccatgttggagaaggagagctgcttgcagcaaatcaagattcagcagcttgaagaggtgctgagccccacaggccgccagggagagaaggaggagcacaagtggggcatggagcagggccggcaggagctgtatggggccctgacccaaggccttcaggggctggagaagaccctgcgtgacagtgaggagatgcagcgggcccgcaccactcgctgcctgcagctgctggcccaggagatccgggacagcaagaagttcctgtgggaggagctggaactggtgcgggaggaggtgaccttcatctatcagaagctccaagcgcaggaggatgagatctcagagaacttggtgaacattcagaaaatgcagaaaacgcaggtgaaatgccgcaaaatcctgaccaagatgaagcagcagggtcatgagacagccgcctgtccggagactgaagagataccgcagggagccagtggctgctggaaggatgacctccagaaggaactgagtgatatatggtctgctgtgcacgtgctgcagaactccatagacagcctcactttgtgctcgggggcctgtcccaaggcctcgagcctaagaggccacaaggggcaccagtgcctgagccctccactcccctcctgggactctgactccgactgtgaccaggacctctcccagccacctttcagcaagagcggccgctccttcccacccgcttgagcagccgggactgctctccctgaagacccctccagagagaaaataaactagcccagaccctcctct

SEQ ID NO: 120866 - DNA, 658 bp, Homo sapiens
  Payload ID: 3680
  Gene Symbol: CCDC159
  Gene Name: coiled-coil domain containing 159
  ENST ID: ENST00000591691
  CDS Start-End: 1-467
atcagaagctccaagcgcaggaggatgagatctcagagaacttggtgaacattcagaaaatgcagaaaacgcaggtgaaatgccgcaaaatcctgaccaagatgaagcagcagggtcatgagacagccgcctgtccggagactgaagagataccgcagggagccagtggctgctggaaggatgacctccagaaggaactgagtgatatatggtctgctgtgcacgtgctgcagaactccatagacagcctcactttgtgctcgggggcctgtcccaaggcctcgagcctaagaggccacaaggggcaccagtgcctgagccctccactcccctcctgggactctgactccgactgtgaccaggacctctcccagccacctttcagcaagagcggccgctccttcccacccggtgcagatcctccccagtccccccctccacccatttccctcctgacctgcccttgactcccacagtctagaccctcagaacaggcccagatcctgatctgggcatgcggtccctgacctgcagccccggagtcccctggacctggccaggccctgacccaccctctctctccacagcttgagcagccgggactgctctccctgaagacccctccagagagaaaataaactagcccagaccctcctct

SEQ ID NO: 120867 - DNA, 458 bp, Homo sapiens
  Payload ID: 3680
  Gene Symbol: CCDC159
  Gene Name: coiled-coil domain containing 159
  ENST ID: ENST00000592723
  CDS Start-End: 68-178
aatacgatggtgtccccgcgggatcaaacttcagcgtcacagctgaggactggcttcgtggtccctgatgggagagcatgaacaggtggtatgtgaagcccttggagaccagctcttccaaagtcaaagccaagaccattgtgatgattcccgactcccagaagctcctgcgatgtgaacttgagtcactcaagagccagttacaggcccagaccaaggctttcgagttcctgaaccactcagtgaccatgttggagaaggagagctgcttgcagcaaatcaagattcagcagcttgaagatcctgaccaagatgaagcagcagggtcatgagacagccgcctgtccggagactgaagagataccgcagggagccagtggctgctggaaggatgacctccagaaggaactgagtgatatatggtctgctgtgcacgtgctgcagaactccatagacag

SEQ ID NO: 120868 - DNA, 527 bp, Homo sapiens
  Payload ID: 3680
  Gene Symbol: CCDC159
  Gene Name: coiled-coil domain containing 159
  ENST ID: ENST00000586451
  CDS Start-End: 107-527
gcgttttaatacgatggtgtccccgcgggatcaaacttcagcgtcacagctgaggactggcttcgtggtccctgatgggagagcatgaacagccaagaccattgtgatgattcccgactcccagaagctcctgcgatgtgaacttgagtcactcaagagccagttacaggcccagaccaaggctttcgagttcctgaaccactcagtgaccatgttggagaaggagagctgcttgcagcaaatcaagattcagcagcttgaagaggtgctgagccccacaggccgccagggagagaaggaggagcacaagtggggcatggagcagggccggcaggagctgtatggggccctgacccaaggccttcaggggctggagaagaccctgcgtgacagtgaggagatgcagcgggcccgcaccactcgctgcctgcagctgctggcccaggagatccgggacagcaagaagttcctgtgggaggagctggaactggtgcgggaggaggtgaccttcatctatcagaagctcc

SEQ ID NO: 120869 - DNA, 396 bp, Homo sapiens
  Payload ID: 3680
  Gene Symbol: CCDC159
  Gene Name: coiled-coil domain containing 159
  ENST ID: ENST00000590919
  CDS Start-End: 103-213
acacccctctctgtgactcagtctctgagcgttttaatacgatggtgtccccgcgggatcaaacttcagcgtcacagctgaggactggcttcgtggtccctgatgggagagcatgaacaggtggtatgtgaagcccttggagaccagctcttccaaagtcaaagccaagaccattgtgatgattcccgactcccagaagctcctgcgatgtgaacttgagtcactcaagagccagttacaggcccagaccaaggctttcgagttcctgaaccactcagtgaccatgttggagaaggagagctgcttgcagcaaatcaagattcagcagcttgaagaggtgctgagccccacaggccgccagggagagaaggaggagcacaagtggggcatggagca

SEQ ID NO: 120870 - DNA, 602 bp, Homo sapiens
  Payload ID: 3680
  Gene Symbol: CCDC159
  Gene Name: coiled-coil domain containing 159
  ENST ID: ENST00000588592
  CDS Start-End: 215-602
aatacgatggtgtccccgcgggatcaaacttcagcgtcacagctgaggactggcttcgtggtccctgatgggagagcatgaacaggtgccctcaaaactgggttgaggtgagcaaggaggcagctcagggacaaatttctactcccatctcatctctcttccttagaagcccttggagaccagctcttccaaagtcaaagccaagaccattgtgatgattcccgactcccagaagctcctgcgatgtgaacttgagtcactcaagagccagttacaggcccagaccaaggctttcgagttcctgaaccactcagtgaccatgttggagaaggagagctgcttgcagcaaatcaagattcagcagcttgaagaggtgctgagccccacaggccgccagggagagaaggaggagcacaagtggggcatggagcagggccggcaggagctgtatggggccctgacccaaggccttcaggggctggagaagaccctgcgtgacagtgaggagatgcagcgggcccgcaccactcgctgcctgcagctgctggcccaggagatccgggacagcaagaagttcctgtgggaggagctggaactggtgc

SEQ ID NO: 120871 - DNA, 580 bp, Homo sapiens
  Payload ID: 3680
  Gene Symbol: CCDC159
  Gene Name: coiled-coil domain containing 159
  ENST ID: ENST00000591260
  CDS Start-End: 1-580
gagaccagctcttccaaagtcaaagccaagaccattgtgatgattcccgactcccagaagctcctgcgatgtgaacttgagtcactcaagagccagttacaggcccagaccaaggctttcgagttcctgaaccactcagtgaccatgttggagaaggagagctgcttgcagcaaatcaagattcagcagcttgaagaagcgcaggaggatgagatctcagagaacttggtgaacattcagaaaatgcagaaaacgcaggtgaaatgccgcaaaatcctgaccaagatgaagcagcagggtcatgagacagccgcctgtccggagactgaagagataccgcagggagccagtggctgctggaaggatgacctccagaaggaactgagtgatatatggtctgctgtgcacgtgctgcagaactccatagacagcctcactttgtgctcgggggcctgtcccaaggcctcgagcctaagaggccacaaggggcaccagtgcctgagccctccactcccctcctgggactctgactccgactgtgaccaggacctctcccagccacctttcagcaagagcggcc

SEQ ID NO: 120872 - DNA, 534 bp, Homo sapiens
  Payload ID: 3680
  Gene Symbol: CCDC159
  Gene Name: coiled-coil domain containing 159
  ENST ID: ENST00000587531
  CDS Start-End: 206-534
cgcgggatcaaacttcagcgtcacagctgaggactggcttcgtggtccctgatgggagagcatgaacaggtggtatgtgccctcaaaactgggttgaggtgagcaaggaggcagctcagggacaaatttctactcccatctcatctctcttccttagaagcccttggagaccagctcttccaaagtcaaagccaagaccattgtgatgattcccgactcccagaagctcctgcgatgtgaacttgagtcactcaagagccagttacaggcccagaccaaggctttcgagttcctgaaccactcagtgaccatgttggagaaggagagctgcttgcagcaaatcaagattcagcagcttgaagaggtgctgagccccacaggccgccagggagagaaggaggagcacaagtggggcatggagcagggccggcaggagctgtatggggccctgacccaaggccttcaggggctggagaagaccctgcgtgacagtgaggagatgcagcgggcccgcaccactcgctgcctgcagct

SEQ ID NO: 120873 - DNA, 561 bp, Homo sapiens
  Payload ID: 3680
  Gene Symbol: CCDC159
  Gene Name: coiled-coil domain containing 159
  ENST ID: ENST00000590636
  CDS Start-End: 36-152
agcgtcacagctgaggactggcttcgtggtccctgatgggagagcatgaacaggtggctcttcctcggacaaggctctggagcgtacagctcactggtccaggactccagagccagagaccttgggatgccctgcttctggggacacagtgaggactgcagactgcaggccaggaagcccttggagaccagctcttccaaagtcaaagccaagaccattgtgatgattcccgactcccagaagctcctgcgatgtgaacttgagtcactcaagagccagttacaggcccagaccaaggctttcgagttcctgaaccactcagtgaccatgttggagaaggagagctgcttgcagcaaatcaagattcagcagcttgaagaggtgctgagccccacaggccgccagggagagaaggaggagcacaagtggggcatggagcagggccggcaggagctgtatggggccctgacccaaggccttcaggggctggagaagaccctgcgtgacagtgaggagatgcagcgggcccgcaccactcgctgcctgcagctgctggcccag

SEQ ID NO: 120874 - DNA, 1408 bp, Homo sapiens
  Payload ID: 3680
  Gene Symbol: CCDC159
  Gene Name: coiled-coil domain containing 159
  Uniprot ID: P0C7I6
  ENST ID: ENST00000588790
  CDS Start-End: 448-1341
aagatgcagaggttgatgaaggcacagcccatggagatgtggaagtagaaggggaagagtttgctctgcactagtccgaagggatccagttctgacagccaagaccactcctctcataaaataataccggatattaggtgaagatcccgaaagccccgaggaaaccctaaatctcatcctgaggacaccgatcccaccaaagccccgaggaaacgccaaatctcatcccgaggacaccgatcccaccgttaggaaccgggacctcaatccgcagcacccggattccgagaacagaggcgtcggggccaaatgggctgaatctggggcggaactaaaatgccggccacacccctctctgtgactcagtctctgagcgttttaatacgatggtgtccccgcgggatcaaacttcagcgtcacagctgaggactggcttcgtggtccctgatgggagagcatgaacaggtgaagcccttggagaccagctcttccaaagtcaaagccaagaccattgtgatgattcccgactcccagaagctcctgcgatgtgaacttgagtcactcaagagccagttacaggcccagaccaaggctttcgagttcctgaaccactcagtgaccatgttggagaaggagagctgcttgcagcaaatcaagattcagcagcttgaagaggtgctgagccccacaggccgccagggagagaaggaggagcacaagtggggcatggagcagggccggcaggagctgtatggggccctgacccaaggccttcaggggctggagaagaccctgcgtgacagtgaggagatgcagcgggcccgcaccactcgctgcctgcagctgctggcccaggagatccgggacagcaagaagttcctgtgggaggagctggaactggtgcgggaggaggtgaccttcatctatcagaagctccaagcgcaggaggatgagatctcagagaacttggtgaacattcagaaaatgcagaaaacgcaggtgaaatgccgcaaaatcctgaccaagatgaagcagcagggtcatgagacagccgcctgtccggagactgaagagataccgcagggagccagtggctgctggaaggatgacctccagaaggaactgagtgatatatggtctgctgtgcacgtgctgcagaactccatagacagcctcactttgtgctcgggggcctgtcccaaggcctcgagcctaagaggccacaaggggcaccagtgcctgagccctccactcccctcctgggactctgactccgactgtgaccaggacctctcccagccacctttcagcaagagcggccgctccttcccacccgcttgagcagccgggactgctctccctgaagacccctccagagagaaaataaactagcccagaccctcctcta

SEQ ID NO: 120875 - DNA, 1299 bp, Homo sapiens
  Payload ID: 3681
  Gene Symbol: CCDC160
  Gene Name: coiled-coil domain containing 160
  Uniprot ID: A6NGH7
  ENST ID: ENST00000370809
  CDS Start-End: 322-1299
aagccgccgcggtacccgcttcaccgggcatgctcagtcctccggccaggctttgactgcgggacgccagcgtccggccccctgcgcgcgtccggagtccgggtccctttaaatcgggcaggctcgttgctaggcaaccgcgcggcccgcgctggcgctgcactgcggtggctcagcccggagccggcccggcggggtcgcggtggccagagccgaacggggggctgccgcgcgcgggtggtggttgtctttgaggaagagaggttcgggctctccagacggcatccacgcttccagatattggaagaggtgcctggagaaatggatgctagaagaaaacactggaaggagaatatgtttactcctttttttagtgcacaagatgttctagaagagacttctgagcctgaatcttcttctgaacaaacgactgcagatagcagcaagggaatggaagaaatttataatttgtccagtagaaagtttcaggaagaaagtaaatttaagaggaaaaaatatattttccaactaaatgaaatagaacaagaacaaaatttaagagagaacaagagaaacatttcaaagaatgaaacagacacaaattctgcatcctatgaatcatctaatgtggatgttacaacagaagaaagctttaacagcacagaagataactctacctgcagtacagataacttaccagctctactaagacaagacataagaaagaaatttatggaaagaatgtctccaaaactttgcctgaatcttttgaatgaagaactggaagaacttaatatgaaatacagaaaaatagaagaggaatttgaaaatgctgaaaaagaacttttgcactacaaaaaagaaatattcacaaaacccctaaattttcaagaaacagagacggatgcttcaaaaagtgactatgaacttcaagctttaagaaatgacctgtctgaaaaagcaacaaatgtaaaaaacttaagtgaacagctccagcaagccaaagaagtcatccacaaattgaacctagagaacagaaatttaaaagaagctgttaggaagttaaagcatcaaaccgaggttggaaatgtgctcctaaaagaagaaatgaaatcatattatgaattagaaatggcaaagatccgcggagagctcagtgtcatcaagaatgaactgagaactgagaagaccctacaagcaagaaataacagagccttggagttgcttagaaaatactatgcttcttcaatggtaacatcatcaagtatccttgaccactttactggggattttttttaa

SEQ ID NO: 120876 - DNA, 1790 bp, Homo sapiens
  Payload ID: 3681
  Gene Symbol: CCDC160
  Gene Name: coiled-coil domain containing 160
  Uniprot ID: A6NGH7
  ENST ID: ENST00000517294
  CDS Start-End: 384-1361
aagccgccgcggtacccgcttcaccgggcatgctcagtcctccggccaggctttgactgcgggacgccagcgtccggccccctgcgcgcgtccggagtccgggtccctttaaatcgggcaggctcgttgctaggcaaccgcgcggcccgcgctggcgctgcactgcggtggctcagcccggagccggcccggcggggtcgcggtggccagagccgaacggggggctgccgcgcgcgggtggtggttgtctttgaggaagagaggttcgggctctccagacggcatccacgcttccagttcaaactggagaaggagggcagagatatccagtagacagaagatcttggaccccaggaagtatattggaagaggtgcctggagaaatggatgctagaagaaaacactggaaggagaatatgtttactcctttttttagtgcacaagatgttctagaagagacttctgagcctgaatcttcttctgaacaaacgactgcagatagcagcaagggaatggaagaaatttataatttgtccagtagaaagtttcaggaagaaagtaaatttaagaggaaaaaatatattttccaactaaatgaaatagaacaagaacaaaatttaagagagaacaagagaaacatttcaaagaatgaaacagacacaaattctgcatcctatgaatcatctaatgtggatgttacaacagaagaaagctttaacagcacagaagataactctacctgcagtacagataacttaccagctctactaagacaagacataagaaagaaatttatggaaagaatgtctccaaaactttgcctgaatcttttgaatgaagaactggaagaacttaatatgaaatacagaaaaatagaagaggaatttgaaaatgctgaaaaagaacttttgcactacaaaaaagaaatattcacaaaacccctaaattttcaagaaacagagacggatgcttcaaaaagtgactatgaacttcaagctttaagaaatgacctgtctgaaaaagcaacaaatgtaaaaaacttaagtgaacagctccagcaagccaaagaagtcatccacaaattgaacctagagaacagaaatttaaaagaagctgttaggaagttaaagcatcaaaccgaggttggaaatgtgctcctaaaagaagaaatgaaatcatattatgaattagaaatggcaaagatccgcggagagctcagtgtcatcaagaatgaactgagaactgagaagaccctacaagcaagaaataacagagccttggagttgcttagaaaatactatgcttcttcaatggtaacatcatcaagtatccttgaccactttactggggattttttttaaaacttaaaaaaatccttccagtaggcaagtcattgagccaaatcagtgtttattgtattttctttgcgtattacttaaaatatatgtaataggatgttattttcattttcagtaaatcacagtatctataaaacatatacatgtttccaagcttctgctttctctttctgatgaagttattgcaggaatacaaatggaaacgaagctttggaaatctcatatcagagtgtgtgtgtgtgtgtgtgtgtgtgtgtgtacacacacacatatattcactcaaaaacacataatgattcaccaaatcatttatgaatacaaatcagcaattttgtgatctcgtaagcaaatatgtctttggcacgtgaatatttttccatctgtgttcattgatgttaacaataaaaatcttgtttatgtgtataagcctaa

SEQ ID NO: 120877 - DNA, 2229 bp, Homo sapiens
  Payload ID: 3682
  Gene Symbol: CCDC163P
  Gene Name: coiled-coil domain containing 163, pseudogene
  ENST ID: ENST00000626177
  CDS Start-End: 471-827
aaaggtagttccaccgcctccatcgccggttgtgttcgcaagaggcgacctcagtttcccaggtggcgctgcggcagccagtccaaagtcggactttcaaaaccaacccgaagttttgaacccggcggcggcagttgtcactggcacaggtttggcgtggtggcgccagtgtactacttctggggaggtctcaaccaggttctggcaccttcaatccccacctgatatctgcgtatcatcacggtatcccgcttttcccccagttccccaagagcgtccttcctttccctagtcacaggatcgcagttttggtctgatagtgcatccacctaccccagtgttgcatccccacttccctctttccatctaacgtggtggcctttcctggggataccttgggtatcccccgctaggagagcaagcacaagacaccagggagccagacccctgccgctcccctgccacaggatatgaatacgagcctcagctggtttgagcagctggatgtgcttctcaacgctactgatggaaatgtggtccggaataagcagtggctgtatcctcttggggtctccacagagctcattggcctgtgcatctgtttcttctgtagcagtggctgtatcttcttggggtctccaccgcagaatagcactgctgtcactcctgcagtgctgtgggaggagtcagagattatgcagaaggaattgaagttgctgcagtaccagttgagccagcaccaggagctgctgctgaaacagctggctgagggacgacaggctcaggttggcagttggaaggatctccattcatgttgtccaatctaagctgcctctgcccactaccttcaccatgtctgtttcttcatccagctcttaattcagtcttctggacagtaacagtagctgggaacttttatggaagccagatccccagaggagcaccctttctaacctggagcccagcatctttcagctccatgcccagagtcttaagcaagaggacctattcctttggggccccaaaatgctcctgaatgacctgtaaggactcgttaagaatagtaggatgaaggcttctttgcccaccctcccctccaaggccctgtttctgggctgcccgcccctaccttcttgaagtagctattatctgtcttatctactgaggcttttcactgcctgcccatccttgccccccatctcagctcactgcaacctccgcctcccaggttcaagcaattgtcctgcctcagcctcccaagtagctgggattacaggtgtgcgctaatttttgtatttttagtagagatggggtttcaccatgttggccagtctggtcttgaacttctgacctcaagtgatctgcccgcctcgccctcccaaagtgctgggattacagttgtgagccaccatgcccagcctatagctgtaccttctgagtgcaagctcagttgaacttggaaagtaatgggagttcccattctggtgagtagaatgaggtaggacactgctctagggcagtagtgctgggggatgcaaaggaggatgagatattctggtgggacttggatctggacagtaggaggctacctttcctcatctccagcttctgccttttttttttttttttttgaggcaaggtcttactcagttgcccaggctggagtgcagtggcatgatcttggctcactgcagcctccgcttcctgtactaaagcaatcctcccaccttagccccccaagtaataatatatgggactacaggcacacgctatcatgcctggctaatttttaaatattttttgtagagacaggttttcaccatgttgcccaggctggtctcgaactcctgggctcaactgatccaccaactttggcctcccaaagtgttcagattacaggtgtgagctgctaccatgcctagccccagcttctactgcttgaggctctctttggcatctccacacatcatccttagcagcccagactgcatttctgtagcagcctcttccctggtctcttctttcagtctctctgcctctaatccagtggctttaagaattttttggctgtgacttccagtaagaaatacaatttacattgtgacctagtaaatatgtgtgtagatttattaactgaaataaaaatgttatgatttaatttttatccttagtgggagtgatacactgatattttctattatatttcattaaaaaatgccttgtgactaa

SEQ ID NO: 120878 - DNA, 1076 bp, Homo sapiens
  Payload ID: 3682
  Gene Symbol: CCDC163P
  Gene Name: coiled-coil domain containing 163, pseudogene
  ENST ID: ENST00000628293
  CDS Start-End: 366-659
acccgaagttttgaacccggcggcggcagttgtcactggcacaggtttggcgtggtggcgccagtgtactacttctggggaggtctcaaccaggttctggcaccttcaatccccacctgatatctgcgtatcatcacggtatcccgcttttcccccagttccccaagagcgtccttcctttccctagtcacaggatcgcagttttggtctgatagtgcatccacctaccccagtgttgcatccccacttccctctttccatctaacgtggtggcctttcctggggataccttgggtatcccccgctaggagagcaagcacaagacaccagggagccagacccctgccgctcccctgccacaggatatgaatacgagcctcagctggtttgagcagctggatgtgcttctcaacgctactgatggaaatgtggtccggaataagcagtggctgtatcctcttggggtctccacagagctcattggcctgtgcatctgtttcttctgtagcagtggctgtatcttcttggggtctccaccgcagaatagcactgctgtcactcctgcagtgctgtgggaggagtcagagattatgcagaaggaattgaagttgctgcagtaccagccagcaccaggagctgctgctgaaacagctggctgagggacgacaggctcaggttggcagttggaaggatctccattcatgttgtccaatctaagctgcctctgcccactaccttcaccatgtctgtttcttcatccagctcttaattcagtcttctggacagtaacagtagctgggaacttttatggaagccagatccccagaggagcaccctttctaacctggagcccagcatctttcagctccatgcccagagtcttaagcaagaggacctattcctttggggccccaaaatgctcctgaatgacctgtaaggactcgttaagaatagtaggatgaaggcttctttgcccaccctcccctccaaggccctgtttctgggctgcccgcccctaccttcttgaagtagctattatctgtcttatctactgaggcttttcactgcctgcccat

SEQ ID NO: 120879 - DNA, 953 bp, Homo sapiens
  Payload ID: 3682
  Gene Symbol: CCDC163P
  Gene Name: coiled-coil domain containing 163, pseudogene
  ENST ID: ENST00000629482
  CDS Start-End: 366-803
acccgaagttttgaacccggcggcggcagttgtcactggcacaggtttggcgtggtggcgccagtgtactacttctggggaggtctcaaccaggttctggcaccttcaatccccacctgatatctgcgtatcatcacggtatcccgcttttcccccagttccccaagagcgtccttcctttccctagtcacaggatcgcagttttggtctgatagtgcatccacctaccccagtgttgcatccccacttccctctttccatctaacgtggtggcctttcctggggataccttgggtatcccccgctaggagagcaagcacaagacaccagggagccagacccctgccgctcccctgccacaggatatgaatacgagcctcagctggtttgagcagctggatgtgcttctcaacgctactgatggaaatgtggtccggaataagcagtggctgtatcctcttggggtctccacagagctcattggcctgtgcatctgtttcttctgtagcagtggctgtatcttcttggggtctccaccgcagaatagcactgctgtcactcctgcagtgctgtgggaggagtcagagattatgcagaaggaattgaagttgctgcagtaccagttgagccagcaccaggagctgctgctgaaacagctggctgagggacgacaggctcaggttggcagttggaagatccccagaggagcaccctttctaacctggagcccagcatctttcagctccatgcccagagtcttaagcaagaggacctattcctttggggccccaaaatgctcctgaatgacctgtaaggactcgttaagaatagtaggatgaaggcttctttgcccaccctcccctccaaggccctgtttctgggctgcccgcccctaccttcttgaagtagctattatctgtcttatctactgaggcttttcactgcctgcccat

SEQ ID NO: 120880 - DNA, 2053 bp, Homo sapiens
  Payload ID: 3682
  Gene Symbol: CCDC163P
  Gene Name: coiled-coil domain containing 163, pseudogene
  ENST ID: ENST00000625766
  CDS Start-End: 440-640
gtgttcgcaagaggcgacctcagtttcccaggtggcgctgcggcagccagtccaaagtcggactttcaaaaccaacccgaagttttgaacccggcggcggcagttgtcactggcacaggtttggcgtggtggcgccagtgtactacttctggggaggtctcaaccaggttctggcaccttcaatccccacctgatatctgcgtatcatcacggtatcccgcttttcccccagttccccaagagcgtccttcctttccctagtcacaggatcgcagttttggtctgatagtgcatccacctaccccagtgttgcatccccacttccctctttccatctaacgtggtggcctttcctggggataccttgggtatcccccgctaggagagcaagcacaagacaccagggagccagacccctgccgctcccctgccacaggatatgaatacgagcctcagctggtttgagcagctggatgtgcttctcaacgctactgatggaaatgtggtccggaataagcagtggctgtatcctcttggggtctccacagagctcattggcctgtgcatctgtttcttctgtagcagtggctgtatcttcttggggtctccaccgcaggccagcaccaggagctgctgctgaaacagctggctgagggacgacaggctcaggttggcagttggaaggatctccattcatgttgtccaatctaagctgcctctgcccactaccttcaccatgtctgtttcttcatccagctcttaattcagtcttctggacagtaacagtagctgggaacttttatggaagccagatccccagaggagcaccctttctaacctggagcccagcatctttcagctccatgcccagagtcttaagcaagaggacctattcctttggggccccaaaatgctcctgaatgacctgtaaggactcgttaagaatagtaggatgaaggcttctttgcccaccctcccctccaaggccctgtttctgggctgcccgcccctaccttcttgaagtagctattatctgtcttatctactgaggcttttcactgcctgcccatccttgccccccatctcagctcactgcaacctccgcctcccaggttcaagcaattgtcctgcctcagcctcccaagtagctgggattacaggtgtgcgctaatttttgtatttttagtagagatggggtttcaccatgttggccagtctggtcttgaacttctgacctcaagtgatctgcccgcctcgccctcccaaagtgctgggattacagttgtgagccaccatgcccagcctatagctgtaccttctgagtgcaagctcagttgaacttggaaagtaatgggagttcccattctggtgagtagaatgaggtaggacactgctctagggcagtagtgctgggggatgcaaaggaggatgagatattctggtgggacttggatctggacagtaggaggctacctttcctcatctccagcttctgccttttttttttttttttttgaggcaaggtcttactcagttgcccaggctggagtgcagtggcatgatcttggctcactgcagcctccgcttcctgtactaaagcaatcctcccaccttagccccccaagtaataatatatgggactacaggcacacgctatcatgcctggctaatttttaaatattttttgtagagacaggttttcaccatgttgcccaggctggtctcgaactcctgggctcaactgatccaccaactttggcctcccaaagtgttcagattacaggtgtgagctgctaccatgcctagccccagcttctactgcttgaggctctctttggcatctccacacatcatccttagcagcccagactgcatttctgtagcagcctcttccctggtctcttctttcagtctctctgcctctaatccagtggctttaagaattttttggctgtgacttccagtaagaaatacaatttacattgtgacctagtaaatatgtgtgtagatttattaactgaaataaaaatgttatgatttaatttttatcctt

SEQ ID NO: 120881 - DNA, 1526 bp, Homo sapiens
  Payload ID: 3682
  Gene Symbol: CCDC163P
  Gene Name: coiled-coil domain containing 163, pseudogene
  ENST ID: ENST00000626657
  CDS Start-End: 366-722
acccgaagttttgaacccggcggcggcagttgtcactggcacaggtttggcgtggtggcgccagtgtactacttctggggaggtctcaaccaggttctggcaccttcaatccccacctgatatctgcgtatcatcacggtatcccgcttttcccccagttccccaagagcgtccttcctttccctagtcacaggatcgcagttttggtctgatagtgcatccacctaccccagtgttgcatccccacttccctctttccatctaacgtggtggcctttcctggggataccttgggtatcccccgctaggagagcaagcacaagacaccagggagccagacccctgccgctcccctgccacaggatatgaatacgagcctcagctggtttgagcagctggatgtgcttctcaacgctactgatggaaatgtggtccggaataagcagtggctgtatcctcttggggtctccacagagctcattggcctgtgcatctgtttcttctgtagcagtggctgtatcttcttggggtctccaccgcagaatagcactgctgtcactcctgcagtgctgtgggaggagtcagagattatgcagaaggaattgaagttgctgcagtaccagttgagccagcaccaggagctgctgctgaaacagctggctgagggacgacaggctcaggttggcagttggaagctcttaattcagtcttctggacagtaacagtagctgggaacttttatggaagccagatccccagaggagcaccctttctaacctggagcccagcatctttcagctccatgcccagagtcttaagcaagaggacctattcctttggggccccaaaatgctcctgaatgacctgtaaggactcgttaagaatagtaggatgaaggcttctttgcccaccctcccctccaaggccctgtttctgggctgcccgcccctaccttcttgaagtagctattatctgtcttatctactgaggcttttcactgcctgcccatccttgccccccatctcagctcactgcaacctccgcctcccaggttcaagcaattgtcctgcctcagcctcccaagtagctgggattacaggtgtgcgctaatttttgtatttttagtagagatggggtttcaccatgttggccagtctggtcttgaacttctgacctcaagtgatctgcccgcctcgccctcccaaagtgctgggattacagttgtgagccaccatgcccagcctatagctgtaccttctgagtgcaagctcagttgaacttggaaagtaatgggagttcccattctggtgagtagaatgaggtaggacactgctctagggcagtagtgctgggggatgcaaaggaggatgagatattctggtgggacttggatctggacagtaggaggctacctttcctcatctccagcttctgccttttttttttttttttttgaggcaaggtcttactcagttgcccaggctggagtgcagtggcatgatcttggctcactgcagcctccgctt

SEQ ID NO: 120882 - DNA, 1320 bp, Homo sapiens
  Payload ID: 3683
  Gene Symbol: CCDC166
  Gene Name: coiled-coil domain containing 166
  Uniprot ID: P0CW27
  ENST ID: ENST00000533508
  CDS Start-End: 1-1320
atggcgcccaagaaaaagcgcgggccgagcgcagggagccagccaggtggtgcggcggccgcgggtgccgagcagccgctatcggagcgcgcgcagtacctgcaacgcgaacacgcgctgctctcggagcagctggacacctgcgaggagagcgttgaccaggtgctgcgagagaacgccttcctggaccgcgaggcgctgcgcctgcgcgaggagaaccggctctacgccagctacgtgagcgcgcgcgcccagcgctgcgccaaagccatcgtccggctggacgagcagaaccgcgtggacctagcgcagatccactggcagcgggcggaactggcctcgctctaccacgggcgcgaggacggggtgcgcgcgcagctgttggagatggaggcgcgcgcggcacagatggcacagcaggtgcaagagctgcagccctacaaggtgctgcagctggagcagctggcccggatccgggcgctggagcgcgagctgctgcatatgcgcgtggagcacacgcagctgctccaccgcgtgaagcggcgcttcctggaggacaaggcggccttcgagcgcgaggcgcgtcagcgcgtgcagtcactggcgcggcgcgcggagcgggaggcggtgcgcgcgcttgtggcgcacacgcaggccatcaaagcggacaacggacgcctgcggcaggagctgctgctgctgctccgccggacccagctgctgcaccacacgcggcgccagctgctggaacagcgcgagcaactgcaccgcgagcacgaggacacgcgggacctggcgcgtgtgcacggctggctgcgcaggggccccggaggcccgccgctctgggagcggccggccttctcccagcccacctcgcgccccgggtcattagccgcccccataagcccgtcgcgcgcggcctcccagaccccgtctgtggtaccgtcgcgcgcggccccccgggcctcgtccgtggtcccgtcgcgcgaggcttcccgggtcccctcgttggtgctatcgagcatggactccagggtcccatcgctggccacttcaaaggtgggatcccggatgccatccctgaccgcttcgcgcgcaggctcccgggccctgtcgctggtgcagtcactcgagggctctgggatctcttcggggtcctcaccgagggtgtcctcacaggacactctccgctccacgaagtctggccccaagcttctctctggcctgtcccgggatcgggatccggctcttctccccccacagtcggaggacagcgtgaacgctgaagctgcggcagaagcctccccgggtagagcctga

SEQ ID NO: 120883 - DNA, 1320 bp, Homo sapiens; identical to SEQ ID NO: 120882
  Payload ID: 3683
  Gene Symbol: CCDC166
  Gene Name: coiled-coil domain containing 166
  Uniprot ID: P0CW27
  ENST ID: ENST00000542437
  CDS Start-End: 1-1320

SEQ ID NO: 120884 - DNA, 619 bp, Homo sapiens
  Payload ID: 3684
  Gene Symbol: CCDC167
  Gene Name: coiled-coil domain containing 167
  Uniprot ID: Q9P0B6
  ENST ID: ENST00000373408
  CDS Start-End: 60-353
gcgcacatagcgacttggtgggcgcgtccagtgatgactgggggatcccggcaagtaacatgactaaaaagaagcgggagaatctgggcgtcgctctagagatcgatgggctagaggagaagctgtcccagtgtcggagagacctggaggccgtgaactccagactccacagccgggagctgagcccagaggccaggaggtccctggagaaggagaaaaacagcctaatgaacaaagcctccaactacgagaaggaactgaagtttcttcggcaagagaaccggaagaacatgctgctctctgtggccatctttatcctcctgacgctcgtctatgcctactggaccatgtgagcctggcacttccccacaaccagcacaggcttccacttggccccttgatcaggatcaagcaggcacttcaagcctcaataggaccaaggtgctggggtgttcccctcccaacctagtgttcaagcatggcttcctggcggcccaggccttgcctccctggcctgctggggggttccgggtctccagaaggacatggtgctggtccctcccttagcccaagggagaggcaataaagaacacaaagctgttcccgtctgctgagtaaa

SEQ ID NO: 120885 - DNA, 21466 bp, Homo sapiens
  Payload ID: 3685
  Gene Symbol: CCDC168
  Gene Name: coiled-coil domain containing 168
  Uniprot ID: Q8NDH2
  ENST ID: ENST00000322527
  CDS Start-End: 139-21384
acttgataagataccagcagcactggccaaatgttgcacatggttatgagttgggcataccgaggttttatatttcagggcctctgaaatcaaggacttctgaatgagacaccagtctctttcacatatgacattaaaatgtcaaagcaatattattcctttaaaaaaggggtagggagtggactggaagataatacattcatgacattatgggactttctagagtcctggattattcaaaatgattgggtggcaattttctttataattttactaggaattatttttgagataatactcatgaaagcttgtgcatccttttggaagaagcccacacttcctgaaaagggtagttcagatgtccaggagacggaagacagttgccccaaaagcaggaaacttgctccagagaattggtcagttattaattcatcttcaggagaaagagttggcacctttttagaaaaaagaattacttcatcacttacatctgaagaaaaggaatgtaactttgaagatagaattttattctcacgtgaaatactatggtcaggtactagtgaaagtgaagatcaagtaagtccctctagtgaaagtcatgtgccatcttcaaatggaatcagctcatctttgccattgttttattcagaagtagaggaaacgtgtctaagccatacagagcatccagacagagaatatgaaacaatacaattttcctccaagaaattattttcaatgatgaaaaccaacaaaaacaaaaattcaggattttcttctgatcttagcttttcagcatctagattcactgtagaaaatgaagatctagatgtggcaccttgccctcttgcccacttatttctttctagagatcaagttagacttctggaagaaaatgtgaggaatcaaattccttcaaaacccaaaactaagttagggagcagaactacttatcaatgctcaagatctcaagagtccttgaatcagaatcaaccttctgttggaatggttatttctgtccaagcacaggattcttttccaggacaaaatgcttttcagaatcaaggtctttatgaagtccaatttactagtcaagcccaatatataaatcataaccaagaatcaattaagagccagcctgagagcaaagccagcaactttgcccagcctgaagatgtgatgaagaagccattttctagcagcacacaagactccttccagtcccaagatctggataggaaccaacattttgttgaagttccatcaattgttgaggcaaaatattcagtaaagggcctggagtctgatgaacacttaggtgaggaccaacattgtgtttggtttatagattcaaacaaggttaaatattcaattaaggggcaagacactatttttaagaatgctgaatttctcgttttaactctgaatccaaatttagtcactgaagatatgccacaactaaggagtgtaaaagcacaaggccagcaacaaattgtttcatcagaattgaaccaggattctgtatatagctcagtgcctcttttgtctaccattaaagggcagaaaaatagaagaaaaacaccagacagtaaaagcaaactcagtcttaatgttccatctctaaaagccaaaaaaacaccaacttcacaagtatttcaaatcacagtatgtcacactttaaaaaataggaatgagttaggatgcaagaataacactgagaagaaagaattacatgaaaggaaagatatatcagatatagctttgcatcttatttctgtttccaagcttattctgccttatgttaaaaattattccagaaaacaactagtgaaagtcatgccgggtttaataaaatgtggacattttctgcagaagcaaaataagtcaccagatacagagaaaatcaattatgcaggtcctcttgaggagacaggaatctcagatattactaaaaaggaaaaggagtatgacaaagaaaacaaaagactaaaaaacatttcaccaaaaatgttacctcagctagaacaatccttcatggtcaacactgttcaactaaaagcaccttgtttactagtagaaacaaatgggaagagtaaagaatctcttaaagactcaattacacaagcaaagggaattggtattacagaatttcatgttctaaatagtaaaaaaccatttgatctccatattccaaagcacaagacatctttagaagaagctatatcaaaacctatgcagaaacttgtttcctctcctgaaatggaatcgaacaatagaatgaaaatacaggaggacctacaaagttcagaaaattcccatcttcaactttcaaatggagaggagttaccaaccagtacaccaaaaacgcaaaggtgctttccaagggaaaatacacagaaacaaaaagattttttggaacttgttctggagttgtcaaatgtcggtttgctcatttccccaggaagcaaaatgcataaaagcagtgaagaattagaagccataaaaattcaagtgaatacagaaagtgtaaatctgaaggaaagtaaaccattgatacttaatgttacagaagacagtgacctacgtgaaagtgaggaactggaatgcaacactggaagtaacataacaaatatgcatcaagataaagaaacgtctgatgcatttcacagtgccacttacactaccatttctcaactacctgatacagaaacacatagcatatcaaaagccaaggcagacacattaagaataataaggctcagtcattcagcatcaaagcaagagaaattaccagatgagaaggaaacacagaacgcagaatacattgataagagctgtacatttaaaaagccacaacaatgtgatagaaaggaacaggagaaagaggcaaattcagagctgacacaaggcttcaggttcagcatacatctaaagcaaaagcccaagtatgtcaaattccaaatggaacagatcagttcaggaagtagtaaagccccaaataaagagcaagaagtccaaccacaaactctttctacacaaactattttggagaatagtccatgccccatgatggatccatttcaagttgagaaggtgaagcaaagcacagatagacctacagacagagagagtgccggagatccaaagaatccacttacaatgccagagaacttgccagttggtgaacttttaattgaaacaacagagtatagtgtcccatttggtggaaacctccaaaagacaacggatagtcatattgcagaagaaaaggaagatgtaaaaagatatttacctgcagttgccctggggtctttcaataaccacttgcttactttaccatattttaaaaggcaggaaattaaaaaaaaattatcagaaacaaaaagtgtactcagtgtcaaatatgtaattatgaaagtaaagaagccagcaatctcactgatgccttatattaatatatgtggtacttcaaaccacaggaaaaaaatgggaggcaattttgaaattataattaaacagatactgcaagataaaattgcagcaggtatgcttctgaatgttatttaccctcccatgtctattttgcctaatactagaatgtatagcagattaaatgcagagaatcacagtcatatcaagctagtccaagaggaatcccaaattgaaagggaagaaaagtatccatatttcattaatgagggaaatgaatcccaaaacacactagatgctaaattgcaagatgaagtaaaaggcgtcaaagaaactctaccaaaagcagtcctgcatgatagctgcaaccttggacttgatgcacatctagagaaggagattaaaacagagaaagaaatgcatcaaccaatcccattcacagaaactattattgagtctgttgtttctcccataatggaactatctcatgctgagaatgtgaagagtactcaaaaaacacaaacagactgcaaatgcactgcagattcagagacgccttctccaatatcaggaaaatcactgattggagaccctttaaaccaaacaagagaaagttatattccaagtaatggaagtgatacaagagaaatgggttactgttttgcagaagaaaagacagaaataccaaaagatttaccagcaacttcgccagagactttcaattattgcactcctgttttatcttgttctaaagtgatgaaaaagagagtaacatttgcactcacaacaagtacagcgaagcccaaatgtgtaaatacaaaggctgtgaagccatcaatctcagagacagtcagtgtcacaagccacagaaagaaatcagaattagactttaagactaagtttaaaaagataaaccaaactaaaggattggtacctgaatgtctaaataccctttgctctccaatgcatagcagattgcagagagagttctgtctccctgcgtctcaattaaagcaaggagaaacagcagataagacatacactgatgtctttgctaagaatagcatatcccatgacagagaggaaaaattgcaagatggaaaggaagaggaacataaagttttattagaagcagcgccacagctgagccagcacctggggtctgaggcgggtcaaatgaaggaaatccatcttgaatcagacccagtgctgaactgtttaacactggagctacatattaatggacaacgtttgcagcaccaaacaggttttgaacaaactactttagagactagtctccaaatgggtcctttagaagctgaagaactacaaaaagccaacgaaacagaaaatgacataaaagtccttggaggtcctaagattccacctcccaaagctttacaggctctggagaacagcgatggcttaatactcaatgcatatcagaaggataatgagcttgtcaaatcagatgaggaactgaaccaaccaggaagtacaaatattcaggtacaaccacaaacacattttacacaaactattttgaagtctacttcatgccctacactggatcaatttccatttgaaaaggtagagagtcatgttaggttttcacctctaaagtctggggaagcaaaggttgatgaaatcatattttatgcaagagaaggtggtatctcatctgattctagccatcaaaaggaacaggctggtggtactgaaaagaaagagacagcgatttttggttcctgcatgcctgctttatctacacctaaaacgacgagaaacttaaaacaattttcagacatgaaaactttagtgaatcccaaatgtggaattataaaggcaaagaagccatcaatttcatacatgctcaatatcagggctggtgctggtccgaaacgtagaaaagaactgagctgtaacttgacaaccaaaatgaaagaactgcatcaaggcaaaaagggggtagatgaaacatatgctttcctgactatgacacctgacattaacaagtatagcaaggtagaaacagaaaaagacacgctaagagaaaaaagactcagttctactcaagtaaagcaagatacatctccacatgaagatagtattacttcacgtgacattaaagaaacccttcttcaagatgaagagcaagaagaaaggaaacaggaggcattgttaaaagtaattccacagcacctgcaacatttcatgttccgttcaggtcaggggaaggatcttgactttcacaaattagaaaaccaaggaagtaggaaaattctgtttgttaccaaacaagatgtcccacagcaacttcagcctgcagagccaatacaaagagaggagacaaagaaatgcctccagacccaaaatggcacaatatgtacagtaaattcaaaacttcttcctctaaaatcagaggactcagtaaatggtgaagttttaactggtgcaataaaacgtggtgtaccaactgataggaaatgtatgggggaacagcacaattcaggtaaaggggaaaaggcagagtttaataaagatctacaagcaactgtcctggagttacagaaatcaccacatggtggggaggcacagaaggccaatttgactgacatggaaagtggatctagtaatgcaatgaacatgaatgtacaacatgaaagggaagataaaaatattcaaaaaatgttaacagaatcagttccatgctatagtcaacacctccgtttcagtacacatcaaatgaaagatcctgacccttgcaaatcaggatctgaaccgaagagtcccgaaggcagatcttggaatttgtctcacatagtgcaaaaaacaaagcaagaaacacactttagagaaactgttttagagcctatttctggatacatgatgaaacaaagtcctcatatgcaagaaggaataaaatgtatggaaggtctaaagacttcatttcccaaaacagggaaatcaaagattggttcaataccacgtgataccccttgggatgaaaatcctagaaggaaatgggatagttctatttctgagaaaactgcatggaatcaaaaaaacttacaaacagtcttaaaacctttagatttctccagcctcatgtcatctgaatatgaaagccggagctatacattagagtttataggcaagaaaagtatgagtcccaaatgtgtaactttgaaggcaaagcaactacgaattttgcagttgtttaatatcataagatattctacagaaaaccacagaaagaaaaagcaacaccgttttaagtacaagatgaaagggaagcaatggtacacaagtataggagaggcattactcagtgccactgaatatgctaagagtacaacatccaaatcaatgattgataaactcttatacaatacagcagcgaggtgcattctatctaacagaacacgccgacaaaatctggatggtcatattacagaggaaaaggaagaggtacaagaaaatgtagctgcaattttcttgggtcttttagatttcttcatgcctgttttatctgactctaaaaaccagaggaacacagcacagttatcagaaaaagaaattatattcaatgccaaatgtttaactatgaaggaaaagaagtcgtcaatttcacagatacataaaatcaatagagagtctaccagaaaacataggaagaaatgtaaatcctatttaaaaactgtatccaacagaaagtgccaagaaaatcatggtcatattacagaggaagaggaagaagtacaagaaaactcacctgcaactttcctgggtcctttagatttcttcatgcctgttttatctgactctaaaaaccagataaacacaatacagttatcagaaaggaaaattatattgaatcccaaatgtttaactatgaaggaaaagaaaccaccaatttcacagatacataaaatcagtgggcagtttactacaaaacataggaagaaacttgaatccaatttaaaaaccaaactgaaagcaatgtggcaaggtgaaaatgtggctgatacatttccaaatacaacttccttcactccagattcctctgacattaaaaggcaaagtggattccaaacagagatagacatgagaatatcagggttaagtcatacacaaccaacacaaatagagtcactagctgaagggatagcaaggtattctgatcccattgacaagagaagaacttccaacttggtaaagggagcaaaactacatgatagagaaagtggggaagagaagcaagaacatcttacagaaatggatccattctatgcagaaaacttcatggcaaacacatatcttagaaaggatcgtcatcttggtaaatcagaggatgtgcttttgggagaaacttttttctcaaaaagtcagatttacaaagggaattcagaaaaaaatgtaaaaatagaaaaaaacaaaaatggaaaagaaagtctcaaagttgggctcgcaaggatggagaaatcagataattgtgcagaactgagtgaggcaacagatgatgccatatcaaacaaatatgataaacagaacattggccattctgttttaaaagaaaatgctttctgtaatttggcagcaattgtcccagattctgttggcaggcattcacctgcttcagaagaaatgaaaagacagaatggcagacttaaaatggctgacaggtcaagtccccaaggtagacctttgcaggcaaagcaatcagcagtttcacaatcacctgatactgcaggttatgctgttgtaagcaataataaggagcagaaacagaactttaaagcccagaagacagaagcagaagttgatttaatagatcaagaagcaaagataaatgttgcagaagagtttaatccagaatctgtttttttctctaagatacatccacttcaaattgaaaacaagaaagaatttaaaactgcagactggaaaacaagggcagatcccaagacatttgccctgccaaagaaacagcaagagctgtgtgtctcaggaactatctggagttatcctaatccctacacatctatttctcctaaaatcataagacataaagataaggcaaagacagcagatgtggaaagtactatgcataccaaacagataaaattgaaggcaaaaagaataacagtttcccagctgcttgagtatggtactgcaagcaataaaaaagaactgagaggtaacatccagcagcagaagtcattccagctgagtaaaaatgcagtacatcgagttctaaaggctgtttatgactctggatactgtgtgtctagcattaaaaagcttacagaagtaaaaatggagaaagacaagccaaaagacaggacatgcattcttccacagccaaagctggagaaaccactaaaagaaatgcaaaggtcattgtcaggttgtactgatatgtccagcattcttagaaaacaggaacaagatattagagaaaaggaacaaaaacaccaaagcatttcagaagacatatcccaatactatattggaccgttaaggattagttcacaacaaatcaattacagtagtttcgatgccccacgaattagaacagatgaagaacttgaattcctcattgcacaaagagcaaaggaaaaagatgtgggcattgccaaacattcagtttcaattccgtgggagagagaaggatcgaagagactagatattccactaaactcaaaaggacagaatatattttttacagagttggatacttctcaacagaagacttgccaggagcaagaattgctgaaacaagaagatatttctatgacaaacctggggtctatggcctgccccattatggaacctcttcatttggaaaacacaggaaaggtaactgaggaagaagatgtgtacattaacagaaaaattagttcacatgtattgggaaaagaaggattaaaggaaactgatatatttgtaggttctaaaggacagaaatttctttgtacaaattcagaggtacagcacaaagtgcctgcagagcagaaagaacaggtgaatccagatcatgttcccgaaagtattctggattctgaatctttcctcagtaaggaccctcttcacttaaaacaggcagtgaatacagcaagaaaagaaaatgttaccatctctgaaagtttcaatgaaaatctttggggaaaagagcaatcaaagttggatattacattaaaatcaaatagacagaaaatggacttttcaaaaaaattgaggatgaagcatctaagtaattattatcagaataaagagaatattctggaatctgttctcccttgcatattgcatcaactttatattgaaaatcccaagaaagaaggctcagcagaagaaatcatgagttcaaaagttctaagcccaatggtagagaaagcatcacatgaagtaggtattccggtggatcaacctccatgttcagaaggaatacatttgaatattaaaggaagaaaagaacatccacaagaaagtacacacgaggcttttccagcatctgtttctcactctttaatggacgtacttcagattaagtcaccaaaggtaaagaaagcattaaaggcaatcaatagtttagggtacctcacttcaaatacaaaaggaattggcttgctttttccaagacaggcagaaaaggaagaaaaatatacatacaaggctcttccaaagcctgcatctcactccaaaacagatctatttcagttcaatgcatctatgcaacaagagaaattagatgctatggatattccacattatgactatttaacttcacagacaagagaagcagtgaaacaaatggatgtcatagttggatatactcaaaacagtaaaaaaagacaagacttactcaaaacaggccaaaaatggcagtacctaccaatttcctatgagaacttttgggagcatatatcttgccctcaaaagtatccctgtctcctgcaacatttaatgcctcaggaaaaggaagcattatcagaaggaggtaatttatcaagccggacaccaggactagacttgttttctgcagatcagctaagcactataactaagaatagactagaatggattgtgcccttgatttctccaaggcagatgaaaaaacaagattcaatgctgcctttaggatcataccataaaactataaaatatgcaagtctcttatttccaaaaggaatgaaatcatcagatggggtacaggtctttgatttaatatcaaataatagctcacccaagttaagacttgggaagaagatagaaacacaaaaggcaaatgaaaaggtacaaaaagaagtatgtctgcctataacattacattctctttctgcatccatgcctattttgcaagaaagtaaaggacagaaggatagcgtagaacaagttattaggaaaggcgtgatatgccacaaaaggagaacttcgaaatggaagaaatcagtattttcacatatactcaataccagtgactgtggtgcctcaagtaacagactagaaatgcagtggaacatgacagacaaaatggtcaatgtgaaacatagaatgagtgaaatagatttggttgcagcaaaaatatgtgagtctattctttctttacctcacttcaaattgaataaagaaacaattgatggggtgatctcaagtaatgttaaaagtacaaaacaacacatatcacagggaaagaatgatagagtaaaagcaatggatatgaaaagaataaaaagccctaacatcattttgaagccaaggaagtcatcactgtcacatatactcagtataaaggaatttcctttgctgttagacattataaaacaagagggcaagatgcaagaaggtaaaggtaaatcaagtatgaaactgacaaacttgtgtacttctttaccatctctatcacatagtaattcaaattcaagaacaaaagcaggtaaagataagtcaggaactctaaagggctgccttccaccactaaagctccaggcatcatcaaatgccagaagagtatcatctgcagagtcaattaatagagacagtttaagtaatgtaatagaatcaaagtgttttccacagaaaaagaaggaagatagagaaaatatagtagatgtgaaagatgtaatgggcctcaaatgtatcactttgaaaggaaagaaatcactttttagacatttactgcatggaaaagaaccacaacggagcaataaaaaactagagaaaatgacgcaggaagatgaaagtaatctaaatgtagttcagaataaactctgtgcttctattctttctccacctcacttggaatggaatcctagaataaaagaggtatacatgagaggaataacaagattctgtctttcatcatcaacacagcaggaattatcagatacaatggaaaaatgtgagcagccaattgatgatagtttaagcagtattgaaaaagcaaaacatatgccgcagaaagacaaagacagagtggaaaaggctttggaaaaaatcatgcattccaaaagaatagctttggaggtgaagcagccttcaatattccaagaattagagttgaacatcaaagaaaaaggaggaaagattcaggaagataaagaagttgagatttggagcaaaccttttgcttccatctcttttctaccttactctaaagtgggcacaatagaaggagaggaagccatgagaataaaaatgagatcctctttttcacaaccaaatctccaagagtcatcagatacagagaaaacagcatatgaaaagtgtatttctgataatatctcaaacagtgtaaaaaaggccctagaatctatattgcaaaaagaacagaggcaaaaaatggaaaaaattagggctttgaagaaaatgaaatcatcaatttcacagggaattcagttggacattaaagagcaagagaaaaggatagaacatattaaaggtgaaccaagtgtgcttctgacaaatgcctgcgcttccattccttctccttctcatttacaactggatacaaggagagaaaaagcagagtatgtcactgaaataacaagatactatcttccagaactatcacaccaaaaatcatcagaggcaggggaaaaagcagatggagtggccagtaagggtgatatcacaatcaaagtacaaaaagcaaaagattacatgcaacagaaagaagacgatgaagtaaaaatatcagctaagaaagacataatgcatccagaagacaaaggtctgaaagcaaagaaggcactttcacaggacctaccattgaatactaaagagccagggaaaatggatcaagaagctcaggagcaagggaaagaggacagagaaggtgaggagcaagggaaagaggacagaagaggtgcaggacaagaaaaggttgatagagaagacaaagagcaagggaaaatggatcacgaagttgaagagcaacagaaagcagatggagtaggcatagagcaagggaaaatggatggagacaagaatgaacaggaaagagttctgttcctatatttgccttccaattcttctctaacccattatatattggacacaagaatagaaggagaggaagaccaacaaggaataatcagacctggtattttacaaccaaggcaccagaaatcatcagagacagggaaaaaagcaaatggggtgcccagtgagggtgatagcgcaagtgaagtacaaaaagcaaaagattacatgcaacagaaagaagaggatgaagtaaaaatatcagctgagaaagacttaatgcatccagaagacaaagatctgaaaggaaagaaggcactttcacagaacctaccactgaatcctaaagagccagggaaaagggatggagaaggccaggagcaagggaaagaggacggagaaggtgaggagcaagggaacagggatggagaaactgaagagcaacagcaagcagatggagtaggcacagagcaagagaaaagggatggacacaagagtaaacaggaaacagttctcttcctacatttgccttctgagtcttctctaacttgttatgaattgaacacaagaaaagaaggagaggaagacttacaaggaataataaaatctgctactttgcaactaaggcagcagaaatcatttgatgcagggaaaatagcacatacaaagtcttttggggtggatagctcaaatgatgtaaaaacagtacaagaatacaagccacagaaagaagtagatagaggaaaaacagtaagtgtggattatataatgcaacctgaaggcacaatttttgaggcagagcaattatcacttccacatacactcaatatccctggcagcagtggctcaaaaactagagaagtactaacaaacataaaagaaaaattgagacatgtacaggaaagaaaaagtgaactggatgtgtttctgacaataccttctctatctcactgtaaattagacaaacgaacagcaggcaaaaaagaggaacaaggagtaacaagatcttttcttccaccctcatggcacatggaatcatcagatacagggaaattaaaatatacattgtcatatttgaatgatatcacaggtgattcaaacagaacaaaatacatggcccagatccaaaaggataaagcaaatatttcagagaaaagtgtaatgcatcccgagtacatagctgtaaaggcagagaaatcacccctttcccatatactaaaaacaaaggaactgcaggtgaacatcagtcaacaaggggaaaaggcacaagaaggtgaggtggaaatagttgtacttctgagcaaaacttgtccttttgtcacttcttcagctttccttgagttagactcaataaaagaagaggaaggtgaaccacgaataacaagaagctttatgccacatcttgagatccaggaatcattgccttcaaggcaaacagcacctacaaagccaacagagagccttgtaaagaaagagaaacaactccttccacagaaagaagacagagtacaaacagtatccatgcatggcctgatgcaccccaatggtgccgttttcaaggcaaagacatcagcacctccacaagtgttcagcatcactgagcacagtcctctgagtaagagaaaggagccacagtggggcatgaaagagagagcaggacagaagcaggacaggacaggacgtcctcatgtgattctgacaaaaactcatccattcatgccttctctctctcaccatagattctctccttcacaaccaaagcttcctatatcatcaggtgcaggaaaaagcagacttgcaaattcaaatgaaggtattagctcacataaagtaatactaaaagcaaaccaacaaatgccatataaagaggcaaaggacagagtaaaaatagaaggcagggaaggtagaatactccccaaaaggatacatttgagggcagaggcactcccacttgcacttctatgcaatggaaagaactactctttgcacattgaagagcaaggggaaggagtacaggaaagcaaaaaggaacctggagtggttccgaggaaatctgcttcattccctcctcctccattttacctgaattgtgacactagaaggaatgaaaaggaaggcacattaggaaaaacacaattcagttttccaccactaaagattcaggattcatcagattcaggcaaaaaagcatatactgagtcactgcatggttacacattaagcaactcaaaaggaccagtgcaacccacagcacagggagaagagaaaggtggactcagaatagatatggaagacaaaatgctccccaaatgtacagacctgaaagcaaagcaattactactctcagatatactcaataccaaaaaattgcagtggaaaagtaaagaacaaaagagaaagattcaggaagataaaaataaacaagttaaaggactgccaagcattaatacttctttacttactccaccatatcttaagtttgatacaacagaaggacaggagaacgtgataagaattgcaaaagtgtctctcccacagtcacggtccaaggaatcatcagatgcagggagaatagcatgtccagaagcaacccatggagaactttcaagtgatgtaaagcaattaaaagcacacctgctacagaaagaagagaaggatagagaaaaagttgcggatatgaccagtgtactggatcccaacaaaatgtatttgaaggcaaagaaatcgcctgtcttacatacgcacagtttcagtgatcttcagtggaaaactagagagcaagaggaggaaaaggtccagaaagttaaaagtgggccaggtgtcatgttgtctaagagtccttctagatcctccccacttcaccttaatgtgaatacagggtttcaggaggaaagcataccaatattaacaagaccctcttttcccctagtaaaactccaggtatcaccagatactgagggaggcacatgtataaggccaattgctggtgatattttaatctatctacaaaaaggaaaacatgtgtcacagaacaaggaagaggatgacgtgcaaatagtaagcatcttaatattccccaaacatcaggaagagaaggtgcaggaatgtgaaggtgaaccaggtgtggttctgaccaaatctacttcattgccatctctatctcaactagaattggataaagaaacacatttaggtaatgaaatgctaagacttaaaagacctattttgcggagaatatcacacataggggagactgtacatagagagtccgtcgttggtgatatcccaaaagatgttaaaaatgaaaagcaacatatccctcaaaaagaagagaggaaccaaaaaaaaataatcgatatgagaggcacagatataactttgaagtcaaagaagtcacctcgttcctgtatgctccacagaacagaactgcatgtgaacattggagggcaaggacgaaaggaacatgaaggtcaagataaaccaccaggtatgattcaaagaaaaatgtgcatactcttttccaaacctttgccatctaaccttaaactggagagagctacgcatgcagatgaagaaaggcttggaggtaagacatcctttgtacttccactaatgccatcagcattaccagatacagagaaaacagcagatgcagaggcaaggagtggtgatgtaagaaaaggaaaaccacataggtcacagaaagaaaacaggcatgaagtgaaaacgatagatatgaggttcaggatacactgccaagaggcaaggatttcaccaatgtcacatatccttaatgcaaaggaattagtgttgaatattaacaaactggagaaaaaagtacacaaagataaagatgaagcatgtgtggttctgtcaaggacttttctttctataccgtcagcacctcctctttatctggattcagggaacaaaacagacaaagacactccaggaattacaggatcatcttgtccacagcgaactctccatgtaccctcaaatacccagaaaataacaaatagagactcagttgaaggcgttgataaaaacgttgttaagcaagcagaacagtatgtgccccgcccagaggcagagcaacagttgacctcaaacttcatgatcagcgtccagcaaaggaaccaaccttcacgagtcaggtcagaagaagatttgaatcagttagttttaaactcacgggatgaggacatttatttcacagggtttggtaccataagaagtgggaaaaggccggaatggctctttacagggaaaaaggctcagcctgtaaaatacaaaacagaaactttaactgcgtttctttcctatcccacaatggatgcaactaaaatgggaggtctggaagaagacactgaaataatggataacttaaaccataaaatcagtcctaaggcttcagtttcactgataaggaaaatatctaaggaactgtatgtcacacttggcacccctgcaaattcaaaaggattttctgtttcagagagatacgctcaccagcaagaaacttcatcgaaagtatctccagaacttgcaggttcatgtaaatttgataagccaaaggaagatggacaaagtaatgatagaatcagcaaaatgttttctcccaaagtgttagcaccacagacaaagggatcactcaaaaaaataagtatcgtcaccaactggaatgccccccaaaatatagaagaacaagatattgtcatgaaaaagcaagtgatccgacggtgtgaacatgggcacaagaccaggacgaacactatcctttctaagtttccccttcaaagtggaaagcagaagacaccatcggaaacagatgtggacaagaaaacaacagcgcacctcagcctacagatgctaccaggaatacacatggatatgacagagattgaccctgcaaaagggggaaggaagcaggcattgctcatttcagaacaagaggaaggtgttctggaatttcttccgaagtccctattccctccctggacttttcaatttcaatcaggggatctggaggaaaaacatcaaacagacgcaaacaccaatataaatctagagcagaaaaaattagaaatggacaatgatagtactgtgaatcagaaagaagggaaattaaaaataggcacaaacagagctttacatctgcaagaagagaaaacagagatgcacaaggccaggactgccaatctggagaaggagagaggaagaatggacacaagcagtagtgcacacccgcatcttctatctctaaaggcagaggaatctcaaatgaagactcaagtcatcactcatagggagaacagccgcctaatcatgcaaaagcagaaaaaagaactagaagcatctaatgcaaaacaaagcattcaactacaaaaattatttcaaagaaatgttctggattcattttattcatatgttcctctttctcccaaacgtaaagatcagaaaggcagattaacaataagagatctgaaaagagaattgagcaccaaatatttaactatgaaaatccagaatcacccaattccacagatgcttaatatcacggggcgtggtacaccaagcaatagaaagaaattagagtatgatgttaagttaaagaacatagcttcgtggagtaaagatgtctcaggaatatttatcagaagtctttctatttccatcatgcgttcacctcacactgaccctaagacaaacctagaaagagaaaagagaatctgtcttcctaaattccaggaaaaatcaccaaacactagtgaaatgtctaagagagacactttaacaattgtaaaaggggaacagaattttacaaacacagttccacaagatccccagccctttgcagtggacaaacaacaaatgcagaaacttcctaatgtcaaatcagaagcaaacctcagaagtgaaatgaataaaaaatacttaaaggcacaaacaaaagaacggattgttccagagcatgatgtctcaaggatcattaaaaaaccagacttacgtatcatcgagcaggaagaaaagattctaaaacgcattctgacacccacagagtgtccatctatgcttgaagatccaaagttacccaagcaaagggatcagagtgaaccagtatgggacatgaccacacaaaaggttcagcagcaaaaagctttcccaggaactgtgcccataccgcctcaagttaaaagtagcgaagtcaaaatagttgcagacagtacaaatgcagaacatttacttcccatttgtgaagcaaccaaagctatctctgagtcccaggttaaaaatatgatccaagacaaagtttcttctgataaactagataacatacaagcctataagcctgacgacttgaagtcaccaccttttccagagggtccagatacaatatcaacagcaatatatcccaaaacgcagcacaaatcccttttagaacagtttactcccaaagaaaaaaataagcttactagtcatttagagtcaaaagcacttgaaatacaactgaatctgataccagagatggcaaggaaatctttacaaatgttcaacttttatccaaaagggactatttcaaaagataacagttggaggttctattctagacataaaacaatgaactttatgtctctagaagggactgataccatagaacctaactcaaaacataaacaccaaaaggattcacctcttgccagcaatatgaagacactgattgttgatgtttcaagtgacagtgaggagacaatcacaaagctacagagtattaataagctagaaaatggaacatctgcagtgacttctgctagtgagatgctattgcctcataccctccaaaaccactcagtaaaagaaaaaggcaaactcctcatgcacttttctgtgaaaacattggagatacaaatgaaagcctttcccagaattgtaagagaatcttatgcaatgaccagtgctcatgagagaaagaaacccttatctaactgtattcatcctggtttcacaggaccaaaacgacaaaacagaattttgttactttctgaggagaaatctctccatcaaatagatcttgatttacaatacaaataccttcgttttctcctggggcttcctgttggaagtacgttccctaagccaaatgtacttcccaaacatagtaagttaaacacaattgcagtgtgtaaaaacgtaaatgctggtggacaaagtggtagtctttccattgatacagaactgttagaacaacatatttctttcaaaaagcaaagtccccatgaaaactcatcactcatcagaaaattcccacagccaacccttgtgtgtgcttctgaccgtgatctgcacagcccgaggaagaaagatactcaagttctttcagagtcagaattccatgtgactccagaaaaaaacaaacaatatcatgtatggtttcaagaaagaaatacatgtgaatctgttgatttaaggacccagagaaatgctactggttcagctgtttcatgtgaaactcagatttctgaagattttgttgatattcagacagatattgagagtccagctgacttggacgagtgttcatgtcttgaagtaagtgagagtgaggaatgtgtgtttctggaagccaactcttatttaagtcaggaatcagaaaacattctatttgaattacagacaggcattcctttggaaaatgtctacaaaatcacgactgatttgaaatcattttacagtgaagattcaggttcccattgtactagagagtgcagaaaggaaaccttaattattacaccaccttcctgtaagtcccacaaaagcaggaaatatagatcatcttccaaaatgaaatctcctgactggttgtgtcatagttcatcaaatactgcggaaattcagtctaggtcatctagtgtatcattcagtgaagagaagatttcatggactaccaagagcagaacaagttactcttcagctcccttaactgaatcaaatattaaatcacatcttgcaaaaaaccaaggcaagtctcacaggcacccagaaagccaagaaagaaagaaggccagatctgatttatttaggaagaacagcagtcattgggaccacgattacagttgtacacacagcaaagggaaacgtgacagaaagaagagagtgtatgattatgagtcagaaagattggattgtttccaaagcaaacataaatcagcatcaaaacctcatcatgacgatatcaacttctattctgaaagaaaacaaaaccggccctttttttttgcctgtgtaccggcagactcactggaggttatacccaaaaccattcgctggactattccccctgaaaccttaaggaaaagaaacttcagaattcccctagtggcaaagatttcaagttcttggaatatatggagttcctccaaaaagttgttggggtcgctctcggggtcccttactaccgtttttcatagctgacattaccatagctaaactcctctgaagtggacagctggtcgctattgtgatattctgtgaaaaatacaatcatataacatcc

SEQ ID NO: 120886 - DNA, 708 bp, Homo sapiens
  Payload ID: 3686
  Gene Symbol: CCDC169
  Gene Name: coiled-coil domain containing 169
  Uniprot ID: A6NNP5
  ENST ID: ENST00000239859
  CDS Start-End: 33-677
ggaaagacgcgggaggtctctggcctgacactatgaaggaagagagaaactacaacttcgacggtgtgagcaccaaccgcctgaaacagcagttgctggaagaagtccgcaagaaggatgcagtgcaactctcaatatttgaactaagacacaagattacggaactggaagccaaactcaatactgacaatgaaggtagtgaatggaaaacccgttatgagacacaacttgaattaaatgatgaactagaaaagcaaattgtttatctcaaggagaaagtggaaaaaatccatggaaactcttcagatagactatcttctattcgtgtctatgaacgaatgccagtggaatccttaaacacattacttaaacagctagaagaagaaaagaagactcttgaaagtcaagtgaaatactatgcacttaaactggaacaagaatcaaaggcttaccagaagatcaacaatgaacgccgtacatacctagctgaaatgtctcagggttctggtttacatcaagtttctaaaaggcaacaggtggatcaactgcctaggatgcaagagaatctagtgaaaactggaagatataatccagctaagcagaagacagtgagtgccaagagaggaccagtaaaaaagattacaagaccaaaccatcttccagaactccatccatgattccagaactggatggatttctatttcttcc

SEQ ID NO: 120887 - DNA, 716 bp, Homo sapiens
  Payload ID: 3686
  Gene Symbol: CCDC169
  Gene Name: coiled-coil domain containing 169
  Uniprot ID: A6NNP5
  ENST ID: ENST00000239860
  CDS Start-End: 210-635
aaagacgcgggaggtctctggcctgacactatgaaggaagagagaaactacaacttcgacggtgtgagcaccaaccgcctgaaacagcagttgctggaagaagtccgcaagaagtagtgaatggaaaacccgttatgagacacaacttgaattaaatgatgaactagaaaagcaaattgtttatctcaaggagaaagtggaaaaaatccatggaaactcttcaggaatccttaaacacattacttaaacagctagaagaagaaaagaagactcttgaaagtcaagtgaaatactatgcacttaaactggaacaagaatcaaaggcttaccagaagatcaacaatgaacgccgtacatacctagctgaaatgtctcagggttctggtttacatcaagtttctaaaaggcaacaggtggatcaactgcctaggatgcaagagaatctagtgaaaaccctcctcttaaaagaagaattggaccctttaaaggtcagctgcttggagacattgggtttcagtgctgcaggtgtggctggaccagagaataggacatgcctcggacaaaaagcactctggcccgcctgcttacatgggtcctcaaccttggctgtgtgtcagactcacctgaagagctaaaagtaaaatactcagacatgtgcaccacccccaggattgtgatctcacatgtatttctttaagcctcccccaggaaattgt

SEQ ID NO: 120888 - DNA, 624 bp, Homo sapiens
  Payload ID: 3686
  Gene Symbol: CCDC169
  Gene Name: coiled-coil domain containing 169
  Uniprot ID: A6NNP5
  ENST ID: ENST00000379862
  CDS Start-End: 255-593
ggaaagacgcgggaggtctctggcctgacactatgaaggaagagagaaactacaacttcgacggtgtgagcaccaaccgcctgaaacagcagttgctggaagaagtccgcaagaagtagtgaatggaaaacccgttatgagacacaacttgaattaaatgatgaactagaaaagcaaattgtttatctcaaggagaaagtggaaaaaatccatggaaactcttcagactatcttctattcgtgtctatgaacgaatgccagtggaatccttaaacacattacttaaacagctagaagaagaaaagaagactcttgaaagtcaagtgaaatactatgcacttaaactggaacaagaatcaaaggcttaccagaagatcaacaatgaacgccgtacatacctagctgaaatgtctcagggttctggtttacatcaagtttctaaaaggcaacaggtggatcaactgcctaggatgcaagagaatctagtgaaaactggaagatataatccagctaagcagaagacagtgagtgccaagagaggaccagtaaaaaagattacaagaccaaaccatcttccagaactccatccatgattccagaactggatggatttctatttcttcc

SEQ ID NO: 120889 - DNA, 5944 bp, Homo sapiens
  Payload ID: 3686
  Gene Symbol: CCDC169
  Gene Name: coiled-coil domain containing 169
  Uniprot ID: A6NNP5
  ENST ID: ENST00000379864
  CDS Start-End: 332-751
gttggggttcaccgcctcgtgccgtactggcttctgggtggcccttaatgtcttgtgctctaaggtgctgaggggaaagacgcgggaggtctctggcctgacactatgaaggaagagagaaactacaacttcgacggtgtgagcaccaaccgcctgaaacagcagttgctggaagaagtccgcaagaagtagtgaatggaaaacccgttatgagacacaacttgaattaaatgatgaactagaaaagcaaattgtttatctcaaggagaaagtggaaaaaatccatggaaactcttcagatagactatcttctattcgtgtctatgaacgaatgccagtggaatccttaaacacattacttaaacagctagaagaagaaaagaagactcttgaaagtcaagtgaaatactatgcacttaaactggaacaagaatcaaaggcttaccagaagatcaacaatgaacgccgtacatacctagctgaaatgtctcagggttctggtttacatcaagtttctaaaaggcaacaggtggatcaactgcctaggatgcaagagaatctagtgaaaaccctcctcttaaaagaagaattggaccctttaaaggtcagctgcttggagacattgggtttcagtgctgcaggtgtggctggaccagagaataggacatgcctcggacaaaaagcactctggcccgcctgcttacatgggtcctcaaccttggctgtgtgtcagactcacctgaagagctaaaagtaaaatactcagacatgtgcaccacccccaggattgtgatctcacatgtatttctttaagcctcccccaggaaattgtacagaaaagattgggacccactctgctggtttagtgtggcttcatctctcaaactgaatgaaacttcttccaactctcctcgagctgacttcaccttggtctttttatttttacttttttacagtgagagataaggattttattttttcttcgttgttatttatttcaatttttattttagattcagaggtacctgtgcaggtttgctatcgtggtatattgtataatgctgagatttggggcacaaataatcccatcacccagggactgagcatagtagccgaaagttatttgtcaatgtttgctctcctttcttcctccaccctctagtggtccccagtgtctattgttgctgtctttatgtccatgagtacccagtgtttggctatcacttgtaagcgagaacatgcagtatttggtttcctgcttctgtgttaatttgcataggaaaatggcctccagctgcatccatattgttacaaaggacatgatttcatttcttttatgactgtgtagtattccatggtgtgtatcaggagtccccagcctctggccgtggactgttacccatccatggcctgttaggaattgggctgcccagcaggaggtgagctgcaggtgagcaagcattaccacctgaactccacctcctgtcagatcagcagcagcattaaatcctcataggagcacgaactcttgtgaattgtgcatgtggaggatctaggttgcatactccttatgagactctaatgccagatgagaatttaactaatgattaatctgaaacagtttcatcccaaaaccatcccctccccaaaatacagtccgtggaaaaattgttttccatgaaaccagcccttggtgtcaaaagggttgggaactgctggtgtatatgtagcacattttctttactcagtccactgttgatgggcacctaggctgattctgtatctttactattgtgaatagtgctgcgatgaacatgcaagtgcatctgtctttttagtagaaagatttgtgtttttttggatatatacccagtaataagattgctgggtcaaatggtagttttaagttctttaagaaatcttcagactgctttccacagtggctgaactaattcacattcccaccaacagtgtctaagtgttcccttttctccacagtctcaccagcatctgttgcttttttacttttcaataatagccattcagactggtgttagatggcatcttatggtggttttgatttgcatttctctgatgattagtgatgtagagcatttttttcatgtttgttggccacttgtatgtcttcttttgataagtgtctgttcgtgtcttttgcccattttttttaatggggttattttttgcttgctgagttgtttcagtttcttacagtttctggatattagacctttgtcagatgcatagttcatggatattttctcccattctgtaggttttctgtttactccatcgctagtttcttttgctgtgcataagctctttaattaggtcccatttgtcagtttttgttttggttgcaattgcttttgcgacttactcataaattcttttgcaaggccgacatccagaatggtgtttccaggggccaggcctagtagttcatgcctgtaatcccaacactttggaaggccaaggcatgaggattgcttgagcccaggagtttgagaccagcctgggcaacatagtgagactgccatctctacaaaaagtaaaaaattagccaggcatggtggtgcatgcctatggtctcagctgcttgggaggctgaggtgggaggatcacttgagcctggcaagtcaaggctgcagtgagctgtgatcatgccactacacttaaggctaggcaactgaatgaaaccctgtctcaaaaaaaaaaaaagtgtttcctaggtttcttctaggattcttatagtttgagggcttacatttaaatctttaattcatcttgaggtaatttttgcatatggtgaaaggtaggggtccagtttcatccttctgtatatggctagccagctattccagcaccatttgttgaatagggagtcctttccttattgcctatttttgttgactgttgaagatcagatggctgtaggtatgtggcttttttttcctgggttctttattctgttccattggtctctgtgtctgtttttgtgccagtaccatgctgttttgattactgtagctttacagtatagtttgaagtctggtaatgtgttgccactggctttttcctttttgattaagattgctctggctattcgggctcctttttacttccacatgaattttagaatagtttttctagttctgtgaaaaatgatgttagtagtttgataggaatagcattgaatctgtagattgctttgggcagtatgactattttaacaatattgattcttccaccccatgaatatggaatgttttaccatttgtttatgttgtctgatttcttttggtggtgttttatagttctccttatagagatctttcacctccttggttagatatattcctaggggtttttgtgtatgtctttgtgtatgtggctattgtagattggattgcattctcgatttggctcttagcttgaatgttgttggtgtatagaaatgttattgattttttgtacattgattttgtatcctgaaactttaccgaagttgtttatcaattccaggacccttttggcagagtctgtagggttttctatgtatagggtcatattatccttgaagagagatagtttgaattcttttcatatgtagatgccttttttttttctttctcttgtctgattgctctggctagcacttccagtactatgttgaatagaaaatagctattttggggagaattttccaaccaagatgtcaaaacaataatgatgagagcattacatgctaattcccaatattttcctttgacttatttaaatttaaataatccaatttttttacttaatgaccttgtggagatatttataaaacaccttttgatttttgactggggctggatttttaaaaaatttataaagagctatatagtattgatttcaaataaattattcctaccttttcttcatctgaattagttttagcatgtataggagattccaaagcagagttacctatatcaattttagtactattattttcatattctactggataagaaattacttatttggaactaagaattattcttgcaacagaagcttatcagtaacactatttgattgctttttgctgtgtgcacaggtgaggacctgtctagacttctatactatgtacattgtattaattttgttcataaattaggtaattgagttatagatactaatttaatatttaaaaaatttagattgttgattttaaatatcagaataaccaaactgtaacaacagtgctgggattttggtatttaaaaagggcagagtataccagaatattgaaaactggtattgaaatcactacatataattgaattatgaaaaagtacctttaagataataaagcactacataaatatgagctcatatcatatatttgacagtagggcattatttttacaggttaacattcaattaatctgactatgaattagaaaaatcttgaatttgtagagttcatttaactttattaaagcaatttgccaactcagctacagaaatacagaaaatattactatctggagaactacccagtcgtaagtttatcatcgttgaaattgcttaagcagagattaggtgaccattcctcaggaatagtatacgaaggattcctgcagtggtggaggtgtgtatttgattgctgtcagtgtgccttctgatactaacattctgtaattccctgctcatttatcacacaacaaaacatgagacaaaaataactccataaaatatatgttgattataccatataggttgtatacatatagactataaatatgagctttcaaaaacgttttgccattagctaataactaacaaaatcagttttattagggtggttttgtgtttatattgcatggtgttcaatgagcttatatctgtagttttcatcaaatgtggaaaattttgggccatttttgtattatttttctgccctttcctgtcctcctgggactttaattacagcctgttgtaaaccacttgatattgttccttttggttctttttttatatcttctgtcactgtatttatgttttcctttaagtaattggataggcatataatgacttttagcatacttacacagtatctttttcatttctcagtctgtttctggtgactgatttttctcctggtttcgggtttcattttctgcttcttgtaatatctactaattttatattagatgccaggcattgatgatttcacattgttggttatagatttattcttataggcagttaaattaattgcagttcagtttcttcttttcaagcctttgttagggtaagtatagagtgagcttcaccccacagagagtttaacaccatttctaaggcatagctattgtgggatcactagaaaattctgtgagtgatcagctgggacactcaacactggctagttggacctcagatgcctcacaggcctgtgtggcactctgcttgacctcgtagagttttgctctaggcttacatgtcttaatatccagccacctctcaaggggctcctatgcagatttctggaattctgtttttacatatctgttagctctctggtactctgctctgcaacttcagccacttcagcctccctgaactccagcctctgtcttctcaactacatgaaaccaccatgctttgtttgggatcccctaccctgctctgaggtctgtgcctgcaggtagaaatctagaatgatggatgggcctcacttcattcctctcaggggtcatagtcttaaggtgcatgtcaatatctgcagttgtttcatatatttttgactaattttctgtttcttcacagtaagaagctaaatctttcccctgttactctcaaagccagaagtaaaggataaagcattaaaataaaagcaaagaaaatattttaaaatctaatataaaaa

SEQ ID NO: 120890 - DNA, 854 bp, Homo sapiens
  Payload ID: 3686
  Gene Symbol: CCDC169
  Gene Name: coiled-coil domain containing 169
  ENST ID: ENST00000506800
  CDS Start-End: 257-532
aaagacgcgggaggtctctggcctgacactatgaaggaagagagaaactacaacttcgacggtgtgagcaccaaccgcctgaaacagcagttgctggaagaagtccgcaagaagtagtgaatggaaaacccgttatgagacacaacttgaattaaatgatgaactagaaaagcaaattgtttatctcaaggagaaagtggaaaaaatccatggaaactcttcagatagactatcttctattcgtgtctatgaacgaatgccagtggaatccttaaacacattacttaaacagctagaagaagaaaagaagactcttgaaagtcaagtgaaatactatgcacttaaactggaacaagaatcaaaggcttaccagaagatcaacaatgaacgccgtacatacctagctgaaatgtctcagggttctggtttacatcaagtttctaaaaggcaacaggtggatcaactgcctaggatgcaagagaatctagtgaaaacttttaaagtgactaaaagccctaaaggaagaaaataactaaggagccattggtaccctggagcaaaagaacctgagggaaattgatactaggacttgcctcctcttaaaagaagaattggaccctttaaaggtcagctgcttggagacattgggtttcagtgctgcaggtgtggctggaccagagaataggacatgcctcggacaaaaagcactctggcccgcctgcttacatgggtcctcaaccttggctgtgtgtcagactcacctgaagagctaaaagtaaaatactcagacatgtgcaccacccccaggattgtgatctcacatgtatttctttaagcctcccccaggaaattgt

SEQ ID NO: 120891 - DNA, 753 bp, Homo sapiens
  Payload ID: 3686
  Gene Symbol: CCDC169
  Gene Name: coiled-coil domain containing 169
  Uniprot ID: A6NNP5
  ENST ID: ENST00000491049
  CDS Start-End: 253-672
aaagacgcgggaggtctctggcctgacactatgaaggaagagagaaactacaacttcgacggtgtgagcaccaaccgcctgaaacagcagttgctggaagaagtccgcaagaagtagtgaatggaaaacccgttatgagacacaacttgaattaaatgatgaactagaaaagcaaattgtttatctcaaggagaaagtggaaaaaatccatggaaactcttcagactatcttctattcgtgtctatgaacgaatgccagtggaatccttaaacacattacttaaacagctagaagaagaaaagaagactcttgaaagtcaagtgaaatactatgcacttaaactggaacaagaatcaaaggcttaccagaagatcaacaatgaacgccgtacatacctagctgaaatgtctcagggttctggtttacatcaagtttctaaaaggcaacaggtggatcaactgcctaggatgcaagagaatctagtgaaaaccctcctcttaaaagaagaattggaccctttaaaggtcagctgcttggagacattgggtttcagtgctgcaggtgtggctggaccagagaataggacatgcctcggacaaaaagcactctggcccgcctgcttacatgggtcctcaaccttggctgtgtgtcagactcacctgaagagctaaaagtaaaatactcagacatgtgcaccacccccaggattgtgatctcacatgtatttctttaagcctcccccaggaaattgt

SEQ ID NO: 120892 - DNA, 837 bp, Homo sapiens
  Payload ID: 3686
  Gene Symbol: CCDC169
  Gene Name: coiled-coil domain containing 169
  Uniprot ID: A6NNP5
  ENST ID: ENST00000503173
  CDS Start-End: 31-756
aaagacgcgggaggtctctggcctgacactatgaaggaagagagaaactacaacttcgacggtgtgagcaccaaccgcctgaaacagcagttgctggaagaagtccgcaagaaggatgcagtgcaactctcaatatttgaactaagacacaagattacggaactggaagccaaactcaatactgacaatgaaggtagtgaatggaaaacccgttatgagacacaacttgaattaaatgatgaactagaaaagcaaattgtttatctcaaggagaaagtggaaaaaatccatggaaactcttcagatagactatcttctattcgtgtctatgaacgaatgccagtggaatccttaaacacattacttaaacagctagaagaagaaaagaagactcttgaaagtcaagtgaaatactatgcacttaaactggaacaagaatcaaaggcttaccagaagatcaacaatgaacgccgtacatacctagctgaaatgtctcagggttctggtttacatcaagtttctaaaaggcaacaggtggatcaactgcctaggatgcaagagaatctagtgaaaaccctcctcttaaaagaagaattggaccctttaaaggtcagctgcttggagacattgggtttcagtgctgcaggtgtggctggaccagagaataggacatgcctcggacaaaaagcactctggcccgcctgcttacatgggtcctcaaccttggctgtgtgtcagactcacctgaagagctaaaagtaaaatactcagacatgtgcaccacccccaggattgtgatctcacatgtatttctttaagcctcccccaggaaattgt

SEQ ID NO: 120893 - DNA, 1088 bp, Homo sapiens
  Payload ID: 3686
  Gene Symbol: CCDC169
  Gene Name: coiled-coil domain containing 169
  Uniprot ID: A6NNP5
  ENST ID: ENST00000510088
  CDS Start-End: 332-670
gttggggttcaccgcctcgtgccgtactggcttctgggtggcccttaatgtcttgtgctctaaggtgctgaggggaaagacgcgggaggtctctggcctgacactatgaaggaagagagaaactacaacttcgacggtgtgagcaccaaccgcctgaaacagcagttgctggaagaagtccgcaagaagtagtgaatggaaaacccgttatgagacacaacttgaattaaatgatgaactagaaaagcaaattgtttatctcaaggagaaagtggaaaaaatccatggaaactcttcagatagactatcttctattcgtgtctatgaacgaatgccagtggaatccttaaacacattacttaaacagctagaagaagaaaagaagactcttgaaagtcaagtgaaatactatgcacttaaactggaacaagaatcaaaggcttaccagaagatcaacaatgaacgccgtacatacctagctgaaatgtctcagggttctggtttacatcaagtttctaaaaggcaacaggtggatcaactgcctaggatgcaagagaatctagtgaaaactggaagatataatccagctaagcagaagacagtgagtgccaagagaggaccagtaaaaaagattacaagaccaaaccatcttccagaactccatccatgattccagaactggatggatttctatttcttcctttttttttccatttataatattcaagttataaagttaatggtcagcacatttcttcagggaataaaatagataagaactgccacatttttctttagttccttttccagacgtgtgttcctttgtctgcataaaagtaattttctccagtgaccctaaactatgtaatagaagtgcttgagagttttaaaatatcctagggaatctgaaggctggcatcattacacttgctttcaataatatacccatgatctgctctgatagtaacgttgctattctatttggtttctagttgactgttagcaaaaagtgtgtattcataaaacctttttgccattttgggctggatcttgctcagttttttaaattgcaggtttaaacaaagccg

SEQ ID NO: 120894 - DNA, 1873 bp, Homo sapiens
  Payload ID: 3687
  Gene Symbol: CCDC17
  Gene Name: coiled-coil domain containing 17
  ENST ID: ENST00000372044
  CDS Start-End: 93-272
ggctttatgtctctttcatcctcctctgcctttcccctgcccttgatcccttctgcaggtcttggctggtttcaggaaacgggtcccatcccatggactcccactctggggagcctgcgctcctgccctgtgggacctgtgacatggttttccgctcctcagctctgttagccacccatactcagcgcttctgcattggccacccgacccaagagatgacatttggagcacaggcatcagttgccactgaaccccagcgggccgcgaactgagccgacgcctccaagttgtggcctgtacgcggggcgggatgtcccgcctcttcggcctggagcaggagattcgagaactacaagctgaggccgggaggacgcggggagctctagaggtgttgggggcccgcattcaggagctgcaggcggagccagggaacccgctgagctcccggcgagaggcagaactttattctccagtgcaaaaggccaacccgggaactctggctgccgaaatccgggcgctgcgggaggcctacattcgagacgggggccgggaccccggcgtgctgggccagatatggcagttgcaggtggaggcgtctgcactggagctgcagcggtcgcagacccgcagaggaagggcaggtgccacctcaggggagcttccagtagtggaggctgaaaaccggcgcttggaggcagaaatcttggccttgcaaatgcagaggggtcgggcacccttggggccccaggatctgcgactcctgggggatgccagcctacaaccgaaggggaggagagatcccccactcctcccgccaccggtggcaccaccgctgccaccacttccaggcttctcggagccacagcttcctggaacaatgaccagaaacctgggcctggactcacacttcctcctgcccacatcggacatgctgggccctgcaccctatgatcctggggctggcctggtcattttctatgatttcctgcggggccttgaggcttcctggatttgggtgcaactaaggactggcttggcacgcgatggacgggatacaggaaggaccacagcgttgcccccagccctttgcctgcccccacctcctgctcccgggcccatgggcaactgtgccatccttgccagcaggcagcctgtgcccagactaccaccctcatcatcagtatctttggtctgtgagctgcaggtctggcaggggctagcatgggctagggcaccacagccaaaggcttgggtctcacttggactatttgaccaagatcagcgggtgctaagtggccgctggcgcctcccacttcgggcccttcctctggaccccagccttagccttgggcagctgaatgggattcctcaggcaggtcaggctgagctctttctgcggctggtgaatgcaagagatgcagctgtacagacactggcagagatcaatccagcaagtgtccatgagtaccagtacccacctccggtgtccagcacatcttcactggaagccagcttcctcacccccgcagttggctttgctgatcccccacctcgtacagaagagcccctcagtggagtcaaggatagagatgagggtttgggccctcaccacagttctgacttgcccccagtgagtttctgaacccaagtgaatgtggagatgagcatctgaacatgcacaggactggggcctatttccagacctacaggtttactactccatgttctgacattgggtctagaagcatctagcagttgagtacagaaaaccagttccaaccacagctttaccacctcccgttaagtccttaacttttctgtacctcttctgtttttgtaaaacagattaaggattaaatgagtttgtcaggta

SEQ ID NO: 120895 - DNA, 2216 bp, Homo sapiens
  Payload ID: 3687
  Gene Symbol: CCDC17
  Gene Name: coiled-coil domain containing 17
  Uniprot ID: Q96LX7
  ENST ID: ENST00000421127
  CDS Start-End: 145-1986
aaacttgaagatctcacagacctaatagacacggcctttcctctctgcctctggctttatgtctctttcatcctcctctgcctttcccctgcccttgatcccttctgcaggtcttggctggtttcaggaaacgggtcccatcccatggactcccactctggggagcctgcgctcctgccctgtgggacctgtgacatggttttccgctcctcagctctgttagccacccatactcagcgcttctgcattggccacccgacccaagagatgacatttggagcacaggcatcagttgccactgaaccccagcgggccgcggttgtgccacaagaacaccagggcgtgccacaagaaccccagggcctcccagaccagcaggccagtagatctgctctaaagaggttaacagaggaggaaatgcggccctggataacagaggtccccagggtgttcgcggggccctggacacgttccgaggcgcggcctcagagtcccatgtccgaggcggtgggaagccccagcgagcggctgcgggcgctgttcaggactcgcgcgaggcgcgtggcggagatggaagcgcagagccgggccctgcagctacgcggcgaggaactgagccgacgcctccaagttgtggcctgtacgcggggcgggatgtcccgcctcttcggcctggagcaggagattcgagaactacaagctgaggccgggaggacgcggggagctctagaggtgttgggggcccgcattcaggagctgcaggcggagccagggaacccgctgagctcccggcgagaggcagaactttattctccagtgcaaaaggccaacccgggaactctggctgccgaaatccgggcgctgcgggaggcctacattcgagacgggggccgggaccccggcgtgctgggccagatatggcagttgcaggtggaggcgtctgcactggagctgcagcggtcgcagacccgcagaggaagggcaggtgccacctcaggggagcttccagtagtggaggctgaaaaccggcgcttggaggcagaaatcttggccttgcaaatgcagaggggtcgggcacccttggggccccaggatctgcgactcctgggggatgccagcctacaaccgaaggggaggagagatcccccactcctcccgccaccggtggcaccaccgctgccaccacttccaggcttctcggagccacagcttcctggaacaatgaccagaaacctgggcctggactcacacttcctcctgcccacatcggacatgctgggccctgcaccctatgatcctggggctggcctggtcattttctatgatttcctgcggggccttgaggcttcctggatttgggtgcaactaaggactggcttggcacgcgatggacgggatacaggaaggaccacagcgttgcccccagccctttgcctgcccccacctcctgctcccgggcccatgggcaactgtgccatccttgccagcaggcagcctgtgcccagactaccaccctcatcatcagtatctttggtctgtgagctgcaggtctggcaggggctagcatgggctagggcaccacagccaaaggcttgggtctcacttggactatttgaccaagatcagcgggtgctaagtggccgctggcgcctcccacttcgggcccttcctctggaccccagccttagccttgggcagctgaatgggattcctcaggcaggtcaggctgagctctttctgcggctggtgaatgcaagagatgcagctgtacagacactggcagagatcaatccagcaagtgtccatgagtaccagtacccacctccggtgtccagcacatcttcactggaagccagcttcctcacccccgcagttggctttgctgatcccccacctcgtacagaagagcccctcagtggagtcaaggatagagatgagggtttgggccctcaccacagttctgacttgcccccagtgagtttctgaacccaagtgaatgtggagatgagcatctgaacatgcacaggactggggcctatttccagacctacaggtttactactccatgttctgacattgggtctagaagcatctagcagttgagtacagaaaaccagttccaaccacagctttaccacctcccgttaagtccttaacttttctgtacctcttctgtttttgtaaaacagattaaggattaaatgagtttgtcaggt

SEQ ID NO: 120896 - DNA, 443 bp, Homo sapiens
  Payload ID: 3687
  Gene Symbol: CCDC17
  Gene Name: coiled-coil domain containing 17
  Uniprot ID: Q96LX7
  ENST ID: ENST00000445048
  CDS Start-End: 59-391
ccctgcccttgatcccttctgcaggtcttggctggtttcaggaaacgggtcccatcccatggactcccactctggggagcctgcgctcctgccctgtgggacctgtgacatggttttccgctcctcagctctgttagccacccatactcagcgcttctgcattggccacccgacccaagagatgacatttggagcacaggcatcagttgccactgaaccccagcgggccgcggtgtccagcacatcttcactggaagccagcttcctcacccccgcagttggctttgctgatcccccacctcgtacagaagagcccctcagtggagtcaaggatagagatgagggtttgggccctcaccacagttctgacttgcccccagtgagtttctgaacccaagtgaatgtggagatgagcatctgaacatgcacaggactggggccta

SEQ ID NO: 120897 - DNA, 2181 bp, Homo sapiens
  Payload ID: 3687
  Gene Symbol: CCDC17
  Gene Name: coiled-coil domain containing 17
  Uniprot ID: Q96LX7
  ENST ID: ENST00000528266
  CDS Start-End: 149-2017
aaacaaacttgaagatctcacagacctaatagacacggcctttcctctctgcctctggctttatgtctctttcatcctcctctgcctttcccctgcccttgatcccttctgcaggtcttggctggtttcaggaaacgggtcccatcccatggactcccactctggggagcctgcgctcctgccctgtgggacctgtgacatggttttccgctcctcagctctgttagccacccatactcagcgcttctgcattggccacccgacccaagagatgacatttggagcacaggcatcagttgccactgaaccccagcgggccgcggttgtgccacaagaacaccagggcgtgccacaagaaccccagggcctcccagaccagcaggccagtagatctgctctaaagaggttaacagaggaggtgcagtggctgcggctatccctacaggaaatgcggccctggataacagaggtccccagggtgttcgcggggccctggacacgttccgaggcgcggcctcagagtcccatgtccgaggcggtgggaagccccagcgagcggctgcgggcgctgttcaggactcgcgcgaggcgcgtggcggagatggaagcgcagagccgggccctgcagctacgcggcgaggaactgagccgacgcctccaagttgtggcctgtacgcggggcgggatgtcccgcctcttcggcctggagcaggagattcgagaactacaagctgaggccgggaggacgcggggagctctagaggtgttgggggcccgcattcaggagctgcaggcggagccagggaacccgctgagctcccggcgagaggcagaactttattctccagtgcaaaaggccaacccgggaactctggctgccgaaatccgggcgctgcgggaggcctacattcgagacgggggccgggaccccggcgtgctgggccagatatggcagttgcaggtggaggcgtctgcactggagctgcagcggtcgcagacccgcagaggaagggcaggtgccacctcaggggagcttccagtagtggaggctgaaaaccggcgcttggaggcagaaatcttggccttgcaaatgcagaggggtcgggcacccttggggccccaggatctgcgactcctgggggatgccagcctacaaccgaaggggaggagagatcccccactcctcccgccaccggtggcaccaccgctgccaccacttccaggcttctcggagccacagcttcctggaacaatgaccagaaacctgggcctggactcacacttcctcctgcccacatcggacatgctgggccctgcaccctatgatcctggggctggcctggtcattttctatgatttcctgcggggccttgaggcttcctggatttgggtgcaactaaggactggcttggcacgcgatggacgggatacaggaaggaccacagcgttgcccccagccctttgcctgcccccacctcctgctcccgggcccatgggcaactgtgccatccttgccagcaggcagcctgtgcccagactaccaccctcatcatcagtatctttggtctgtgagctgcaggtctggcaggggctagcatgggctagggcaccacagccaaaggcttgggtctcacttggactatttgaccaagatcagcgggtgctaagtggccgctggcgcctcccacttcgggcccttcctctggaccccagccttagccttgggcagctgaatgggattcctcaggcaggtcaggctgagctctttctgcggctggtgaatgcaagagatgcagctgtacagacactggcagagatcaatccagcaagtgtccatgagtaccagtacccacctccggtgtccagcacatcttcactggaagccagcttcctcacccccgcagttggctttgctgatcccccacctcgtacagaagagcccctcagtggagtcaaggatagagatgagggtttgggccctcaccacagttctgacttgcccccagtgagtttctgaacccaagtgaatgtggagatgagcatctgaacatgcacaggactggggcctatttccagacctacaggtttactactccatgttctgacattgggtctagaagcatctagcagttgagtacagaaaaccagttccaaccacagctttaccacctcccgttaagt

SEQ ID NO: 120898 - DNA, 2038 bp, Homo sapiens
  Payload ID: 3687
  Gene Symbol: CCDC17
  Gene Name: coiled-coil domain containing 17
  ENST ID: ENST00000479529
  CDS Start-End: 149-1843
aaacaaacttgaagatctcacagacctaatagacacggcctttcctctctgcctctggctttatgtctctttcatcctcctctgcctttcccctgcccttgatcccttctgcaggtcttggctggtttcaggaaacgggtcccatcccatggactcccactctggggagcctgcgctcctgccctgtgggacctgtgacatggttttccgctcctcagctctgttagccacccatactcagcgcttctgcattggccacccgacccaagagatgacatttggagcacaggcatcagttgccactgaaccccagcgggccgcggtgcagtggctgcggctatccctacaggaaatgcggccctggataacagaggtccccagggtgttcgcggggccctggacacgttccgaggcgcggcctcagagtcccatgtccgaggcggtgggaagccccagcgagcggctgcgggcgctgttcaggactcgcgcgaggcgcgtggcggagatggaagcgcagagccgggccctgcagctacgcggcgaggaactgagccgacgcctccaagttgtggcctgtacgcggggcgggatgtcccgcctcttcggcctggagcaggagattcgagaactacaagctgaggccgggaggacgcggggagctctagaggtgttgggggcccgcattcaggagctgcaggcggagccagggaacccgctgagctcccggcgagaggcagaactttattctccagtgcaaaaggccaacccgggaactctggctgccgaaatccgggcgctgcgggaggcctacattcgagacgggggccgggaccccggcgtgctgggccagatatggcagttgcaggtggaggcgtctgcactggagctgcagcggtcgcagacccgcagaggaagggcaggtgccacctcaggggagcttccagtagtggaggctgaaaaccggcgcttggaggcagaaatcttggccttgcaaatgcagaggggtcgggcacccttggggccccaggatctgcgactcctgggggatgccagcctacaaccgaaggggaggagagatcccccactcctcccgccaccggtggcaccaccgctgccaccacttccaggcttctcggagccacagcttcctggaacaatgaccagaaacctgggcctggactcacacttcctcctgcccacatcggacatgctgggccctgcaccctatgatcctggggctggcctggtcattttctatgatttcctgcggggccttgaggcttcctggatttgggtgcaactaaggactggcttggcacgcgatggacgggatacaggaaggaccacagcgttgcccccagccctttgcctgcccccacctcctgctcccgggcccatgggcaactgtgccatccttgccagcaggcagcctgtgcccagactaccaccctcatcatcagtatctttggtctgtgagctgcaggtctggcaggggctagcatgggctagggcaccacagccaaaggcttgggtctcacttggactatttgaccaagatcagcgggtgctaagtggccgctggcgcctcccacttcgggcccttcctctggaccccagccttagccttgggcagctgaatgggattcctcaggcaggtcaggctgagctctttctgcggctggtgaatgcaagagatgcagctgtacagacactggcagagatcaatccagcaagtgtccatgagtaccagtacccacctccggtgagggcccagctgcagctagggacaccacagctacacataccggtgtggctggtatggctaacggccagcctttattgaccactgtgtgccagtcattaccaatgctttcttgtttgatcctcacatctctatgaagtcctactatgtaacagataaggaaatcaaagcaggagcaggttaacttggttcacagtgtccagcacatcttcactggaagccagcttcctcacccccgcagttggctttgctgatcccccacctcgtacagaagag

SEQ ID NO: 120899 - DNA, 5293 bp, Homo sapiens
  Payload ID: 3688
  Gene Symbol: CCDC170
  Gene Name: coiled-coil domain containing 170
  Uniprot ID: Q8IYT3
  ENST ID: ENST00000239374
  CDS Start-End: 100-2247
gttgcccgaggagacacccgcgccacccgccggctcccggcgccgccgcttcctcagggccggttccgggtccgagcgcgcccccgggctcgggtcgtcatgagcctggactgcaccagccatatcgcgctgggtgccgcttcgccagcgcccgaggaaacttacgatcatctttcggaagtcccggtcacgcgggagcagttaaaccactatcggaatgtggctcaaaatgctcgaagtgaacttgcagcaactttggtcaaatttgaatgtgctcagtctgagcttcaagacctccgatccaagatgctttctaaagaagtctcctgtcaagaactgaaagctgaaatggagagctacaaggaaaacaatgccagaaaatcatctctccttacctctttgagagacagagttcaggaactagaagaagaatcagcagcactttccacttctaaaatcagaacagaaatcacagctcacgctgcaatcaaggagaaccaggaattaaagaagaaagttgtagagttaaatgaaaaattacaaaagtgttcaaaagaaaatgaggagaataagaaacaagtttcaaagaattgcaggaaacatgaggaatttctgactcaactgcgtgactgcttggatccagatgagaggaatgacaaggcatcagatgaagatttaattttaaagcttagagacctgcgcaaagaaaatgaattcgtgaaaggacaaattgttattcttgaagagactataaatgtccatgagatggaagcaaaagctagcagagaaacgatcatgaggctggcttcagaagtcaacagagagcagaaaaaagctgcctcctgtactgaagagaaagagaagctgaaccaggacctgctcagtgctgtagaagcaaaagaagctcttgaaagggaagttaagatcttccaagaaaggctgcttgctggccagcaggtctgggatgcctcaaagcaggaagtgagcctcctgaagaaaagctcttctgagttggagaagagtttgaaggccagtcaggatgcagtcacaacctcacaaagccagtacttctcatttagggagaaaatcgcagccctccttaggggcagattgagcatgactgggtccactgaggacaccattttggagaagattcgagaaatggacagccgggaagaaagcagggaccggatggtctcccagcttgaagcccaaatatctgagcttgttgaacagttgggaaaggagtctgggtttcaccagaaagctctccagagggcccagaaagcagagaatatgttggagactcttcagggtcagctgacacacctggaggcagagctggtttctggaggtgttttgcgagacaacttgaattttgagaaacaaaaatatcttaaatttctggatcagctttctcagaaaatgaagttggaccagatggctgccgaacttggctttgacatgcggctggacgtggttttagctcgaacagagcagctggttcgtcttgagagcaatgcagtcattgagaacaagaccattgcccacaatttgcagagaaagctaaagacacagaaagagagactggagagcaaagaattacacatgagcctcctccggcagaaaatagcccagctggaggaggagaagcaggcacgcacggccttggtggttgagagggacaacgcgcatcttaccatcaggaacttgcagaagaaggtggagaggctgcagaaagagctgaacacgtgtcgagacttgcacaccgagctcaaagccaaactggccgacaccaatgaactgaagattaaaactttggaacagactaaagccattgaagatctaaacaaatccagagaccaactggagaagatgaaggagaaagctgagaaaaagctcatgtctgtcaagtcagaactggataccacagaacatgaggctaaggagaataaagaaagggccagaaacatgatagaagtggtaaccagtgaaatgaagacactaaaaaaatctctggaagaagcagaaaagagagaaaagcagctggcagacttcagggaggtggtgtcgcagatgctaggcttgaacgtgaccagccttgctcttcctgattatgaaatcatcaagtgtcttgaaagattggtccattcacatcagcatcactttgttacctgtgcctgcctcaaagatgtgactactgggcaagagaggcacccacaaggccatttacagcttcttcattgaacactgtatctcttgagagaggtggccataagacatggcacacaattcccaatttcacaaattcctcatgtctttgagatttgatcagtttgtgaatattttatgctttgatgatatagtgagaatgcatcacttgcaaaaacgatctcaaaagtgtcagccttagataaacgttcagcattaaaaacgcctattatttcatttactagcattttaggatccagaagaattccaccagattgcatgagttagattgggaaatgggagtgggagataatattgggaggtatctattttaagtcaggggctttactagccgatttagttctcacaataaccatgtggagaagctgtgacatttttaatttacaacctttctggggctcagacataaagttacctatccaaggttgcagttgggtagtggtgggaccaggatggacaactcattggccctgcctcaaaagccatacctcttctcctgctatgcagaatctgtttctcctgaatctctgtgatgctggtgggaattgtttgcatagaggaaggacaataaccctgccatcgtgagttaatgtccgggctggtcacagtggttcatgcctgtaatcccagcactttgggagtccaaggcaggcatatcatttgaggtcaggagtttaagaccagcctggctaacatagtgagaccctgtttctactaaaaatacaaaaataagccaggtgtggtggtgcatgactgtaatcccaactactcagcaggagaagcacttgaacccaggagacggaggcggcagtgagccaagattgtgccactgcactccagcctgggcgacagagtgaaactacatctcagaaaaaaaaaaaaaaaaaaaaaaaaaaagttaatgtccaaaaatgacagatttacaagtgtaagctatatgatttcttcaaaaagcaaaagcaatatacctaattcatttggatcaaacttacataggtctcaggtcctgtaagaaacttgcctgttctaactgttgctaccagattatatctggtggtaattgttaatgtttcagcagggctggtctcagtcctttaaaatggaaagctttatttggagcccaaccctataagatgaagaaatcctatatagtcttattcaccaatatatccaatacacccacagcaatggtacctttttaagatcaggattttattatgaattcctgtcactttctgttttccatttaaatttctattttacaaatttttcagggaatcatattcttaacttcactgagaaaaatgtgttactcttttggacaatttatcttatttctatcatataagatgtatttttttattgtccttaaaagaagctctagcatgaaattaaaggaaagggaaagaaatagatctggtgcacccgaacattaggagaaaatgaaaaatatacaaccaaccgttcgtgagtcatcaaaaagtcaaagtcagcctggccaacatggcaaaactccgtctctgcaaaaaatacaaaaatgagcccggtatgttggcatatgcctgtaatcccagctactcgagaggctgagacacgaaaattgcttgaacctgggaggcggaggttgcaatgagccgagatcgcgctactgcactccagcctgggcaacagagagagaccttgtctcaaaaaacaacaacaacaaaaagtcaaagtcataataagcaaattattggcttctttcttctagactaaaagaaattaaagagatgaaacaatcaattgcaagggtcaaaactagattggatcttggtttgaatgaaaaaaagcataaaatattcttgcaataattgtaaaaatttgaatgtggactaagtcctagattatattaaaatatttttaattttttaagcttgacaaatgcactgattgttatactttaaataactaaaaatctgagaatccacagtgctacagacaataagtgataaaatgggaaaaaatagtgaagatcttcttttaggaaaactaccaataaatgtagaatggatgattccaaaaaaaaaaaaaaaaagaagaaagagagaaagaaagaaacagaaaaacctaaaagaaagcgaatgaatttgacacctgttggttggatgacagaccacacagagggagagtgaccaggctttgcttgtggagcgggcatccctgcctagctatctccttcatgtgcaaggacagtataagtagtattttgcatgtgagtaaacacacctgcgcagccctggctgaggtcactaggctggccagaggcaggacaggcagtcttgaatttcctctaggggaggcctgcagttttccccaccaaccccttttcacatgctccaaagatgtagtagtgtctgctgttttggatcgaaaatcaccttgagtggaggaagtgacttcactgggtctctggaggctctcggagcttgagtggctctgccccaccctgaatcatgcacccataaatgcagttatgggtggatgtgggtgtatgagagtggagattgtttttgtacattctctttgttttcattttccaaatataatctttaataaacttgatttagtttcttgggaaatttattttctacgctattcaaagatattttaaataatattttaaaaacatgaaatttttttttcatttttgatttgatatcattaattttatatcaggattcatgtaagagactaaaaatgatccatagtggttagtactgtaatttctgtttattacatgaaattacattccatttatccaaatatatgtttatataatatttccactgtgtgactctagtgatctttaacatacacagaatgatctacagtgatctttaacatactcagaaatatgaaaaatgtttgaatatgatctttagggacttctaatgaaaagggtatatgaaatgggaacaataaattctgtacatgtatacagtccatatacacattaagtgtttgtcatttggacaaattgaaaacttttaataaagccattttcttctttgttaaaatgcca

SEQ ID NO: 120900 - DNA, 6512 bp, Homo sapiens
  Payload ID: 3689
  Gene Symbol: CCDC171
  Gene Name: coiled-coil domain containing 171
  Uniprot ID: Q6TFL3
  ENST ID: ENST00000380701
  CDS Start-End: 329-4309
tccggaagtggcagttgtaaacttcacctcccgggggctcttccccttctgtacccctttgctgtttgtccccctcctcccgggtcctggagtccgtcgtgttccaacagtttttgctcttattcccgtgggctgcctgggcctcctttcacccgtgagacttggagcggcccctggggtcttgggtgtgcagcacggatcacgcgagacccctgagacctcaaatcatctaacgtgaagccacagacatcttgggcaattttaatcatcaagaaagaaatatgtcattaagaaatagcagggtattttgaaagagttggaaaacatcatgaatttgaatacttcaagtaatactggtgatacccaaaggttgaagattgcctcattggatgtaaaacaaatacttaaaaatgaaacagagttggatattactgataatctcaggaagaaactccattgggctaaaaaagaaaagttagaaataacaaccaaacacaatgcagagctggcaagctatgagagccagattgccaagctacggtccgaggttgaaaagggagaagcattgcgacaaagtctggaatatgacctagctgttgctagaaaggaagctggtcttggaagacgggctgctgaagaaagattagccgaggcacataggatccaagaaaaactctgtgcacagaattcagaacttcaagcaaagacaaatgagactgagaaagcatttcagacttctcagcaaaaatggaaagaagaatgcagaagatttgaacatgatttggaggaaagagacaatatgatccaaaattgcaatcgagaatatgatttacttatgaaagaaaaaagcagactagagaaaactctacaggaagcgttggaaaaacatcaacgggagaagaatgagatggagtctcatatcagggagacagcattggaggagtttagattacaagaagaacaatgggaagcagaaagaagagaattacaatttatagtacaggagcaagatactgctgtgcaaaatatgcataagaaagtagaaaaattagaaacagaacatatggactgctctgaccttttacggcgacaaacaagtgaacttgaatttagcactcaacgagaggaacgccttagaaaagaatttgaggcaactactctaagagtgaggaaattagaagaaaacattgaagcagaaagagcagcgcatttggaatcaaaatttaattctgaaattattcagttacggattcgagaccttgaaggagctttgcaagtagagaaggccagtcaagcagaagctgttgctgatttggaaattatcaagaatgaattcaaagaagttgaaagtgcatatgagcgagaaaagcataatgcacaagagagctttgcaaaactaaatttattagaaaaagagtatttctccaaaaataagaaactaaatgaagacatcgaggaacagaagaaagtaattatagacctttcaaagagactccagtataatgaaaaaagttgcagtgaattacaggaagaactagtaatggctaagaagcaccaggccttcctagtagagacatgtgaaaataacgtgaaagaattggaatcgatcttggacagctttactgtgtcgggccagtggacatcaggcatccacaaggacaaagataaacctcccagcttctctgttgtccttgagagattgaggcgtaccttgacagattaccagaacaagctggaagatgcatctaatgaggaaaaggcatgtaatgaacttgattctacgaaacagaagatagactctcacactaaaaatataaaggaacttcaggataaactggctgatgttaataaagagttaagtcatttacacactaaatgtgcagaccgagaggctttaataagcactttaaaagtggaactacaaaatgtgctgcactgttgggagaaagaaaaggctcaggcagcccagtctgaaagtgaactgcagaagctttcccaggctttccataaggatgcagaggagaagctaaccttccttcacaccttatatcagcacttggtagcaggctgtgtgctcataaaacaaccagaaggcatgctggataaattctcttggtctgagctttgtgcagtcttacaggagaatgttgatgccctgattgcagacctcaacagggctaatgagaagataaggcatctagagtatatctgtaaaaacaagtctgacacgatgagagagcttcagcagactcaggaagacacctttaccaaagtggcagaacagatcaaagcccaagagagctgctggcacagacaaaagaaggaactagagctgcagtattctgaactcttcctggaggtgcagaagagggcacagaaatttcaagaaattgctgaaaaaaacatggaaaaattgaaccatattgagaagtcacatgaacagttggttcttgaaaattcgcacttcaaaaaactgttatcacagactcaaagggaacagatgtccttgctggcagcctgtgcattaatggctggtgccttatatcccctctatagccgatcatgcgccttgtctacacagagagattttctccaggagcaggtcaacacctttgagttgttcaaactggaaattagaactctagcccaggctttgtcaactgtagaggaaaagaagcaagaggaagccaagatgaaaaagaaaacattcaaaggattgatacgtatatttcggaaaggtgttattgctgttttggcagcaaacagactcaagattttgggccaatcatgtgcctctctttttacctggatggagagtttcaaagaaggcataggcatgttagtgtgcacaggagagccccaagacaagcataaatttccaaaacatcaaaaggagcagttgcgttgtttacaagcgctcagttggctcaccagttctgaccttcttgctgcaataatcagttctatggctgaattacaagacgtcattggtaaagcagatccaaattccagaatttgtggacatttactcataggtgcagccaagaattcttttgcaaaactcatggataaaattagtctggtaatggaatgtatacctctgcacagtagcaggagtattacatatgtagaaaaagattccctggttcagaggctggcccatggacttcataaagtaaacacactggccctgaaatatggtttgcgtggccatgtgcccattacgaaaagcacagcatcgttgcagaagcaaatacttggatttacacaaagactgcatgctgcagaagtggagcgccgctcactacgcttagaggtcacagaattcaaacgaagtgtgaatgaaatgaaaaaggagcttgacaaagcccagggtctgcaaatgcaattaaatgaatttaagcagtctaaattgatcacccatgagaagtttgaaagtgcatgtgaagaactaaataatgcattacttcgggaagagcaggcacaaatgctattgaatgaacaggcacaacaactacaggaattgaattataaacttgaattgcactccagtgaggaagctgacaaaaaccaaactcttggagaagctgttaagagtctctccgaggcaaagatggagctgagaagaaaagatcaatctctgcgtcagctcaatagacatcttacccagctggagcaggacaagcgtcgactggaggagaacatccatgatgcagagagtgccctccgcatggcagccaaagacaaagaatgtgttgctaatcacatgagagcagtagaaaatacgcttcacaaggtcagagatcagatctcgctgtcatggtctgcggcaagtaggaatgacttcaccctacagctacccaaactgcacctggagacctttgcaatggaggggctcaagggcgggccagaggtggtagcatgccaggctatgattaaaagtttcatggatgtctaccagcttgcaagcactagaatcatgacattagagaaggaaatgacatctcatcgaagtcacattgcagccttgaaatcagaacttcacacagcttgtttacgtgaaaatgcaagtttacaatcaataggatcacgagaccattcaaatctctccattccttcaagagctcctcttcctgctgacacaactggtattggggatttcttaccattgaaagctgaacttgatactacttacactttcttaaaggagacatttataaatactgtgccccatgctctgacatcatctcactcctctccagtgactatgtctgctaatgccaacagaccaactcagattggattatgacttcatgaaattaaaaaatggaggaagagttaacagtacaattaaaattgttttgaatgggaattttcttatcagttgacttttgtttcagcagaagtggcagtggatttaaaaaatttgtgcgctatcttgatgtattctggtagctctgtctccttgaataaggaaatagccaacttttttctctccaagttttatttgttatcacagttgctcatttttatgtaacatatttttaaatgttaaggaatgacacattttgggtaatttccctcagacttaaaaaaatcaataagccattttagtctctatctatcaaagttgtttcatacttgtctattttaaagcaggactgcaatgctttaataggattgagagagctatttgaaatgtatgccaatgattcctgtcatttcatggcagcccggccatggttcactgagccccctcttctctcttgtcagctcaactgaagacaagcatttagttgcaaactttaagcaggttgtgcaaaacagaaatgatgtgactgcttctcctcctgcacaataatgtcactcctggtcaatgtgagaaggtcaggttgctccttgtaaagctacatgataccacttgcccatttgaacaagttaagttaactgctgaatctggtccctgaaggcactgaaaactcattcttttagcaagtctgcatttgataagaaagtagagcaattgtgctggaggatttctgtggtatgtttaggcacttcataaggacagttcccacactaggatagcaggtaatatatttagtataagctgaaaaacttcaaggtaatggctgttttgaccttcaaaatagactccttttttgtttttgttgttggtaggacccaagagtgacacccatctttgatgctgacagaatttaaaacaaggccattgccctgcattttctgccttgtagcacacaaaagtaaaattgtatgtcaggccgagatgtcggggagctgacaagatgccccagtgacatttcagctagaaagagcaagtgtcttgcaaccaagtggtcaaatatcaaataataggtcaagcaggaaggagctgagttctaaccacaaagaggtttctggtaacttacttgacaagcttttgggtgctttgtggcttgacaaagtgatgttctgttgggtatcgctagacagactgttctttatcgccttcagaagatcagacattgacattgattaaactctttaacccttaaaggttaaatccttgcagtttgcatcatggtaagtgaagaacaaaagaatatttgtagtaagaatttgtttttgtattaatcatttaactccctagtgctattaacttctgatgtgaactatagcttttgacaaagagtcttgatacataatctattttttatattatttttcattatggaatctttcattatggatacattagagtataacagtatgtattacagaagtttttttgtcttatctttacagtgacatttgattcaaattacccaactgctgagaatttttttattggccttggtaaataagattttatactaactatttattagtagccaaattagccaagtgatttatgccatctgagggaacacagcagtattactgtcgtactgtgtaacacatcctattcttgtaatactgaaccactataattagctttatataaaactttagaaagcttatatggagtaaaattatatctttaaccaaatttctcttaattctttccttggaattatttttaatatgacctgtgtaacatgacctgtatgaaattcaacttgcaaatttattataacatggaagtgctatttattgtttttatacagatcatataatttctgcacatttcagaacacctttctctgctgttccaaacaatgattaggatattgttcatacagaaattgatagacaattttttagttcatgtgatatcactgagcttacaattctcactagagaagaacaaggttactatatgtaacctctatgtctaagtgtttgtgtgtgtgtatgcttgtgttgaatctgttttcagatcctactgattttagaggaacaagcagctttgtaaaatgtgccttggaaaggccttggtcttcttgccttgattttataatctgttaatgggataactccaaaaataaatgtgtatgtgtctccatata

SEQ ID NO: 120901 - DNA, 2181 bp, Homo sapiens
  Payload ID: 3689
  Gene Symbol: CCDC171
  Gene Name: coiled-coil domain containing 171
  ENST ID: ENST00000432954
  CDS Start-End: 1-773
ttcataaagtaaacacactggccctgaaatatggtttgcgtggccatgtgcccattacgaaaagcacagcatcgttgcagaagcaaatacttggatttacacaaagactgcatgctgcagaagtggagcgccgctcactacgcttagaggtcacagaattcaaacgaagtgtgaatgaaatgaaaaaggagcttgacaaagcccagggtctgcaaatgcaattaaatgaatttaagcagtctaaattgatcacccatgagaagtttgaaagtgcatgtgaagaactaaataatgcattacttcgggaagagcaggcacaaatgctattgaatgaacaggcacaacaactacaggaattgaattataaacttgaattgcactccagtgaggaagctgacaaaaaccaaactcttggagaagctgttaagagtctctccgaggcaaagatggagctgagaagaaaagatcaatctctgcgtcagctcaatagacatcttacccagctggagcaggacaagcgtcgactggaggagaacatccatgatgcagagagtgccctccgcatggcagccaaagacaaagaatgtgttgctaatcacatgagagcagtagaaaatacgcttcacaaggtcagagatcagatctcgctgtcatggtctgcggcaagtaggaatgacttcaccctacagctacccaaactgcacctggagacctttgcaatggaggggctcaagggcgggccagaggtggtagcatgccaggttagagtctaaataacattgtttgctactgagacatatagaaaaataaattgcactaactggagagaatgaaagcctcaaagtattgtgaataatttaaaggagatgcaaatagatgtttcttcatttttcttctatcatgtaacagtatactttacaaaatattgtttttttctttaaagcctagaactagcctattaaaataatccagaaaagtgtttttaccaaggaaaaatgtgttttatggcaaagtacagtattaaaagaaaatactttcctatcagcagaggacaataagacactaggctgttacctctttaagcaagtctcaatttgttgcttttattgtttgaaaataagtaattttagaaaaaaaataaaataataaatcactttagttgtaaacatcaaaagagatacctgaaatatctcaatattaattccaaaatatatccaacatttcttatgaagtaatttaatttcagcaaagcttaaacttatctgtgttttctattgaagagtattttaccctttaatatttagttttagtgaacattgtaagatgtgcaaattgggtcatttcatttataaaacttaaaatatcaaatcataagaactcaaataactttaaagtacactaataaacttatttttagaaacattcattttcggatgctgtaggtatccttctattttatgtcactattgtattaatattattgtgatcaattttttccttaaggttatttttcttaatctgacaaaatgaaattcagtgtgtccttttaatgcccaaaaccttcattaaaaaaagaaaactatcaacattatgtaaattataggaagcatgatatttcaaaagagactgtccttgttcaatagcactctattttttagtgtatttaaaaggagaaatatctcttaaaacttagtgtgtctttcacatgttgagatttaaaataatctttttcattttagtttatgaccctgtggaattttaattttatagaaaattaatgtcagtgtgtgtgtggagcaatgttaattttttatatgctccatatcctaatttaatttgttattagtaccaaattaatgctctacaaggaaaaaaatactcattgcttctttcattagattgtccaatatgtctaaaatatatataattataaaagtaagcataaaatatttttcttctctgttatagggtagattgctgtactgttatttaagatgagatttaaaatgtgtattttaaatttgattgtcagtatttatgaattcatcattactatgaatacagtctgatttgagatttttctagtggttgtaaaataatcctttacttggctatttcaattcagaatctcacaaggcttagtatttgtcgtaatttacaagtaaagacttcctcaaaact

SEQ ID NO: 120902 - DNA, 2628 bp, Homo sapiens
  Payload ID: 3689
  Gene Symbol: CCDC171
  Gene Name: coiled-coil domain containing 171
  ENST ID: ENST00000449575
  CDS Start-End: 1-1409
cctttgagttgttcaaactggaaattagaactctagcccaggctttgtcaactgtagaggaaaagaagcaagaggaagccaagatgaaaaagaaaacattcaaaggattgatacgtatatttcggaaaggtgttattgctgttttggcagcaaacagactcaagattttgggccaatcatgtgcctctctttttacctggatggagagtttcaaagaaggcataggcatgttagtgtgcacaggagagccccaagacaagcataaatttccaaaacatcaaaaggagcagttgcgttgtttacaagcgctcagttggctcaccagttctgaccttcttgctgcaataatcagttctatggctgaattacaagacgtcattggtaaagcagatccaaattccagaatttgtggacatttactcataggtgcagccaagaattcttttgcaaaactcatggataaaattagtctggtaatggaatgtatacctctgcacagtagcaggagtattacatatgtagaaaaagattccctggttcagaggctggcccatggacttcataaagtaaacacactggccctgaaatatggtttgcgtggccatgtgcccattacgaaaagcacagcatcgttgcagaagcaaatacttggatttacacaaagactgcatgctgcagaagtggagcgccgctcactacgcttagaggtcacagaattcaaacgaagtgtgaatgaaatgaaaaaggagcttgacaaagcccagggtctgcaaatgcaattaaatgaatttaagcagtctaaattgatcacccatgagaagtttgaaagtgcatgtgaagaactaaataatgcattacttcgggaagagcaggcacaaatgctattgaatgaacaggcacaacaactacaggaattgaattataaacttgaattgcactccagtgaggaagctgacaaaaaccaaactcttggagaagctgttaagagtctctccgaggcaaagatggagctgagaagaaaagatcaatctctgcgtcagctcaatagacatcttacccagctggagcaggacaagcgtcgactggaggagaacatccatgatgcagagagtgccctccgcatggcagccaaagacaaagaatgtgttgctaatcacatgagagcagtagaaaatacgcttcacaaggtcagagatcagatctcgctgtcatggtctgcggcaagtaggaatgacttcaccctacagctacccaaactgcacctggagacctttgcaatggaggggctcaagggcgggccagaggtggtagcatgccaggttagagtgcagtggtgtgatcatagctcactgcagtctcaaatgccagggctcaagcaatcttcctgcctcagcctgctgagtacctaggaccacaggtgcgcaccaccatacccagctacttggacaaaaaacagtgtttgatggactgcctaggtgaagacctggaaaaggaagggttatctacaaatgaactgatgaagttcttcaaattgatgccgcttatataaactgaccccgatttgccctattctgcatgacaacttaagtgacagcagttagaagaaaatacagcaatgaatatgcaacttaaggattaaggaagatgcagtaaatcagtctaaagctaagtacaatgataatttcttgtaataattccacagatgccttacatttgttaaacagactgttattactctcaaatactcaaatatatgttttcattatatacatgtatttgaattgaagaagagaactaaaagttattccaacagagatcctaattcttttccctcttatttaaacttggaattatcaaaatcacagttttaaaaatattttatttaggatatccacatgcaaaagaatgaaattggaccttggtcttacaacatgcacaataatcaactcaaaatggagtacacaatgttagaaagacctaatgccataaaacaaaggaaacaacaaaatggaaaggcaacttgtggaataggaaaaactatttataaactgtatatccagtaaggagtttaatatccaaaatatataaggaactcatacaacacaataacttttttaaaaaatgggcaaaggacctaaaaagacatttttccaaagaacacatgcaagtggccaataagtaaaaaggtgttcaacaccgctaaccattagggaaatgaaaatcaaaaccacaatgagatatcacatcacaactgttaggatggctattaccagaaagtcaaaagacaacaagtgttggcaaggatgtagagaaaagcgaacctttgtgcactattggtggaaatgtaaattggtatagctattatggaaaacagtatggaatttcctcaaaaaataaaaatagaactaccatatgatccagcaatcctacttctgggtatacatcaaaaggaaatgaaaccgttgtcttgaagacatgtctacacttccatgttcattgtagcattattcacaatagccaagatatagaaacaacctaagtgtcctctgatgaatgaatggacagaggaaatgtttatacacacacacacacacacacacacacacacccagaggaaaattcagcttt

SEQ ID NO: 120903 - DNA, 4017 bp, Homo sapiens
  Payload ID: 3689
  Gene Symbol: CCDC171
  Gene Name: coiled-coil domain containing 171
  ENST ID: ENST00000535968
  CDS Start-End: 176-1129
gtccctcagcgaaggcgcgctgcttggcgggcgggctcttccaatccgagccagcgttctcggaacctcaaatcatctaacgtgaagccacagacatcttgggcaattttaatcatcaagaaagaaatatgtcattaagaaatagcagggtattttgaaagagttggaaaacatcatgaatttgaatacttcaagtaatactggtgatacccaaaggttgaagattgcctcattggatgtaaaacaaatacttaaaaatgaaacagagttggatattactgataatctcaggaagaaactccattgggctaaaaaagaaaagttagaaataacaaccaaacacaatgcagagctggcaagctatgagagccagattgccaagctacggtccgaggttgaaaagggagaagcattgcgacaaagtctggaatatgacctagctgttgctagaaaggaagctggtcttggaagacgggctgctgaagaaagattagccgaggcacataggatccaagaaaaactctgtgcacagaattcagaacttcaagcaaagacaaatgagactgagaaagcatttcagacttctcagcaaaaatggaaagaagaatgcagaagatttgaacatgatttggaggaaagagacaatatgatccaaaattgcaatcgagaatatgatttacttatgaaagaaaaaagcagactagagaaaactctacaggaagcgttggaaaaacatcaacgggagaagaatgagatggagtctcatatcagggagacagcattggaggagtttagattacaagaagaacaatgggaagcagaaagaagagaattacaatttatagtacaggagcaagatactgctgtgcaaaatatgcataagaaagtagaaaaattagaaacagaacatatggactgctctgaccttttacggcgacaaacaagtgaacttgaatttagcactcaacgagaggaacgccttagaaaagaatttgaggcaactactctaagagtgaggaaattagaagaaaacattgaagcagaaagagcagcgcatttggaatcaaaatttaattctgaaattattcaggtaaaatgtaaacaaatattttggcctgcattttcttaatttgtgttataacagctgggaaaaacagcactgtgttcagagaacgaaggtgtgcattgagaatgggtaacatattgttatgacactcattattgtatataaggttaggatacagttgagatatgctaccttagtggaggagttggcacactatagcctacaggccaggtctcacccactgtctgttcttgtgaagttttgtcttgtccatagctacttttgtggcagagtggagtagttgtgacagagaacttacctggcagtctgcaaagaaatttgcagattggagtgttcttttacggctgtgggatggatttctttttgagaacgttgaaaaaatgtgcatgttatttattgagtgcatatcctatgcatatcactgtattaagagctgaaggtgtaaagatgaatgagctccttttgtaacttacattttgttgtcagagatactatatatctatctccagatatatagatgcttacatagaagtacaaaatactgaaatacaatgggaatataataaagaaaaggattaaatctgggaggggaattaaatggaggcctcctaaggaaattatcctttttgctatgctttagagaatgagaaggaatttctaagagaagtgagagcagggcattttattaggggttggcacactactgcccatgggccaagtctgacctgcagcctttttctgtaaagttttattagaagatagccatgcccatttgtttacatattgtttatgggtgcttgtcgagacagaccttatggtccacaaaaactgaaatatttactctgtggccctttacagaaaatgtttactgaccactgttctgaacaactgcttggataaagccactaaataaaatgtacttgtttatttttgaggaatacttgcagtgttgagtggtagagcttagggaaaagtttggagataatggtgggaaggcatgatgaagactaattatggaagtcctttttcgtgctaagaaacttagacttattttgaaagcaatggaaagccactgcagcttttgggacagacagatatgaaatctaagtttaggaaaataactctggtgccatattggtagataaaggaagggagtgaagataggaggctgggtgaagagatgatgaacacctgaatcaagacaacgactgtagcaatggaaaagagggctcctgtggcagaataacagtccctcaaagatgtccacatctgcccttatcctcagaacctgtgaatatgttaccttacatggcaaatgggactttgcagatgtgatttatttgaggatcttgagatgggagtttgtcccagtttatctagttgagactgatgtaatcataagagtccttataacagggaggcaggagggtcacagtcagaggcagagatgtgatgacagaagcagaggtcagagtaggtcaccatgaacccaggaatgtgggtggcctccagaagttagaaaaggcaagacaagatttcttccctagagtctccagaaggaatggagtcttgctgacacgtgactttagccccagaagacccatttcagaattttgacctccacaactgtaagataatacatttatgttgttttaaattgccaatttgtggtaattggtaatagcagtgattggaaaggtacaggggacaaactgagaatgcatgattttaggtaactaatttgcagtgtgaggggagggaaggagcaatagaagagaacaccaaggtttgcagtatgtgtgaaagtgggcagatgcagttgactgtcaaactctgaagtctgaagagagacaatggtaagttttgaacatgttgactttgaggagcagtttaagaggttcatagtgccctttgaggatatggtcatgcaaagttacctgaacaatgtacatttactcttgacatcctgctttttgtgaacagatcctttctttatattctctcaagcaactgccggtagcttatcttggatcagccagtttcccaggtgttaggaaagttaaggaaattacataggaggagatttgttggacctgctactttcttgattttaatattttatagacagttatgacttttcgcttaaatgttttctcagcatttgataatatgctttaaaatctaataaatatggtatttgttatgcttctgttaaagagattaactttaatgaagattgtatacctataatagtatttttgtttgcttaaatctaggaaggtagaaagtatctttatgaacttagattctcagtataaactgttaagatgttcttatttcatgttatttagctggtcagttattacatttgagcactactttgtgaacaaatgtaatagactgtatgaaaataaaatatatgcacttatttccagaagaaaaagtagttttaagcttatttggctttagcaagtttgaaaatcatctcactttatttgtgctcttgaatttcatatcaagtaggatggtgggattgccaaaatcagtaaatgaaaagtagctataagcagatagattaaaactagtttagactaaaaaagttattgccttgatttaggtgtttattatcttttcacccaacctcctatcaccactccgttactttatttgccaatgttagttaccagaattatttttctaaaacttagatttgatatctacatcaaaggctacttatattaaaagctactgctttcaatatgtctaaattacttaatttaatttacatttttaaagacttacacttttttcctatcttgttttaattaatgcaatttatagtgttttaccttattgtttaaagaactcccaatgtaagatacaactgtatttgtaaagatttggtattaaaatttatgtttttacttttg

SEQ ID NO: 120904 - DNA, 1699 bp, Homo sapiens
  Payload ID: 3690
  Gene Symbol: CCDC172
  Gene Name: coiled-coil domain containing 172
  Uniprot ID: P0C7W6
  ENST ID: ENST00000333254
  CDS Start-End: 252-1028
ggcaaggcccgacctgaagcactggctccagccttagggaaggttttggccgtgggttttgttggcacgtaccattttgctgaaagacagagcaccttgaggacgttatccctaaaatgagagaggactgggattgaaaggctgactacagaaatggctgctgcccagacgccctcaaaagccaaggatcctcagagttggttataaaatatttaagggcgagaaaaggatcgcaggagccaggccctgagatgagcttggagtccctgtttcagcacatcatcttcaccgagcatcaggcggaggagagtcgccgtttgatgcgagaagtaaggtcggaaataaccagatgtcgtgaaaaaattaagaaagcaacggaggagctgaatgaagagaaaatcaagctggaatctaaggttcaacagttttttgaaaaatccttcttcttacagcttttgaaagctcatgaaaatgctttagaaaaacagtacagtgaaattacaaaccataggaatatgcttcttcaaacctttgaggctataaagaaacaaatgatagaggaggaagacaaatttattaaggaaattacagactttaataatgattatgaaataacaaagaaaagagagcttttgatgaaagaaaatgtcaagattgaaatatctgacttagaaaaccaagcaaacatgttgaaaagtgaaatgaagtcaatggaacatgatagtagccagttaaatgaacttcaaaaacaaaagagtgaattgatacaagaattatttactctccaaagaaaacttaaagtttttgaagatgaagagaatgaatccatttgtactaccaaatatctagaggcagaaaaaataaaaatcagtgaaaagcctcaaaatgatacagaatgcttaagacttaaaaaagaattagaactttataaggaagatgacatggaaagtgtttatgaagctctccaaacagaaatagaatttttggagttgacattggcacagaaagatcttcaggaaagcaaataacttacagagaattgatcagccatctgagatttgatcagaatatctgagaatcaaatctttgtgatagatatatgaatggtacccgttacaacggatccttgtgggaaatatggggtttaaaatattcaaattgttattatctagaaatgatgtgttagccctttaagataatttttgtcttgttactcaaactttaagagttcttctgtggtttgattttgtttctaaaagaaggaaaaggagaagaagtagataccgtgttcccaggcttcttatatgcccctgaacctcaagctgtcctattctttctaatctatataatatggtttggatctgtgtccatgcccaaatctcatgttgaattgtgatccccactgttggaggtgggtcctgataggaggtgattgggtcatgggggtgggtttctcatgaatagcttagcaccattcttcttggtactgtccttgagttctcctgagagctagttgtttactagtgtatagcacttctccactttgctcctgctgccaccgtatgagatgtctcactccccctttgccttcagtcatgattggaaacttcctgaggcctccctagaagcagaagtcactatgcttcctgtacagcctgcagaaccgtgggacaattaaacttgtgttctttgtaaatta

SEQ ID NO: 120905 - DNA, 2181 bp, Homo sapiens
  Payload ID: 3691
  Gene Symbol: CCDC173
  Gene Name: coiled-coil domain containing 173
  Uniprot ID: Q0VFZ6
  ENST ID: ENST00000447353
  CDS Start-End: 107-1765
acttccggcggcgttgccaagcaaccgcgtggtacgagtaacaactccaccggctggcgtccgcggcgcttggcgccacagtcacttttccagatctaggagcatcatggacacctcgtcagagatgctggtacggtttggacggcgctgtggacgggcgaaggaaagtacagaaataagaaactctgaagaagatcaagttctctatctgcctcttctacctagcaaagtagatctccagcaggtcaccataattccacacgatgagtggaaaaggattcaagatagccttgacaggttgacaagagaagcagcatgcctccgtgcagaaagaaaggcaaagaaagaaatgcatttgcgatctcaagaagtggtaaaacactggactaatacatatgcagggatgaaagaacagaaacttgaagccaaaaagaagcgtgatgaagaaatagaggcagaaagacaaattcttgatctggaagaagaaatatacaaacaaggaaaaagaaaaaaggccattgaaaatgcaaagcaatatcaattttaccagacagaaagagtgaaaaactttcattcgggacttcttcttagtagagttatgaaagaacgtgatgcccagattgaattccgaaagagtaagataaaatcagataaaaaatgggaggaacagttgaaactcaacattgaaaaagcttttaaagaagaacaagaaaaagcagaaaaacgacacagagaaagggtggctcttgccaaagatcatctaaaacaaataaaggaacatgaggaagaagaggaaagaaggaaaaaatatgaagaaaaagatgctgaggaaataaagcgacagaatgcattatatgaaattgaaatgagaaaaaaactagaaaagaaaagagaagagatgcatgaaagcaggagacggtttcttgaacatatgcaggataaacatattatcaaagctgtagaacagcagcagcaagaggaagaagatgaaaagatgagaaaattcatcaaagcaaaaaagcgtcttatacaaatggggaaagaaaaagaggctgaaacacacaggcttatggagaaacgaagagaaagaatacataacttcctgagtgaactgttgaaagagaaacttgacaatgaagatatgattattgctagagatattgcagaagctgaggctgaatgggaaaaaagagaaagagaaaaagatgaaaaaaacaaagcagaattaaaaacaattgcagaatatcgagccattgtgatgaaaaataaagaggaagaagaaagacaaagaaaaatagaggctaaagaacaattgctggctgtcatgaaagcagatcagattttctgggaacatgaaaaggagaaaaaatgcaaagctgataaagaacatcaagaggttcaagatgcccatattcagcaaatggccaaaaataagtttaatgcaaagcaagcaaaacaagcagaattagattattgcagacttactgaagctcttgtggctgaaaaggagaaagaatttcaggactatgccagagaggtaattgaacttgaatcggaaacaacaaataaatatatttaccctcttgtaaaagctgtacaggaaggacctggaggtggccgtggaccagtgtttgtggacagaggtggattaagacccagctatcaggcaaatgatgttactggagtccagctccctttttataactctcagggaccaaaatataattttcaaaagtcaaagagaaggctaggttttacatggtagaaaaaaattatttttaacattgagaagactaagttgtagcatatatgagcttcaaatataaatggatttcagttaataaagctgttcttcatctaagtacaattatgtctgatttaattgattgttctcagtatttcttttgggtatatataaaaccccaattttgagattcctttttttaactgtggtaaaatacacaagtttactttttaaatgtacattcagtggtattaagtacattcaaaatattgtgtagccatgaccattgtgtagttccagaatttttcagtgctcttactagaaaccccatacccattcattaagcagtcactccccattccccttccccacagctcctggtaactttatctgctttgcctatactgggtattttgaataaacagaatcatactgtg

SEQ ID NO: 120906 - DNA, 569 bp, Homo sapiens
  Payload ID: 3691
  Gene Symbol: CCDC173
  Gene Name: coiled-coil domain containing 173
  ENST ID: ENST00000421028
  CDS Start-End: 94-569
acttttccagatctaggagcatcatggacacctcgtcagagatgctggtacggtttggacggcgctgtggacgggcgaaggaaagtacaggggatgaaagaacagaaacttgaagccaaaaagaagcgtgatgaagaaatagaggcagaaagacaaattcttgatctggaagaagaaatatacaaacaaggaaaaagaaaaaaggccattgaaaatgcaaagcaatatcaattttaccagacagaaagagtgaaaaactttcattcgggacttcttcttagtagagttatgaaagaacgtgatgcccagattgaattccgaaagagtaagataaaatcagataaaaaatgggaggaacagttgaaactcaacattgaaaaagcttttaaagaagaacaagaaaaagcagaaaaacgacacagagaaagggtggctcttgccaaagatcatctaaaacaaataaaggaacatgaggaagaagaggaaagaaggaaaaaatatgaagaaaaagatgctgaggaaataaagcgacagaatgcattatatgaaattgaaatgagaaaaaaact

SEQ ID NO: 120907 - DNA, 334 bp, Homo sapiens
  Payload ID: 3691
  Gene Symbol: CCDC173
  Gene Name: coiled-coil domain containing 173
  ENST ID: ENST00000419478
  CDS Start-End: 9-334
cagttatcatgccaatatcggaacttctcagacgaatatcacttaaactgttccccaaagtagatctccagcaggtcaccataattccacacgatgagtggaaaaggattcaagatagccttgacaggttgacaagagaagcagcatgcctccgtgcagaaagaaaggcaaagaaagaaatgcatttgcgatctcaagaagtggtaaaacactggactaatacatatgcagggatgaaagaacagaaacttgaagccaaaaagaagcgtgatgaagaaatagaggcagaaagacaaattcttgatctggaagaagaaatatacaaacaaggaaa

SEQ ID NO: 120908 - DNA, 2714 bp, Homo sapiens
  Payload ID: 3692
  Gene Symbol: CCDC174
  Gene Name: coiled-coil domain containing 174
  ENST ID: ENST00000303688
  CDS Start-End: 74-1249
gacggaggtaggcttacgaggcctgtgtcgggtagaaagggtccttcctggaccgggaccctctgccacgaccatggaccgtaggaaaaagcctttggacgtcacggcctcctcgttggtagatcttaaggctgaactcttccgaaagcaagaagaattcaaacaagaaaaacttctaaaagattctggagtttttggaaaaccaaaaacaactaacaagaaaccaagtatctggagcaaacagaatgtaggcgtttcaaatcgagctgagaaggatgctgaacagaagattgaagaacagaagactttagacaaagcaagggaaaaattggaagaaaaagccaaattatatgaaaaaatgactaaaggagactttatagatgaagaagtagaggatatgtaccttgtggatttcacacagaagatcatagacaagcgcaaagaaatggaggcatctggtgcccatagagattctcaaaaggcaggagaaagggacgacgatgaggaaaaccttcctgagggagagatccctcctccccaagaccccagtgaagaatgggtggattacgtggactctttggggcgttcccggcgctgtatgagaaaggatttgccagatctgctggagatggataaaaatcttcaggggagactttttattagtcctgctaatgaaaaaaccctattatctgaagatatgagaaaagaacttcagcgccagcaatgggaggaagaagaaagagaggccctgaagaggcccatggggcccgtacattatgaagacattcgggaaaatgatggagatgttattgggcctttgccaccggagccagaggctgtgccaaccccacgtcctgctgcccagagtagcaaagtagaagtcattgtccaggagaggaaggacaccaagcctggagtgccacacatccgggagtgggaccgcggaaaagaattttcctttggatactggtcgaagaggcagtcagatctccgggctgagagagatcctgagtttgccccgccgtcagattactttgtgggtcagaagagaactggtttttccagcagccaggcatggagcagacctgggccagcacagagtgacccagggcagtgccctgaccagagccacggacctagccctgaacatacgtcacccactcctgcccccgacaacccaccacaagcccccacagttactttcaaaactctggatgacatgatttcctattacaaacaagtgacatgatctttcaaagcacgctgacttgggtttgtactttgacagtgcctttctctcccagagggagaaataactttaggaactgaattgtacctttgtcctgtcctttccctaggaggcacagacttcgggttggatttgtcagcaaggaggaaagttatggaaactttggccacttggctgttcattttattctaagtgggatagggacatacctacctggatttacatgtgagctgcgatagaatagaagtatttattctgtaaaattagacactgagatgtgcttataaccctgtttcatatctactcccacgacttactcatatttaagggttcttttccattccttttgcaaatccgagcatgcaggtgtctttattccaagggttcagcttccagatcagccgatggaccataggtcacgaggaatttctccctgtcaagcagtggaaaactgcatgggaggcaaaatgctctgttctccaagaggacccggaagtaatcacataggaaatgataaggaagaccaggaggagctcttcgtagtccagaaaggtagaagtgggagttgtttacttaattttactgtcataccatgctattacctacactcctgtgtgcagtgggcattcagtaaatgtgtgttgaaggactgggacgtacgtggaggctgctggacctggtcagagactgatgtgccttagcggcaatggttagagcttttcagtgcatcccacctccctgtcgcccccatgctcggcttcctcacattcaggagcctgacttggatcagacttggggctgcacagtggagcaggtgggttcccgtgtcattagtaataaggagagggttgggggtgggcagggctccagaaagtcagcagtgtgcctgggcacccaccccatcctctacctgccacacctcagagggttcctacagctgcacacaagcagttgagagttgatgaccaggcccatagggctcccacagctggttcccaggccagtgagtgctgtgagaatacagtagcacaagtccttgttctctgaagagtgggaaggagaggagtgagtgaagtagcctgtcccctgcaggtcctctgcgatggcattgtctcggttcccgcagtgctgcagtgtggaagggagtgccccatcctcattacagatgacacactggagtgtggaggggtcgatgacttgtgcagggtcatatggtacctaaggggcagatctcagacttaaacacaattgatgtctaacccctagacagtctttttagtgccctctgctctcagtcttgttgccctagtatcaagcaatcttagacaaacatcctgaattcttacaaacttacctctaaactctgaggataaagttgccagtccttttaatggtcagcctaatcattctgtcagcctaatcgggtaattgctttttttaataaatacacataaaaaccaactaa

SEQ ID NO: 120909 - DNA, 2942 bp, Homo sapiens
  Payload ID: 3692
  Gene Symbol: CCDC174
  Gene Name: coiled-coil domain containing 174
  Uniprot ID: Q6PII3
  ENST ID: ENST00000383794
  CDS Start-End: 74-1477
gacggaggtaggcttacgaggcctgtgtcgggtagaaagggtccttcctggaccgggaccctctgccacgaccatggaccgtaggaaaaagcctttggacgtcacggcctcctcgttggtagatcttaaggctgaactcttccgaaagcaagaagaattcaaacaagaaaaacttctaaaagattctggagtttttggaaaaccaaaaacaactaacaagaaaccaagtatctggagcaaacagaatgtaggcgtttcaaatcgagctgagaaggatgctgaacagaagattgaagaacagaagactttagacaaagcaagggaaaaattggaagaaaaagccaaattatatgaaaaaatgactaaaggagactttatagatgaagaagtagaggatatgtaccttgtggatttcacacagaagatcatagacaagcgcaaagaaatggaggcatctggtgcccatagagattctcaaaaggcaggagaaagggacgacgatgaggaaaaccttcctgagggagagatccctcctccccaagaccccagtgaagaatgggtggattacgtggactctttggggcgttcccggcgctgtatgagaaaggatttgccagatctgctggagatggataaaaatcttcaggggagactttttattagtcctgctaatgaaaaaaccctattatctgaagatatgagaaaagaacttcagcgccagcaatgggaggaagaagaaagagaggccctgaagaggcccatggggcccgtacattatgaagacattcgggaaaatgaggcccggcaacttggtgttgggtattttgcctttgcccgagacaaagagttgagaaacaagcagatgaaaaccttagagatgctgcgtgaacagacaacagatcagagaacaaaacgagaaaacataaaggaaaagcgaaaggctatcttagaggcaagacttgccaaacttcgacaaaaaaagatgaaaaaatcaaaagaaggtggaacagaagaagaaaatagagatggagatgttattgggcctttgccaccggagccagaggctgtgccaaccccacgtcctgctgcccagagtagcaaagtagaagtcattgtccaggagaggaaggacaccaagcctggagtgccacacatccgggagtgggaccgcggaaaagaattttcctttggatactggtcgaagaggcagtcagatctccgggctgagagagatcctgagtttgccccgccgtcagattactttgtgggtcagaagagaactggtttttccagcagccaggcatggagcagacctgggccagcacagagtgacccagggcagtgccctgaccagagccacggacctagccctgaacatacgtcacccactcctgcccccgacaacccaccacaagcccccacagttactttcaaaactctggatgacatgatttcctattacaaacaagtgacatgatctttcaaagcacgctgacttgggtttgtactttgacagtgcctttctctcccagagggagaaataactttaggaactgaattgtacctttgtcctgtcctttccctaggaggcacagacttcgggttggatttgtcagcaaggaggaaagttatggaaactttggccacttggctgttcattttattctaagtgggatagggacatacctacctggatttacatgtgagctgcgatagaatagaagtatttattctgtaaaattagacactgagatgtgcttataaccctgtttcatatctactcccacgacttactcatatttaagggttcttttccattccttttgcaaatccgagcatgcaggtgtctttattccaagggttcagcttccagatcagccgatggaccataggtcacgaggaatttctccctgtcaagcagtggaaaactgcatgggaggcaaaatgctctgttctccaagaggacccggaagtaatcacataggaaatgataaggaagaccaggaggagctcttcgtagtccagaaaggtagaagtgggagttgtttacttaattttactgtcataccatgctattacctacactcctgtgtgcagtgggcattcagtaaatgtgtgttgaaggactgggacgtacgtggaggctgctggacctggtcagagactgatgtgccttagcggcaatggttagagcttttcagtgcatcccacctccctgtcgcccccatgctcggcttcctcacattcaggagcctgacttggatcagacttggggctgcacagtggagcaggtgggttcccgtgtcattagtaataaggagagggttgggggtgggcagggctccagaaagtcagcagtgtgcctgggcacccaccccatcctctacctgccacacctcagagggttcctacagctgcacacaagcagttgagagttgatgaccaggcccatagggctcccacagctggttcccaggccagtgagtgctgtgagaatacagtagcacaagtccttgttctctgaagagtgggaaggagaggagtgagtgaagtagcctgtcccctgcaggtcctctgcgatggcattgtctcggttcccgcagtgctgcagtgtggaagggagtgccccatcctcattacagatgacacactggagtgtggaggggtcgatgacttgtgcagggtcatatggtacctaaggggcagatctcagacttaaacacaattgatgtctaacccctagacagtctttttagtgccctctgctctcagtcttgttgccctagtatcaagcaatcttagacaaacatcctgaattcttacaaacttacctctaaactctgaggataaagttgccagtccttttaatggtcagcctaatcattctgtcagcctaatcgggtaattgctttttttaataaatacacataaaaaccaactaa

SEQ ID NO: 120910 - DNA, 2720 bp, Homo sapiens
  Payload ID: 3692
  Gene Symbol: CCDC174
  Gene Name: coiled-coil domain containing 174
  ENST ID: ENST00000611584
  CDS Start-End: 377-1261
gaagacacttccggttgcgacggaggtaggcttacgaggcctgtgtcgggtagaaagggtccttcctggaccgggaccctctgccacgaccatggaccgtaggaaaaagcctttggacgtcacggcctcctcgttggtagatcttaaggctgaactcttccgaaagcaagaagaattcaaacaagaaaaacttctaaaagattctggagtttttggaaaaccaaaaacaactaacaagaaaccaagtatctggagcaaacagaatgtaggcgtttcaaatcgagctgagaaggatgctgaacagaagattgaagaacagaagactttagacaaagcaagggaaaaattggaagaaaaagccaaattatatgaaaaaatgactaaaggagactttatagatgaagaagtagaggatatgtaccttgtggatttcacacagaagatcatagacaagcgcaaagaaatggaggcatctggtgcccatagagattctcaaaaggcaggagaaacgacgatgaggaaaaccttcctggggagagatccctcctccccaagaccccaggttagttcagggtggattacgtggactctttggggctcccggcgctgtatgagaaaggatttgccagatctgctggagatggataaaaatcttcaggggagactttttattagtcctgctaatgaaaaaaccctattatctgaagatatgagaaaagaacttcagcgccagcaatgggaggaagaagaaagagaggccctgaagaggcccatggggcccgtacattatgaagacattcgggaaaatgatggagatgttattgggcctttgccaccggagccagaggctgtgccaaccccacgtcctgctgcccagagtagcaaagtagaagtcattgtccaggagaggaaggacaccaagcctggagtgccacacatccgggagtgggaccgcggaaaagaattttcctttggatactggtcgaagaggcagtcagatctccgggctgagagagatcctgagtttgccccgccgtcagattactttgtgggtcagaagagaactggtttttccagcagccaggcatggagcagacctgggccagcacagagtgacccagggcagtgccctgaccagagccacggacctagccctgaacatacgtcacccactcctgcccccgacaacccaccacaagcccccacagttactttcaaaactctggatgacatgatttcctattacaaacaagtgacatgatctttcaaagcacgctgacttgggtttgtactttgacagtgcctttctctcccagagggagaaataactttaggaactgaattgtacctttgtcctgtcctttccctaggaggcacagacttcgggttggatttgtcagcaaggaggaaagttatggaaactttggccacttggctgttcattttattctaagtgggatagggacatacctacctggatttacatgtgagctgcgatagaatagaagtatttattctgtaaaattagacactgagatgtgcttataaccctgtttcatatctactcccacgacttactcatatttaagggttcttttccattccttttgcaaatccgagcatgcaggtgtctttattccaagggttcagcttccagatcagccgatggaccataggtcacgaggaatttctccctgtcaagcagtggaaaactgcatgggaggcaaaatgctctgttctccaagaggacccggaagtaatcacataggaaatgataaggaagaccaggaggagctcttcgtagtccagaaaggtagaagtgggagttgtttacttaattttactgtcataccatgctattacctacactcctgtgtgcagtgggcattcagtaaatgtgtgttgaaggactgggacgtacgtggaggctgctggacctggtcagagactgatgtgccttagcggcaatggttagagcttttcagtgcatcccacctccctgtcgcccccatgctcggcttcctcacattcaggagcctgacttggatcagacttggggctgcacagtggagcaggtgggttcccgtgtcattagtaataaggagagggttgggggtgggcagggctccagaaagtcagcagtgtgcctgggcacccaccccatcctctacctgccacacctcagagggttcctacagctgcacacaagcagttgagagttgatgaccaggcccatagggctcccacagctggttcccaggccagtgagtgctgtgagaatacagtagcacaagtccttgttctctgaagagtgggaaggagaggagtgagtgaagtagcctgtcccctgcaggtcctctgcgatggcattgtctcggttcccgcagtgctgcagtgtggaagggagtgccccatcctcattacagatgacacactggagtgtggaggggtcgatgacttgtgcagggtcatatggtacctaaggggcagatctcagacttaaacacaattgatgtctaacccctagacagtctttttagtgccctctgctctcagtcttgttgccctagtatcaagcaatcttagacaaacatcctgaattcttacaaacttacctctaaactctgaggataaagttgccagtccttttaatggtcagcctaatcattctgtcagcctaatcgggtaattgctttttttaataaatacacataaaaacc

SEQ ID NO: 120911 - DNA, 2487 bp, Homo sapiens
  Payload ID: 3693
  Gene Symbol: CCDC175
  Gene Name: coiled-coil domain containing 175
  ENST ID: ENST00000281581
  CDS Start-End: 1-2487
atggccctgagcccctggaccccagggctgggcgctggcgagaagctggtgcaggcggctgccgtctccactggcccctccctggagttatgcaccttaccctccaccctgggctcctcggtcgcggtcgaggcgctggagcagctgtttgttgtggaacaatcactgcaaagtgactattttaaatgtaatgaagaagctaagatctttcttaaggacattgctgtagctgttaagaaattggaagaaatgagaaaagccacaatcgatcttttggagattgaaagcatggaactcaacaaactatactatctattggaaactcttcccaatagcattaagagggaattggaagaatgtgtccgagacgctcgcagattaaatctttttgagataaatacaataaaaatgagaattacaaggacagagaatgaaatagagcttctgaagaagaaaataactgacctgacaaaatataatgaagctctgggggagaagcaggaagagctagcaaggaagcatgcaaggtttgtcctgtcactcaaccaaactatggagaaaaaagccaccaccactgtttacataaatgagacttataccaaaataaacttgaagagagaagacatagcattgcaaaaaaaatgtattcaagaggcagaggagctaatggaaaaagaaagggcagaatatctaataagaaaacaagagttgactgcacagattaatgaatttgaaaatacccgtgaagtaaagagaatggagacttatcaaaagaagaaagaattggataaattacaaactaaaatgtcaaaaataaaagaaacagttactgtttccgcagcggttcttagtgatcacaatttagagatagcacgactacacgaatcaataaggtattgggaacaagaggtcagtgagctaaagaaagaccttgcaattctggaggcgaaactgtgttttttcacagataacaaagaaaaactagatgatatatctaatgatgaaaaaaatgaattcctgaacaagataaaacagctggttgaaacactgcatgctgctcgtatggaatacaaagacctacgagagaaaatgaaaactcttgccagacaatataagattgttttaagtgaggaagaaaaagcttttttgcaaaaacaaaagattcatgatgaaaatcagaaacagctgacatttatttctcagaaagaatactttctgtcacaaaagagagtagacatcaaaaatatggaagaaggactcatcacactccaggaacttcaacaagcaacaaaaacagtgtatcagcaacaaatcaaaatcctgagtgctaacctggaaagagaaagtcagagatgtgttataactcagtggaaaatggcttgcttgagaaaaaagcatgcacgttggacagccaagataaaagctgaaatacaagctattacagaaaaaattcagaatgcagaagttagacgaattgaattacttaacgagaccagtttcagacaacaggagatcagtggatttgtggcacagattgaaaaacttacaacagaattaaaagaagaggagaaagcatttgttaacaaagaaaaaatgttaatgaaagagttaagcaagtatgaggaaatatttgttaaggaaacacaaattaacaaagaaaaggaagaagaactagttgagtatcttccacaacttcaggtggcagaacaagagtataaagagaaaagaagaaagttagaagagctcagtaatattattacagcacaaagacaggaggaagatttactgaacaatcacatttttctgtttacaagggacttttcaagatacattagcaacatggaagatgtaaaacaagaattacaacaattacgagatcaagaaagcaaaaaaaacaaagatcattttgaaactctaaagaacttagaaaatggattctatataaatgaccaaaaagcagatcttctgctcctggaaaataaaaaattaaaagaatatattttatacttgaagaataacatagagaaatacagagaaggacaagaagccctcatgcacacctcaagcgacttgtctcggcaactaatagctcaggaggcacaatataaggatttgtgggctgaatttcagaccacagttaagatcttggtggacaatggtgaagagaccttgcaagacataaacaatctaacagacaagctgcgtgaaagagatgaaaaaatgcagcatgtcagtacatggctacgagggagtcttgaagggctgcgtttgcttgtggaacaggaatcaccaatggaccttcttagtaagcaacagcttagagctttgctggtaacatcaaaagaagaaaaaacgtgtcaactaagtgacttagttatccccaattatgccacaaacattcaattgaacattgatacttatttggggttgaatactcttgtagtgttatccaattctgcctttcacctaagagaattttctagataa

SEQ ID NO: 120912 - DNA, 2616 bp, Homo sapiens
  Payload ID: 3693
  Gene Symbol: CCDC175
  Gene Name: coiled-coil domain containing 175
  Uniprot ID: P0C221
  ENST ID: ENST00000537690
  CDS Start-End: 57-2438
gtggcaaccggcaatccttggctctggcttaggaggcgctcaagtagagcggcaaaatggccctgagcccctggaccccagggctgggcgctggcgagaagctggtgcaggcggctgccgtctccactggcccctccctggagttatgcaccttaccctccaccctgggctcctcggtcgcggtcgaggcgctggagcagctgtttgttgtggaacaatcactgcaaagtgactattttaaatgtaatgaagaagctaagatctttcttaaggacattgctgtagctgttaagaaattggaagaaatgagaaaagccacaatcgatcttttggagattgaaagcatggaactcaacaaactatactatctattggaaactcttcccaatagcattaagagggaattggaagaatgtgtccgagacgctcgcagattaaatctttttgagataaatacaataaaaatgagaattacaaggacagagaatgaaatagagcttctgaagaagaaaataactgacctgacaaaatataatgaagctctgggggagaagcaggaagagctagcaaggaagcatgcaaggtttgtcctgtcactcaaccaaactatggagaaaaaagccaccaccactgtttacataaatgagacttataccaaaataaacttgaagagagaagacatagcattgcaaaaaaaatgtattcaagaggcagaggagctaatggaaaaagaaagggcagaatatctaataagaaaacaagagttgactgcacagattaatgaatttgaaaatacccgtgaagtaaagagaatggagacttatcaaaagaagaaagaattggataaattacaaactaaaatgtcaaaaataaaagaaacagttactgtttccgcagcggttcttagtgatcacaatttagagatagcacgactacacgaatcaataaggtattgggaacaagaggtcagtgagctaaagaaagaccttgcaattctggaggcgaaactgtgttttttcacagataacaaagaaaaactagatgatatatctaatgatgaaaaaaatgaattcctgaacaagataaaacagctggttgaaacactgcatgctgctcgtatggaatacaaagacctacgagagaaaatgaaaactcttgccagacaatataagattgttttaagtgaggaagaaaaagcttttttgcaaaaacaaaagattcatgatgaaaatcagaaacagctgacatttatttctcagaaagaatactttctgtcacaaaagagagtagacatcaaaaatatggaagaaggactcatcacactccaggaacttcaacaagcaacaaaaacagtgtatcagcaacaaatcaaaatcctgagtgctaacctggaaagagaaagtcagagatgtgttataactcagtggaaaatggcttgcttgagaaaaaagcatgcacgttggacagccaagataaaagctgaaatacaagctattacagaaaaaattcagaatgcagaagttagacgaattgaattacttaacgagaccagtttcagacaacaggagatcagtggatttgtggcacagattgaaaaacttacaacagaattaaaagaagaggagaaagcatttgttaacaaagaaaaaatgttaatgaaagagttaagcaagtatgaggaaatatttgttaaggaaacacaaattaacaaagaaaaggaagaagaactagttgagtatcttccacaacttcaggtggcagaacaagagtataaagagaaaagaagaaagttagaagagctcagtaatattattacagcacaaagacaggaggaagatttactgaacaatcacatttttctgtttacaagggacttttcaagatacattagcaacatggaagatgtaaaacaagaattacaacaattacgagatcaagaaagcaaaaaaaacaaagatcattttgaaactctaaagaacttagaaaatggattctatataaatgaccaaaaagcagatcttctgctcctggaaaataaaaaattaaaagaatatattttatacttgaagaataacatagagaaatacagagaaggacaagaagccctcatgcacacctcaagcgacttgtctcggcaactaatagctcaggaggcacaatataaggatttgtgggctgaatttcagaccacagttaagatcttggtggacaatggtgaagagaccttgcaagacataaacaatctaacagacaagctgcgtgaaagagatgaaaaaatgcagcatgtcagtacatggctacgagggagtcttgaagggctgcgtttgcttgtggaacaggaatcaccaatggaccttcttaagaagaagaaacacattcgtacaagggttcatttcccagtggttaaatgtactgagaaaaatacattaacaaagtaactcaaggatacaactgctgtgaattcaaaagacagactactacaggaaaagtgagtgcacttactttcatattttgcagctgttaatagaagtcttaaacatttaaaatttaactaattcacacaacctccaccaagtatcagtaaataaacttctaaacaataaaaatggataaaca

SEQ ID NO: 120913 - DNA, 4131 bp, Homo sapiens
  Payload ID: 3694
  Gene Symbol: CCDC177
  Gene Name: coiled-coil domain containing 177
  Uniprot ID: Q9NQR7
  ENST ID: ENST00000599174
  CDS Start-End: 325-2448
cagcgacggaaccgggcttcttttttaaagaatcaatgtgagggaagggtgcagagccgcgttattttagggagacattgtcgcactccccctcccacgtgtaggtagcatctggggtgcgtgcgccctgttcgcagaccccatggagagacgctggcggcggcagatggggctcctttcacggttgcagccggcagtaacccgaccccgccggcgcagagactgaagaagcgcaggggacagcggcgagctgcgaacaaaagcccttggcgcggggccgaagcccaggacgcgggagattccaacaaaggacggggctcagccatggtggacccagtgcctgaagaagagaaggcaggagcggaacccggcgactctggaggggacgaggccgtggcgtccgtgccccctgattcccagggcgcacaggagcccgcagcttcctcggcctcggcctcggcctccgcggcggtgccccgcaaggcagaagtcccatgtgcagccgcagaaggcgggcggcgggagcagtccccgctgctgcacctcgacctcttcaacttcgactgcccagaggcggagggcagccgctacgtgctgaccagcccccgctcgctagaggcctgcgcccgctgtgcggtcaagccggtggagctgctgccacgggccctggccgacctggtgcgagaggctccgggccgctccatgcgggtggccaccggcctgtatgaggcctacgaggcggagcggcgcgccaagctgcagcaatgccgggccgagcgcgagcgcatcatgcgcgaggagaagcggcgtcttttcacgcctttgagccccgcggccgccgccgccgccgccgccgccgcggcctcggccccgagcgcgggcagcagcagcagctgcagcagcgccagcctcccggcctcgcccgcgccgcgtgcggcccgcaaggcttcccctagtccctcctccgcccggacccaacctccgccagcgggttctcgaacaggcaggaagagccattcgctggactcactgtcccgccggcgtgagggcgccctcagctccgagtcgggcgcatcgtcgtcatcctacagtggggaaagcttgagggagctgcgctggccgcctcgggcctcggccaggaacagctgcccagcggggtcggcgtcctccaccaccaacgctccgggccgcccgtctgccctgaccctggttccgatcaccggccgcagcttcagcctcggcgacctgagccattcgccgcagaccgctcagcacgtggagcgcatcgtgcgtcaagtgcgtgcagagcgcggcctgcgcggggtgccggagcgtgaccggaagatcgcggcgctcatgctggcgcggcaccaggaggagctcctgctgctggagcaacgcgcggctgcccacggccagtgggagctgcagcgcgtgcacgccaagcagcggcgggagcgcgaggagcgggagaagcagcgcgccctagagcagggccgccgagcctgggccgcgcaggtggaggagcggcgaggccgccgtggccgcgaagagcgcgaggcggcgcggcggcggcagcggcagtacgagcgcagcgaggagcggcggcgggagctggccgaacgccagggcctcctgcggcgggagcgggcggagcgcgcggcccgggaggatcggctgcgcaagcttcagcaggagcagaacctgaagcaacgtgaggaaggtctacaggaagggcgggagcgggctgagcagatccgcagggagcgcgcccagcgcgcggcccgcgccaagcagcggcaggagggccagctgcagcgggagaagcgggagctgagccgggccgagcgggcgcgccacgaggcgctgctacagggtcggacccggcagcagcgccaggagcgagagggcctgcggagctcgctggaagccagtttgggccgtgcgcaggagaactacgagcatttggtggagcagcgcacccgggagctgcgggagcgggcccggcgagaggagctgcagggtcggcgggccaaggaggcggcagagcgcaaagagcgggaacatcaggcgcacctggaggcgctggcccgggcgggggagcgacggctgcagcacgcgacgcaggtggccgaggaagcagtgcagcagaaggcgcggcgcgtgggccagagccggctggagaaggaacgagcccagcgcgccaacaaggagaaggtggagagggacgaagactgccgccggcgagagctactccaggccatcgggcgcaagctggagcgcagcgagcagctgacgcgggaacggcgcagtgcgctggagagcgcccgctccacagcccgggcttccttccacgtgcgtgagaaggtgcgcgaggagaccaacacgcgatccttcgaccgcatggtgcgggaggcccagctacacgccagcctggaccgcaaataactgcggctctttgccagccagattggcacgcacagccccctggggcctccctcaaccactgaccatcgtgggagtccccgctcggtgcgcagcgcggtggcctctcgaggcttctgaccaatgaggcaacaacagtacagacgtttgggacctgtcagctggccccctttgtttttaaaacttacttcatttggagatgacagcacaatctgcccacatccacccttgatggctcccgcaccgacccttgccaaacttccctatgtgtctcttgggctggaatagagaagcttgggggaaaggggctgatcaggactggtgagagggccccccaggagagggcagaggtggttgtccccaccccttctgcagcagttgccccaggcacctgttcgacattggtgtctgagacagtgttgctactgctgagggaacatcaccctggctcacctccatctttcaaaatatggcaagctgcacaaatcgcggaggcctcccagagaaacacagctcctccaaggtgtcaagccacgcccaaatgatccaaaaagcagttgattttttagaccttttaatcggccacctgagcaaattctcaccagttttgatagttttccagtttagtcccttgggttttctagttagacagtcatctgcagataatgttcaatttttgtcctttgccccctccctcattctaccaagtggcacaggaaattggttggtttggtgatgctgtttagctttaatagaaacccccagcccctggaggggctggattcctttgggagcagtgttccattccattaagcttccttgcagggtggggcccactccatgaagacagcagtcatgccttaagaagcagagctaccttacgtgcctgcccaggctgttcctgcctaaatctccagccctgcatgccgtctcaagggtgggccccagagagtttggagtgtaggattccctctgtgaaggaatcatctctacttctctgaggacaattagggtatccttggctgctttactgtggtggccgaagagctggaattgcctttgttgagagttgtgttcactatcagtggtcgtgtaccttctccacctgcccccaggaaaaagagtctcccccttaaatttcctggtaccccctcacctatgcctgaaagcatttcaccctctcaatgcctcacctttcccattcgccagatggaaccatcagtattcctctcctggtaccgcaaggcctcctggatccaaagcaccatgtcagtattatttgttggtcctttttgtgcctttcttgacctggagggggaggcaggaggattgctgtcagcctagtttctttctgggaatatggctccctagtgttggaaagggcagtgcctcgtggacagatggtcatttagcctctggggtgaaatacttgcaataccaggtcactctgtggtccaaaaggtcacattcagttgtcatcaggcaactttaacccttagagtgcttcccttccattaagctgaaattgccccacggccatatccacccattgactctgccttcatcaaggaaggtgggaagtaaaacatcactttttacattaaaccaggatcaggaataaaatgttaccaaaaaaaaaaaatggaaacagggtagagaactgctacattaaacatatttcatata

SEQ ID NO: 120914 - DNA, 3087 bp, Homo sapiens
  Payload ID: 3695
  Gene Symbol: CCDC178
  Gene Name: coiled-coil domain containing 178
  Uniprot ID: Q5BJE1
  ENST ID: ENST00000300227
  CDS Start-End: 212-2701
gaccgcagcagagccggaggggtgggcaggcgcgggtccgggagacgcgcggggaaacgcgcggagccgtgtctgctcaatcaagtcaaatactgaacaacttcctggcggagaggctgagaattttatacttgcttgctcgaaagcaccccaaataagatgatccacgccaacacctcccctttacaggttttaaaatattcttataactatgactgaaaacaagacagtttcctcttcttccactagagatgatcaaaccaatataggtttaacatgtcaggaagtaaaggctctcagagagaaggcatggtcaaggacaaatgaaggcaatgccatgtctcaaagtttggttctatatggagcctctaaggagaacagtgaaggttttcatgaaagtaaaatgacaaatactgaaggggtgaataaaggcatttactttagctacccatgtcgacgtcacagctgtgccgtagtaaatattccagcaccttgtgtcaacaaaatgatttcacacatccaagatgtggagtccaaaatacaggagcatttgaaaaggtttgaaacttcttttgaagaatggagcagaacttcttccacaaaagacctgaaagaagattggagtgtaactacaccagtgaaagaggtcaaaccaggagaaaagagagatgaaaagtgtccagagttaaagcaggaaatggaaacattgctctcagaggccattcgtctcattaaaagtctagaaactgaccgggcagacgctgaagaagctttaaaacaacagagatcaagaaagaatatgattaacatgaaaattgactcttggtcagtctggaaacttcaagaactcccattggctgtgcagaaagaacatgaggcctatttgagtgatgttatagaattacaatggcatcttgaagataaagctaatcaactacaacattttgaaaaacaaaagacagagttagaagaagcaaatgcaaagattcaagcagacatagactacatgaatgaacatggccctctactggactctaagcagaatcaggaacttcaagatctgaagaaccattataaaaaaaaaatggaggtaatggacctacacagaaaagttaatgaagaacttgaagaagctttagaagcctgtgaaaatgccagattgaaggctcagcaaattaaagaagagattgataaggatatttaccaggatgaaaaaaccatagaggcctacaagagagagatatatcaacttaacagtctatttgatcattactcttcatcagtgataaatgttaatactaatattgaggagaaggaagaggaagtgactgaagcaataagggaaacaaagtcatcaaaaaatgaattacattctctatcaaaaatgctggaagatttgagaagagtttatgaccaactaacctggaagcaaaaaagtcatgaaaatcagtatctggaagcagttaatgatttttatgctgcaaaaaaaacatgggatattgagctttctgatgttgcaaaagatttttcagctatttctttggcatgtacaaaactgacggaagacaataaaaaacttgagattgatattaacaaaataacagtaaaaaccaatgaaagcatacggaaaaaatcaaaatacgaatctgaaataaaatatttgacaataatgaagttaaagaatgataaacatctcaagaacatctataaggaggcttatcgcattggtactcttttccacctaaccaaacacaagacagatgaaatggaagataaaatagcagaagtgagaagaaagttcaagggtagagaagaattcctgaaaaaactcactcaaggtgaagtggctgctggaatggtgcttcagaaaaaactatattccatttacgaagtccaggcacttgagcggaaagagcttataaaaaatagagcaatatgtgccatgtcactggcagaactacaggaacctctgcttcaactagaagatgaagctgaaagaatcagaagtctcgacaaagaacattctgttagtaaacgctcagcaatttttaaagacctagaagcaactaaaagtaagacaatgattttttatgcaaaaataaatgaattgaatgaggaattaaaagcaaaagaagaagaaaagaaaagttttgatcagacacttgaaatattaaagaacaaatttataactatgagatttaaaagggaacatgcacaaactgtgtttgatcattatatgcaagagaaaaaagactgtgaagagagaatctttgaggaagatcagagatttagagtgctccttgctgtaagacaaaaaactcttcaagatacccaaaaaataatagctgattcacttgaagaaaatctgcgtttagctcaagagtatcaacagctacagattacattcttaaaagaaaaggacaattatttcaatatatatgataaacagctatcacttgatacttcaattagagataagaaacagctctgtcagctgcagagaaggatgcacacactgtggcaggagcacttcaaactggtggtcctcttcagccagatgaggctggccaacttccagacagactctcaggagagtattcagaaaatattagctgtgcaggaggaatcttcaaatttaatgcaacacatcttaggtttcttccagactttgacagatggcacatgcgaaaacgatggttaagcaaacaaccaatgtatcttggatgctgaaataaaagacaagaaaagtcacacagttcagataacagtgtaattggacattcacctgtttgccatttcacacttccatgaacgaaaaactcactcacctcccagcatgctttgccactcttttactcacagcaaatccataacaatgaaacaggtgactttcatgctgctgtcaggaacgatctaatttcagctctgggtgactgattgcaattggctttgcctcatctgataattaatctatgtcaccattaattggaagagagaataattactggcggtgttgacagtgactgttcgcttccccagatttccctatcgtcttggcccaaataaaggctttgccattcagtactt

SEQ ID NO: 120915 - DNA, 3391 bp, Homo sapiens
  Payload ID: 3695
  Gene Symbol: CCDC178
  Gene Name: coiled-coil domain containing 178
  Uniprot ID: Q5BJE1
  ENST ID: ENST00000383096
  CDS Start-End: 184-2787
ggcgcgggtccgggagacgcgcggggaaacgcgcggagccgtgtctgctcaatcaagtcaaatactgaacaacttcctggcggagaggctgagaattttatacttgcttgctcgaaagcaccccaaataagatgatccacgccaacacctcccctttacaggttttaaaatattcttataactatgactgaaaacaagacagtttcctcttcttccactagagatgatcaaaccaatataggtttaacatgtcaggaagtaaaggctctcagagagaaggcatggtcaaggacaaatgaaggcaatgccatgtctcaaagtttggttctatatggagcctctaaggagaacagtgaaggttttcatgaaagtaaaatgacaaatactgaaggggtgaataaaggcatttactttagctacccatgtcgacgtcacagctgtgccgtagtaaatattccagcaccttgtgtcaacaaaatgatttcacacatccaagatgtggagtccaaaatacaggagcatttgaaaaggtttgaaacttcttttgaagaatggagcagaacttcttccacaaaagacctgaaagaagattggagtgtaactacaccagtgaaagaggtcaaaccaggagaaaagagagatgaaaagtgtccagagttaaagcaggaaatggaaacattgctctcagaggccattcgtctcattaaaagtctagaaactgaccgggcagacgctgaagaagctttaaaacaacagagatcaagaaagaatatgattaacatgaaaattgactcttggtcagtctggaaacttcaagaactcccattggctgtgcagaaagaacatgaggcctatttgagtgatgttatagaattacaatggcatcttgaagataaagctaatcaactacaacattttgaaaaacaaaagacagagttagaagaagcaaatgcaaagattcaagcagacatagactacatgaatgaacatggccctctactggactctaagcagaatcaggaacttcaagatctgaagaaccattataaaaaaaaaatggaggtaatggacctacacagaaaagttaatgaagaacttgaagaagctttagaagcctgtgaaaatgccagattgaaggctcagcaaattaaagaagagattgataaggatatttaccaggatgaaaaaaccatagaggcctacaagagagagatatatcaacttaacagtctatttgatcattactcttcatcagtgataaatgttaatactaatattgaggagaaggaagaggaagtgactgaagcaataagggaaacaaagtcatcaaaaaatgaattacattctctatcaaaaatgctggaagatttgagaagagtttatgaccaactaacctggaagcaaaaaagtcatgaaaatcagtatctggaagcagttaatgatttttatgctgcaaaaaaaacatgggatattgagctttctgatgttgcaaaagatttttcagctatttctttggcatgtacaaaactgacggaagacaataaaaaacttgagattgatattaacaaaataacagtaaaaaccaatgaaagcatacggaaaaaatcaaaatacgaatctgaaataaaatatttgacaataatgaagttaaagaatgataaacatctcaagaacatctataaggaggcttatcgcattggtactcttttccacctaaccaaacacaagacagatgaaatggaagataaaatagcagaagtgagaagaaagttcaagggtagagaagaattcctgaaaaaactcactcaaggtgaagtggctgctggaatggtgcttcagaaaaaactatattccatttacgaagtccaggcacttgagcggaaagagcttataaaaaatagagcaatatgtgccatgtcactggcagaactacaggaacctctgcttcaactagaagatgaagctgaaagaatcagaagtctcgacaaagaacattctgttatgcttaataatataattgatcagaaagatcttattagaagaaaggtgggaaaagtaaagaaaaaattacgaaaaaaggggaagaaaacccttgatgcattaatagaaactgagagtaaacgctcagcaatttttaaagacctagaagcaactaaaagtaagacaatgattttttatgcaaaaataaatgaattgaatgaggaattaaaagcaaaagaagaagaaaagaaaagttttgatcagacacttgaaatattaaagaacaaatttataactatgagatttaaaagggaacatgcacaaactgtgtttgatcattatatgcaagagaaaaaagactgtgaagagagaatctttgaggaagatcagagatttagagtgctccttgctgtaagacaaaaaactcttcaagatacccaaaaaataatagctgattcacttgaagaaaatctgcgtttagctcaagagtatcaacagctacagattacattcttaaaagaaaaggacaattatttcaatatatatgataaacagctatcacttgatacttcaattagagataagaaacagctctgtcagctgcagagaaggatgcacacactgtggcaggagcacttcaaactggtggtcctcttcagccagatgaggctggccaacttccagacagactctcaggagagtattcagaaaatattagctgtgcaggaggaatcttcaaatttaatgcaacacatcttaggtttcttccagactttgacagatggcacatgcgaaaacgatggttaagcaaacaaccaatgtatcttggatgctgaaataaaagacaagaaaagtcacacagttcagataacagtgtaattggacattcacctgtttgccatttcacacttccatgaacgaaaaactcactcacctcccagcatgctttgccactcttttactcacagcaaatccataacaatgaaacaggtgactttcatgctgctgtcaggaacgatctaatttcagctctgggtgactgattgcaattggctttgcctcatctgataattaatctatgtcaccattaattggaagagagaataattactggcggtgttgacagtgactgttcgcttccccagatttccctatcgtcttggcccaaataaaggctttgccattcagtacttaaagtttgtgtaaactgtaacaatatctatgcccatgtgacactttgagacactctgtctaatgtacttttgtttttgtgtttaccagtcttttttagctcactgagagctgtctctctcaatcactcctcaatgttctatcttaattttgtggaagtttaaagttttcaatgagctggagatgaatgattaatgaataaatttaaatgcttcatttt

SEQ ID NO: 120916 - DNA, 1017 bp, Homo sapiens
  Payload ID: 3695
  Gene Symbol: CCDC178
  Gene Name: coiled-coil domain containing 178
  ENST ID: ENST00000399177
  CDS Start-End: 144-1017
gtgtctgctcaatcaagtcaaatactgaacaacttcctggcggagaggctgagaattttatacttgcttgctcgaaagcaccccaaataagatgatccacgccaacacctcccctttacaggttttaaaatattcttataactatgactgaaaacaagacagtttcctcttcttccactagagatgatcaaaccaatataggtttaacatgtcaggaagtaaaggctctcagagagaaggcatggtcaaggacaaatgaaggcaatgccatgtctcaaagtttggttctatatggagcctctaaggagaacagtgaaggttttcatgaaagtaaaatgacaaatactgaaggggtgaataaaggcatttactttagctacccatgtcgacgtcacagctgtgccgtagtaaatattccagcaccttgtgtcaacaaaatgatttcacacatccaagatgtggagtccaaaatacaggagcatttgaaaaggtttgaaacttcttttgaagaatggagcagaacttcttccacaaaagacctgaaagaagattggagtgtaactacaccagtgaaagaggtcaaaccaggagaaaagagagatgaaaagtgtccagagttaaagcaggaaatggaaacattgctctcagaggccattcgtctcattaaaagtctagaaactgaccgggcagacgctgaagaagctttaaaacaacagagatcaagaaagaatatgattaacatgaaaattgactcttggtcagtctggaaacttcaagaactcccattggctgtgcagaaagaacatgaggcctatttgagtgatgttatagaattacaatggcatcttgaagataaagctaatcaactacaacattttgaaaaacaaaagacagagttagaagaagcaaatgcaaagattcaagcagacatagactacatgaatgaacatggccctctactggactctaagcagaatcaggaacttcaagatctgaagaaccattataaaaaaaaaa

SEQ ID NO: 120917 - DNA, 3354 bp, Homo sapiens
  Payload ID: 3695
  Gene Symbol: CCDC178
  Gene Name: coiled-coil domain containing 178
  Uniprot ID: Q5BJE1
  ENST ID: ENST00000403303
  CDS Start-End: 143-2746
tgtctgctcaatcaagtcaaatactgaacaacttcctggcggagaggctgagaattttatacttgcttgctcgaaagcaccccaaataagatgatccacgccaacacctcccctttacaggttttaaaatattcttataactatgactgaaaacaagacagtttcctcttcttccactagagatgatcaaaccaatataggtttaacatgtcaggaagtaaaggctctcagagagaaggcatggtcaaggacaaatgaaggcaatgccatgtctcaaagtttggttctatatggagcctctaaggagaacagtgaaggttttcatgaaagtaaaatgacaaatactgaaggggtgaataaaggcatttactttagctacccatgtcgacgtcacagctgtgccgtagtaaatattccagcaccttgtgtcaacaaaatgatttcacacatccaagatgtggagtccaaaatacaggagcatttgaaaaggtttgaaacttcttttgaagaatggagcagaacttcttccacaaaagacctgaaagaagattggagtgtaactacaccagtgaaagaggtcaaaccaggagaaaagagagatgaaaagtgtccagagttaaagcaggaaatggaaacattgctctcagaggccattcgtctcattaaaagtctagaaactgaccgggcagacgctgaagaagctttaaaacaacagagatcaagaaagaatatgattaacatgaaaattgactcttggtcagtctggaaacttcaagaactcccattggctgtgcagaaagaacatgaggcctatttgagtgatgttatagaattacaatggcatcttgaagataaagctaatcaactacaacattttgaaaaacaaaagacagagttagaagaagcaaatgcaaagattcaagcagacatagactacatgaatgaacatggccctctactggactctaagcagaatcaggaacttcaagatctgaagaaccattataaaaaaaaaatggaggtaatggacctacacagaaaagttaatgaagaacttgaagaagctttagaagcctgtgaaaatgccagattgaaggctcagcaaattaaagaagagattgataaggatatttaccaggatgaaaaaaccatagaggcctacaagagagagatatatcaacttaacagtctatttgatcattactcttcatcagtgataaatgttaatactaatattgaggagaaggaagaggaagtgactgaagcaataagggaaacaaagtcatcaaaaaatgaattacattctctatcaaaaatgctggaagatttgagaagagtttatgaccaactaacctggaagcaaaaaagtcatgaaaatcagtatctggaagcagttaatgatttttatgctgcaaaaaaaacatgggatattgagctttctgatgttgcaaaagatttttcagctatttctttggcatgtacaaaactgacggaagacaataaaaaacttgagattgatattaacaaaataacagtaaaaaccaatgaaagcatacggaaaaaatcaaaatacgaatctgaaataaaatatttgacaataatgaagttaaagaatgataaacatctcaagaacatctataaggaggcttatcgcattggtactcttttccacctaaccaaacacaagacagatgaaatggaagataaaatagcagaagtgagaagaaagttcaagggtagagaagaattcctgaaaaaactcactcaaggtgaagtggctgctggaatggtgcttcagaaaaaactatattccatttacgaagtccaggcacttgagcggaaagagcttataaaaaatagagcaatatgtgccatgtcactggcagaactacaggaacctctgcttcaactagaagatgaagctgaaagaatcagaagtctcgacaaagaacattctgttatgcttaataatataattgatcagaaagatcttattagaagaaaggtgggaaaagtaaagaaaaaattacgaaaaaaggggaagaaaacccttgatgcattaatagaaactgagagtaaacgctcagcaatttttaaagacctagaagcaactaaaagtaagacaatgattttttatgcaaaaataaatgaattgaatgaggaattaaaagcaaaagaagaagaaaagaaaagttttgatcagacacttgaaatattaaagaacaaatttataactatgagatttaaaagggaacatgcacaaactgtgtttgatcattatatgcaagagaaaaaagactgtgaagagagaatctttgaggaagatcagagatttagagtgctccttgctgtaagacaaaaaactcttcaagatacccaaaaaataatagctgattcacttgaagaaaatctgcgtttagctcaagagtatcaacagctacagattacattcttaaaagaaaaggacaattatttcaatatatatgataaacagctatcacttgatacttcaattagagataagaaacagctctgtcagctgcagagaaggatgcacacactgtggcaggagcacttcaaactggtggtcctcttcagccagatgaggctggccaacttccagacagactctcaggagagtattcagaaaatattagctgtgcaggaggaatcttcaaatttaatgcaacacatcttaggtttcttccagactttgacagatggcacatgcgaaaacgatggttaagcaaacaaccaatgtatcttggatgctgaaataaaagacaagaaaagtcacacagttcagataacagtgtaattggacattcacctgtttgccatttcacacttccatgaacgaaaaactcactcacctcccagcatgctttgccactcttttactcacagcaaatccataacaatgaaacaggtgactttcatgctgctgtcaggaacgatctaatttcagctctgggtgactgattgcaattggctttgcctcatctgataattaatctatgtcaccattaattggaagagagaataattactggcggtgttgacagtgactgttcgcttccccagatttccctatcgtcttggcccaaataaaggctttgccattcagtacttaaagtttgtgtaaactgtaacaatatctatgcccatgtgacactttgagacactctgtctaatgtacttttgtttttgtgtttaccagtcttttttagctcactgagagctgtctctctcaatcactcctcaatgttctatcttaattttgtggaagtttaaagttttcaatgagctggagatgaatgattaatgaataaatttaaatgcttcattttgtcc

SEQ ID NO: 120918 - DNA, 3039 bp, Homo sapiens
  Payload ID: 3695
  Gene Symbol: CCDC178
  Gene Name: coiled-coil domain containing 178
  ENST ID: ENST00000406524
  CDS Start-End: 25-2700
aggttttaaaatattcttataactatgactgaaaacaagacagtttcctcttcttccactagagatgatcaaaccaatataggtttaacatgtcaggaagtaaaggctctcagagagaaggcatggtcaaggacaaatgaaggcaatgccatgtctcaaagtttggttctatatggagcctctaaggagaacagtgaaggttttcatgaaagtaaaatgacaaatactgaaggggtgaataaaggcatttactttagctacccatgtcgacgtcacagctgtgccgtagtaaatattccagcaccttgtgtcaacaaaatgatttcacacatccaagatgtggagtccaaaatacaggagcatttgaaaaggtttgaaacttcttttgaagaatggagcagaacttcttccacaaaagacctgaaagaagattggagtgtaactacaccagtgaaagaggtcaaaccaggagaaaagagagatgaaaagtgtccagagttaaagcaggaaatggaaacattgctctcagaggccattcgtctcattaaaagtctagaaactgaccgggcagacgctgaagaagctttaaaacaacagagatcaagaaagaatatgattaacatgaaaattgactcttggtcagtctggaaacttcaagaactcccattggctgtgcagaaagaacatgaggcctatttgagtgatgttatagaattacaatggcatcttgaagataaagctaatcaactacaacattttgaaaaacaaaagacagagttagaagaagcaaatgcaaagattcaagcagacatagactacatgaatgaacatggccctctactggactctaagcagaatcaggaacttcaagatctgaagaaccattataaaaaaaaaatggaggtaatggacctacacagaaaagttaatgaagaacttgaagaagctttagaagcctgtgaaaatgccagattgaaggctcagcaaattaaagaagagattgataaggatatttaccaggatgaaaaaaccatagaggcctacaagagagagatatatcaacttaacagtctatttgatcattactcttcatcagtgataaatgttaatactaatattgaggagaaggaagaggaagtgactgaagcaataagggaaacaaagtcatcaaaaaatgaattacattctctatcaaaaatgctggaagatttgagaagagtttatgaccaactaacctggaagcaaaaaagtcatgaaaatcagtatctggaagcagttaatgatttttatgctgcaaaaaaaacatgggatattgagctttctgatgttgcaaaagatttttcagctatttctttggcatgtacaaaactgacggaagacaataaaaaacttgagattgatattaacaaaataacagtaaaaaccaatgaaagcatacggaaaaaatcaaaatacgaatctgaaataaaatatttgacaataatgaagttaaagaatgataaacatctcaagaacatctataaggaggcttatcgcattggtactcttttccacctaaccaaacacaagacagatgaaatggaagataaaatagcagaagtgagaagaaagttcaagggtagagaagaattcctgaaaaaactcactcaaggtgaagtggctgctggaatggtgcttcagaaaaaactatattccatttacgaagtccaggcacttgagcggaaagagcttataaaaaatagagcaatatgtgccatgtcactggcagaactacaggaacctctgcttcaactagaagatgaagctgaaagaatcagaagtctcgacaaagaacattctgttatgcttaataatataattgatcagaaagatcttattagaagaaaggtgggaaaagtaaagaaaaaattacgaaaaaaggggaagaaaacccttgatgcattaatagaaactgagagtaaacgctcagcaatttttaaagacctagaagcaactaaaagtaagacaatgattttttatgcaaaaataaatgaattgaatgaggaattaaaagcaaaagaagaagaaaagaaaagttttgatcagacacttgaaatattaaagaacaaatttataactatgagatttaaaagggaacatgcacaaactgtgtttgatcattatatgcaagagaaaaaagactgtgaagagagaatctttgaggaagatcagagatttagagtgctccttgctgtaagacaaaaaactcttcaagatacccaaaaaataatagctgattcacttgaagaaaatctgcgtttagctcaagagtatcaacagctacagattacattcttaaaagaaaaggacaattatttcaatatatatgataaacagctatcacttgatacttcaattagagataagaaacaggttgcaggcttcttacctaagaaacttccaaactctctgccaattatatcagatgaactctcaaattttcagctctgtcagctgcagagaaggatgcacacactgtggcaggagcacttcaaactggtggtcctcttcagccagatgaggctggccaacttccagacagactctcaggagagtattcagaaaatattagctgtgcaggaggaatcttcaaatttaatgcaacacatcttaggtttcttccagactttgacagatggcacatgcgaaaacgatggttaagcaaacaaccaatgtatcttggatgctgaaataaaagacaagaaaagtcacacagttcagataacagtgtaattggacattcacctgtttgccatttcacacttccatgaacgaaaaactcactcacctcccagcatgctttgccactcttttactcacagcaaatccataacaatgaaacaggtgactttcatgctgctgtcaggaacgatctaatttcagctctgggtgactgattgcaattggctttgcctcatctgataattaatctatgtcaccattaattggaagagagaataattactggcggtgttgacagtgactgttcgcttccccaga

SEQ ID NO: 120919 - DNA, 1017 bp, Homo sapiens
  Payload ID: 3695
  Gene Symbol: CCDC178
  Gene Name: coiled-coil domain containing 178
  ENST ID: ENST00000579916
  CDS Start-End: 107-670
tggcggagaggctgagaattttatacttgcttgctcgaaagcaccccaaataagatgatccacgccaacacctcccctttacaggttttaaaatattcttataactatgactgaaaacaagacagtttcctcttcttccactagagatgatcaaaccaatataggtttaacatgtcaggaagtaaaggctctcagagagaaggcatggtcaaggacaaatgaaggcaatgccatgtctcaaagtttggttctatatggagcctctaaggagaacagtgaaggttttcatgaaagtaaaatgacaaatactgaaggggtgaataaaggcatttactttagctacccatgtcgacgtcacagctgtgccgtagtaaatattccagcaccttgtgtcaacaaaatgatttcacacatccaagatgtggagtccaaaatacaggagcatttgaaaaggctctgtcagctgcagagaaggatgcacacactgtggcaggagcacttcaaactggtggtcctcttcagccagatgaggctggccaacttccagacagactctcaggagagtattcagaaaatattagctgtgcaggaggaatcttcaaatttaatgcaacacatcttaggtttcttccagactttgacagatggcacatgcgaaaacgatggttaagcaaacaaccaatgtatcttggatgctgaaataaaagacaagaaaagtcacacagttcagataacagtgtaattggacattcacctgtttgccatttcacacttccatgaacgaaaaactcactcacctcccagcatgctttgccactcttttactcacagcaaatccataacaatgaaacaggtgactttcatgctgctgtcaggaacgatctaatttcagctctgggtgactgattgcaattggctttgcctcatctgataattaatctatgtcaccattaattggaagagagaataattactggcggtgttgacagtgactgttcgcttccccagatttcccta

SEQ ID NO: 120920 - DNA, 2925 bp, Homo sapiens
  Payload ID: 3695
  Gene Symbol: CCDC178
  Gene Name: coiled-coil domain containing 178
  Uniprot ID: Q5BJE1
  ENST ID: ENST00000579947
  CDS Start-End: 184-2733
ggcgcgggtccgggagacgcgcggggaaacgcgcggagccgtgtctgctcaatcaagtcaaatactgaacaacttcctggcggagaggctgagaattttatacttgcttgctcgaaagcaccccaaataagatgatccacgccaacacctcccctttacaggttttaaaatattcttataactatgactgaaaacaagacagtttcctcttcttccactagagatgatcaaaccaatataggtttaacatgtcaggaagtaaaggctctcagagagaaggcatggtcaaggacaaatgaaggcaatgccatgtctcaaagtttggttctatatggagcctctaaggagaacagtgaaggttttcatgaaagtaaaatgacaaatactgaaggggtgaataaaggcatttactttagctacccatgtcgacgtcacagctgtgccgtagtaaatattccagcaccttgtgtcaacaaaatgatttcacacatccaagatgtggagtccaaaatacaggagcatttgaaaaggtttgaaacttcttttgaagaatggagcagaacttcttccacaaaagacctgaaagaagattggagtgtaactacaccagtgaaagaggtcaaaccaggagaaaagagagatgaaaagtgtccagagttaaagcaggaaatggaaacattgctctcagaggccattcgtctcattaaaagtctagaaactgaccgggcagacgctgaagaagctttaaaacaacagagatcaagaaagaatatgattaacatgaaaattgactcttggtcagtctggaaacttcaagaactcccattggctgtgcagaaagaacatgaggcctatttgagtgatgttatagaattacaatggcatcttgaagataaagctaatcaactacaacattttgaaaaacaaaagacagagttagaagaagcaaatgcaaagattcaagcagacatagactacatgaatgaacatggccctctactggactctaagcagaatcaggaacttcaagatctgaagaaccattataaaaaaaaaatggaggtaatggacctacacagaaaagttaatgaagaacttgaagaagctttagaagcctgtgaaaatgccagattgaaggctcagcaaattaaagaagagattgataaggatatttaccaggatgaaaaaaccatagaggcctacaagagagagatatatcaacttaacagtctatttgatcattactcttcatcagtgataaatgttaatactaatattgaggagaaggaagaggaagtgactgaagcaataagggaaacaaagtcatcaaaaaatgaattacattctctatcaaaaatgctggaagatttgagaagagtttatgaccaactaacctggaagcaaaaaagtcatgaaaatcagtatctggaagcagttaatgatttttatgctgcaaaaaaaacatgggatattgagctttctgatgttgcaaaagatttttcagctatttctttggcatgtacaaaactgacggaagacaataaaaaacttgagattgatattaacaaaataacagtaaaaaccaatgaaagcatacggaaaaaatcaaaatacgaatctgaaataaaatatttgacaataatgaagttaaagaatgataaacatctcaagaacatctataaggaggcttatcgcattggtactcttttccacctaaccaaacacaagacagatgaaatggaagataaaatagcagaagtgagaagaaagttcaagggtagagaagaattcctgaaaaaactcactcaaggtgaagtggctgctggaatggtgcttcagaaaaaactatattccatttacgaagtccaggcacttgagcggaaagagcttataaaaaatagagcaatatgtgccatgtcactggcagaactacaggaacctctgcttcaactagaagatgaagctgaaagaatcagaagtctcgacaaagaacattctgttatgcttaataatataattgatcagaaagatcttattagaagaaaggtgggaaaagtaaagaaaaaattacgaaaaaaggggaagaaaacccttgatgcattaatagaaactgagagtaaacgctcagcaatttttaaagacctagaagcaactaaaagtaagacaatgattttttatgcaaaaataaatgaattgaatgaggaattaaaagcaaaagaagaagaaaagaaaagttttgatcagacacttgaaatattaaagaacaaatttataactatgagatttaaaagggaacatgcacaaactgtgtttgatcattatatgcaagagaaaaaagactgtgaagagagaatctttgaggaagatcagagatttagagtgctccttgctgtaagacaaaaaactcttcaagatacccaaaaaataatagctgattcacttgaagaaaatctgcgtttagctcaagagtatcaacagctacagattacattcttaaaagaaaaggacaattatttcaatatatatgataaacagctatcacttgatacttcaattagagataagaaacagctctgtcagctgcagagaaggatgcacacactgtggcaggagcacttcaaactggtggtcctcttcagccagatgaggctggccaacttccagacagactctcaggagagtattcagaaaatattagctgtgcagaaccagtatgatttggaaaaagaataaaattgcttttaaagtacaaaaataattatgaaccacttcaaacgtaatgtctgtgttttatttctcatcagaattcattagtgtgtagcatcaataatttagcccatcatttgccaacactgacttggctcagtagttcaatcatgtaaccctgtaaactcactttccattaaaatgaatgttgctgacaaa

SEQ ID NO: 120921 - DNA, 1700 bp, Homo sapiens
  Payload ID: 3695
  Gene Symbol: CCDC178
  Gene Name: coiled-coil domain containing 178
  ENST ID: ENST00000581524
  CDS Start-End: 1-1095
aaaaaacttgagattgatattaacaaaataacagtaaaaaccaatgaaagcatacggaaaaaatcaaaatacgaatctgaaataaaatatttgacaataatgaagttaaagaatgataaacatctcaagaacatctataaggaggcttatcgcattggtactcttttccacctaaccaaacacaagacagatgaaatggaagataaaatagcagaagtgagaagaaagttcaagggtagagaagaattcctgaaaaaactcactcaaggtgaagtggctgctggaatggtgcttcagaaaaaactatattccatttacgaagtccaggcacttgagcggaaagagcttataaaaaatagagcaatatgtgccatgtcactggcagaactacaggaacctctgcttcaactagaagatgaagctgaaagaatcagaagtctcgacaaagaacattctgttatgcttaataatataattgatcagaaagatcttattagaagaaaggtgggaaaagtaaagaaaaaattacgaaaaaaggggaagaaaacccttgatgcattaatagaaactgagagtaaacgctcagcaatttttaaagacctagaagcaactaaaagtaagacaatgattttttatgcaaaaataaatgaattgaatgaggaattaaaagcaaaagaagaagaaaagaaaagttttgatcagacacttgaaatattaaagaacaaatttataactatgagatttaaaagggaacatgcacaaactgtgtttgatcattatatgcaagagaaaaaagactgtgaagagagaatctttgaggaagatcagagatttagagtgctccttgctgtaagacaaaaaactcttcaagatacccaactctgtcagctgcagagaaggatgcacacactgtggcaggagcacttcaaactggtggtcctcttcagccagatgaggctggccaacttccagacagactctcaggagagtattcagaaaatattagctgtgcaggaggaatcttcaaatttaatgcaacacatcttaggtttcttccagactttgacagatggcacatgcgaaaacgatggttaagcaaacaaccaatgtatcttggatgctgaaataaaagacaagaaaagtcacacagttcagataacagtgtaattggacattcacctgtttgccatttcacacttccatgaacgaaaaactcactcacctcccagcatgctttgccactcttttactcacagcaaatccataacaatgaaacaggtgactttcatgctgctgtcaggaacgatctaatttcagctctgggtgactgattgcaattggctttgcctcatctgataattaatctatgtcaccattaattggaagagagaataattactggcggtgttgacagtgactgttcgcttccccagatttccctatcgtcttggcccaaataaaggctttgccattcagtacttaaagtttgtgtaaactgtaacaatatctatgcccatgtgacactttgagacactctgtctaatgtacttttgtttttgtgtttaccagtcttttttagctcactgagagctgtctctctcaatcactcctcaatgttctatcttaattttgtggaagtttaaagttttcaatgagctggagatgaatgattaatgaataaatttaaatgcttcattttg

SEQ ID NO: 120922 - DNA, 604 bp, Homo sapiens
  Payload ID: 3695
  Gene Symbol: CCDC178
  Gene Name: coiled-coil domain containing 178
  ENST ID: ENST00000577766
  CDS Start-End: 294-604
gcatggagtcctggttgtatcatcccaagtggcaagaaagaaagaggtcctgcggtcctcccgaaggtggacgaagtctgtgatcccctcacgttctaacctcactgctgtacgaaggggcgttgactcgtctccactccttccctctccgtgtctgctcaatcaagtcaaatactgaacaacttcctggcggagaggctgagaattttatacttgcttgctcgaaagcaccccaaataagatgatccacgccaacacctcccctttacaggttttaaaatattcttataactatgactgaaaacaagacagtttcctcttcttccactagagatgatcaaaccaatataggtttaacatgtcaggaagtaaaggctctcagagagaaggcatggtcaaggacaaatgaaggcaatgccatgtctcaaagtttggttctatatggagcctctaaggagaacagtgaaggttttcatgaaagtaaaatgacaaatactgaaggggtgaataaaggcatttactttagctacccatgtcgacgtcacagctgtgccgtagtaaatattccagcaccttgtgtcaacaaaatgatttcacacatcca

SEQ ID NO: 120923 - DNA, 3094 bp, Homo sapiens
  Payload ID: 3695
  Gene Symbol: CCDC178
  Gene Name: coiled-coil domain containing 178
  ENST ID: ENST00000583930
  CDS Start-End: 80-2755
tgcttgctcgaaagcaccccaaataagatgatccacgccaacacctcccctttacaggttttaaaatattcttataactatgactgaaaacaagacagtttcctcttcttccactagagatgatcaaaccaatataggtttaacatgtcaggaagtaaaggctctcagagagaaggcatggtcaaggacaaatgaaggcaatgccatgtctcaaagtttggttctatatggagcctctaaggagaacagtgaaggttttcatgaaagtaaaatgacaaatactgaaggggtgaataaaggcatttactttagctacccatgtcgacgtcacagctgtgccgtagtaaatattccagcaccttgtgtcaacaaaatgatttcacacatccaagatgtggagtccaaaatacaggagcatttgaaaaggtttgaaacttcttttgaagaatggagcagaacttcttccacaaaagacctgaaagaagattggagtgtaactacaccagtgaaagaggtcaaaccaggagaaaagagagatgaaaagtgtccagagttaaagcaggaaatggaaacattgctctcagaggccattcgtctcattaaaagtctagaaactgaccgggcagacgctgaagaagctttaaaacaacagagatcaagaaagaatatgattaacatgaaaattgactcttggtcagtctggaaacttcaagaactcccattggctgtgcagaaagaacatgaggcctatttgagtgatgttatagaattacaatggcatcttgaagataaagctaatcaactacaacattttgaaaaacaaaagacagagttagaagaagcaaatgcaaagattcaagcagacatagactacatgaatgaacatggccctctactggactctaagcagaatcaggaacttcaagatctgaagaaccattataaaaaaaaaatggaggtaatggacctacacagaaaagttaatgaagaacttgaagaagctttagaagcctgtgaaaatgccagattgaaggctcagcaaattaaagaagagattgataaggatatttaccaggatgaaaaaaccatagaggcctacaagagagagatatatcaacttaacagtctatttgatcattactcttcatcagtgataaatgttaatactaatattgaggagaaggaagaggaagtgactgaagcaataagggaaacaaagtcatcaaaaaatgaattacattctctatcaaaaatgctggaagatttgagaagagtttatgaccaactaacctggaagcaaaaaagtcatgaaaatcagtatctggaagcagttaatgatttttatgctgcaaaaaaaacatgggatattgagctttctgatgttgcaaaagatttttcagctatttctttggcatgtacaaaactgacggaagacaataaaaaacttgagattgatattaacaaaataacagtaaaaaccaatgaaagcatacggaaaaaatcaaaatacgaatctgaaataaaatatttgacaataatgaagttaaagaatgataaacatctcaagaacatctataaggaggcttatcgcattggtactcttttccacctaaccaaacacaagacagatgaaatggaagataaaatagcagaagtgagaagaaagttcaagggtagagaagaattcctgaaaaaactcactcaaggtgaagtggctgctggaatggtgcttcagaaaaaactatattccatttacgaagtccaggcacttgagcggaaagagcttataaaaaatagagcaatatgtgccatgtcactggcagaactacaggaacctctgcttcaactagaagatgaagctgaaagaatcagaagtctcgacaaagaacattctgttatgcttaataatataattgatcagaaagatcttattagaagaaaggtgggaaaagtaaagaaaaaattacgaaaaaaggggaagaaaacccttgatgcattaatagaaactgagagtaaacgctcagcaatttttaaagacctagaagcaactaaaagtaagacaatgattttttatgcaaaaataaatgaattgaatgaggaattaaaagcaaaagaagaagaaaagaaaagttttgatcagacacttgaaatattaaagaacaaatttataactatgagatttaaaagggaacatgcacaaactgtgtttgatcattatatgcaagagaaaaaagactgtgaagagagaatctttgaggaagatcagagatttagagtgctccttgctgtaagacaaaaaactcttcaagatacccaaaaaataatagctgattcacttgaagaaaatctgcgtttagctcaagagtatcaacagctacagattacattcttaaaagaaaaggacaattatttcaatatatatgataaacagctatcacttgatacttcaattagagataagaaacaggttgcaggcttcttacctaagaaacttccaaactctctgccaattatatcagatgaactctcaaattttcagctctgtcagctgcagagaaggatgcacacactgtggcaggagcacttcaaactggtggtcctcttcagccagatgaggctggccaacttccagacagactctcaggagagtattcagaaaatattagctgtgcaggaggaatcttcaaatttaatgcaacacatcttaggtttcttccagactttgacagatggcacatgcgaaaacgatggttaagcaaacaaccaatgtatcttggatgctgaaataaaagacaagaaaagtcacacagttcagataacagtgtaattggacattcacctgtttgccatttcacacttccatgaacgaaaaactcactcacctcccagcatgctttgccactcttttactcacagcaaatccataacaatgaaacaggtgactttcatgctgctgtcaggaacgatctaatttcagctctgggtgactgattgcaattggctttgcctcatctgataattaatctatgtcaccattaattggaagagagaataattactggcggtgttgacagtgactgttcgcttccccaga

SEQ ID NO: 120924 - DNA, 876 bp, Homo sapiens
  Payload ID: 3695
  Gene Symbol: CCDC178
  Gene Name: coiled-coil domain containing 178
  ENST ID: ENST00000581852
  CDS Start-End: 49-267
aacttgctctgcaaaataacaacccaggatcagattttccccttcctcatgctctgtcagctgcagagaaggatgcacacactgtggcaggagcacttcaaactggtggtcctcttcagccagatgaggctggccaacttccagacagactctcaggagagtattcagaaaatattagctgtgcaggaggaatcttcaaatttaatgcaacacatcttaggtttcttccagactttgacagatggcacatgcgaaaacgatggttaagcaaacaaccaatgtatcttggatgctgaaataaaagacaagaaaagtcacacagttcagataacagtgtaattggacattcacctgtttgccatttcacacttccatgaacgaaaaactcactcacctcccagcatgctttgccactcttttactcacagcaaatccataacaatgaaacaggtgactttcatgctgctgtcaggaacgatctaatttcagctctgggtgactgattgcaattggctttgcctcatctgataattaatctatgtcaccattaattggaagagagaataattactggcggtgttgacagtgactgttcgcttccccagatttccctatcgtcttggcccaaataaaggctttgccattcagtacttaaagtttgtgtaaactgtaacaatatctatgcccatgtgacactttgagacactctgtctaatgtacttttgtttttgtgtttaccagtcttttttagctcactgagagctgtctctctcaatcactcctcaatgttctatcttaattttgtggaagtttaaagttttcaatgagctggagatgaatgattaatgaataaatttaaatgcttcattttgtcca

SEQ ID NO: 120925 - DNA, 791 bp, Homo sapiens
  Payload ID: 3696
  Gene Symbol: CCDC179
  Gene Name: coiled-coil domain containing 179
  Uniprot ID: H3BU77
  ENST ID: ENST00000532798
  CDS Start-End: 6-212
acggcatgtgcctgtattgctgggacatcgagccttcccaagtcaaccctgaaggaccaagacaacatcatccttcagaggtcactgagcggcagcttgcaaataaacgtattcagaatatgcaacacctaaagaaagagaagaggagactgaataaaaggttttcaaggccttctcctattccagaaccaggactcctatggtcatcttgataaagcaggagtctatttgaaggaaaccatgctccagacagaaatatgtggattgtgaacatcaagtgacatatcatgaattgatcatccacaaaataaatgcaatactccaccatttcggaaaaataaacacagtgcaagtatttaatatccaagctacaggctctagaattttattaaatgccatctctcactaccatatttttctttcctgtggtaaacttgaaatttgctgcttttcaacaaataataatgaatatgtataggtagacttttgaaaaatattattctcatttaaatttttgcaaatgttttatgacatatttagatgtttagaagtatgttataataatagaacaccagatttcctctgctgtatatttataatgacttccatttaaacaaaatgtttaaatactttaaacagtcctaggagactgttattataactaactcctgtattttgtgttgctattgcagataagccatagtgtaattaaaatttccatttaaggtaaaatttgaatattgaattaaaattttacttttaggtatgaaataaattataattattgctga

SEQ ID NO: 120926 - DNA, 4867 bp, Homo sapiens
  Payload ID: 3697
  Gene Symbol: CCDC18
  Gene Name: coiled-coil domain containing 18
  Uniprot ID: Q5T9S5
  ENST ID: ENST00000343253
  CDS Start-End: 503-4867
agcgggctggcttcctgaacggccctcgcctcttcaccaccagggccgtccaccagaagtttctaaacgggtgagaggcgacaacgcagtgcagctgggttaaaggaaggaggctggtttatcctccgcacttacttggtactcgatctccagcgaggccttcaggggcatgggctggtagaagcactccttctggccggcgggaagggtaaaggtgaagtcgctatcgagggaaggtgtgaagccggccgccccaggcagcagcaccggaggcagagcggccagaaggagcacggggaagggcagccagatcttgtcgcccatccctgctggggcgatcccgggctgaaagaggcgtcaggtactgttgtctccgctccgcgtttcctctctggactcctcgtggttgacagggaaatctggagtctgaagaaactccaggtggcggccgcggcggcggcgaacactccctccgaaagagaagcgcagttctccaaaggaaatggaatctagttcatcagactactataataaagacaatgaagaggaaagtttgcttgcaaatgttgcttccttaagacatgaactgaagataacagaatggagtttgcagagtttaggggaagagttatccagtgttagtccaagtgaaaattctgattatgcccctaatccttcaaggtctgaaaagctaattttggatgttcagcctagccaccctggacttttgaattattcaccttatgaaaacgtctgtaaaatatctggtagcagcactgattttcaaaaaaagccaagagataagatgttttcatcttctgcccctgtggatcaggagattaaaagccttcgagagaaactaaataaacttaggcaacagaatgcttgtttggtcacacagaatcattccttaatgactaaatttgaatctattcactttgaattaacacagtcaagagcaaaagtttctatgcttgagtctgctcaacagcaggcagccagtgtcccaatcttagaagaacagattataaatttggaagcagaggtttcagctcaagataaagttttgagagaggcagaaaataagctggaacagagccagaaaatggtaattgaaaaggaacagagtttgcaggagtccaaagaggaatgtataaaattaaaggtggacttacttgaacaaaccaaacaaggaaaaagagctgaacgacaaaggaatgaagcactatataatgccgaagagctgagtaaagctttccaacaatataaaaaaaaagtggctgaaaaactggaaaaggttcaagctgaagaagaaatattagagagaaatctaactaactgtgaaaaagaaaataaaaggctacaagaaaggtgtggtctatataaaagtgaacttgaaattctgaaagagaaattaaggcagttaaaagaagaaaataacaacggaaaagaaaaattaaggatcatggcagtgaaaaattcagaagtcatggcacaactaactgaatctagacaaagtattttgaagctagagagtgagttagagaacaaagacgaaatacttagagacaaattttctttaatgaatgaaaaccgagaattaaaggtccgtgttgcagcacagaatgagcgactagatttatgtcaacaagaaattgaaagttcaagggtagaactaagaagtttggaaaagattatatcccagttgccattaaaaagagaattatttggctttaaatcatatctttctaaataccagatgagtagcttctcaaacaaggaagaccgttgcattggctgctgtgaggcaaataaattggtgatttcggaattgagaattaagcttgcaataaaagaggcagaaattcaaaagcttcatgcaaacctgactgcaaatcagttatctcagagtcttattacttgtaatgacagccaagaaagtagcaaattaagtagtttagaaacagaacctgtaaagctaggtggtcatcaagtagaaagcgtaaaagatcaaaatcaacatactatgaacaagcaatatgaaaaagagaggcaaagacttgttactggaatagaagaactacgtactaagctgatacaaatagaagctgaaaattctgatttgaaggttaacatggctcacagaactagtcagtttcagctgattcaagaggagctgctagagaaagcttcaaactccagcaaactggaaagtgaaatgacaaagaaatgttctcaacttttaactcttgagaaacagctggaagaaaagatagttgcttattcctctattgctgcaaaaaatgcagaactagaacaggagcttatggaaaagaatgaaaagataaggagtctagaaaccaatattaatacagagcatgagaaaatttgtttagcctttgaaaaagcaaagaaaattcacttggaacagcataaagaaatggaaaagcagattgaaagacttgaagctcaactagagaaaaaggaccaacaatttaaagaacaagaaaagactatgtccatgttgcaacaagatataatatgcaaacaacatcatcttgaatcactagatagactcttgacggaaagcaaaggggaaatgaaaaaggaaaatatgaagaaagatgaagctttaaaagcattacagaaccaagtatctgaagaaacaatcaaggttaggcaactagattcagcattggaaatttgtaaggaagaacttgtcttgcatttgaatcaattggaaggaaataaggaaaagtttgaaaaacagttaaagaagaaatctgaagaggtatattgtttacagaaagagctaaagataaaaaatcacagtcttcaagagacttctgagcaaaacgttattctacagcatactcttcagcaacagcagcaaatgttacaacaagagacaattagaaatggagagctagaagatactcaaactaaacttgaaaaacaggtgtcaaaactggaacaagaacttcaaaaacaaagggaaagttcagctgaaaagttgagaaaaatggaggagaaatgtgaatcagctgcacatgaagcagatttgaaaaggcaaaaagtgattgagcttactggcactgccaggcaagtaaagattgagatggatcagtacaaagaagagctgtctaaaatggaaaaggaaataatgcacctaaaacgagatggagaaaataaagcaatgcacctctctcaattagatatgatcttagatcagacaaagacagagctagaaaagaaaacaaatgctgtaaaggagttagaaaagttacagcacagtactgaaactgaactaacagaagccttgcaaaaacgggaagtacttgagactgaactacaaaatgctcatggagaattaaaaagtactttaagacaactccaggaattgagagatgtactacagaaggctcaattatcattagaggaaaaatacactactataaaggatctcacagctgaacttagagaatgcaagatggagattgaagacaaaaagcaggagctccttgaaatggatcaggcacttaaagagagaaattgggaactaaagcaaagagcagctcaggttacacatttggatatgactattcgtgagcacagaggagaaatggaacaaaaaataattaaattagaaggtactctggagaaatcagaattggaacttaaagaatgtaacaaacagatagaaagtctgaatgacaaattacaaaatgctaaagaacagcttcgagaaaaagagtttataatgctacaaaatgaacaggagataagtcaactgaaaaaagaaattgaaagaacacaacaaaggatgaaagaaatggagagtgttatgaaagagcaagaacagtacattgccactcagtacaaggaggccatagatttggggcaagaattgaggctgacccgggagcaggtgcagaactctcatacagaattggcagaggctcgtcatcagcaagtccaagcacagagagaaatagaaaggctctctagtgaactggaggatatgaagcaactctctaaagagaaagatgctcatggaaaccatttagctgaagaactgggggcttctaaagtacgtgaagctcatttagaagcaagaatgcaagcagaaatcaagaaattgtcagcagaagtagaatctctcaaagaagcttatcatatggagatgatttcacatcaagagaaccatgcaaagtggaagatttctgctgactctcaaaagtcttctgttcagcaactaaacgaacagttagagaaggcaaaattggaattagaagaagctcaggatactgtaagcaatttgcatcaacaagtccaagataggaatgaagtaattgaagctgcaaatgaagcattacttactaaagaatcagaattaaccagattacaggccaaaatttctggacatgaaaaggcagaagacatcaagtttctgccagccccatttacatctccaacagaaattatgcctgatgttcaagatccaaaatttgctaaatgttttcacacatctttttccaagtgtacaaaattacgtcgctctattagtgccagtgatcttactttcaaaattcatggtgatgaagatctttctgaagaattactacaggacttaaagaaaatgcaattagaacagccttcaacattagaagaaagccataagaatctgacttacacccagccagactcatttaaacctctcacatataacctagaagctgatagttctgagaataatgactttaacacgcttagtgggatgctaagatacataaacaaagaagtaagactattaaaaaagtcttctatgcaaacaggtgctggtttaaatcagggagaaaatgtgtaa

SEQ ID NO: 120927 - DNA, 4779 bp, Homo sapiens
  Payload ID: 3697
  Gene Symbol: CCDC18
  Gene Name: coiled-coil domain containing 18
  ENST ID: ENST00000370276
  CDS Start-End: 1-4526
ggttcgaattctgtgctgccggggttcgctggttctccgagttgtgtccgaggcttccacgcgcaggggcccgggaaagggtcagaggcttcctaacgcagactcgagtgcgaagcgcgcagtcgccgggtgggtctctccccagcgacgatttgggtgaaatggaatctagttcatcagactactataataaagacaatgaagaggaaagtttgcttgcaaatgttgcttccttaagacatgaactgaagataacagaatggagtttgcagagtttaggggaagagttatccagtgttagtccaagtgaaaattctgattatgcccctaatccttcaaggtctgaaaagctaattttggatgttcagcctagccaccctggacttttgaattattcaccttatgaaaacgtctgtaaaatatctggtagcagcactgattttcaaaaaaagccaagagataagatgttttcatcttctgcccctgtggatcaggagattaaaagccttcgagagaaactaaataaacttaggcaacagaatgcttgtttggtcacacagaatcattccttaatgactaaatttgaatctattcactttgaattaacacagtcaagagcaaaagtttctatgcttgagtctgctcaacagcaggcagccagtgtcccaatcttagaagaacagattataaatttggaagcagaggtttcagctcaagataaagttttgagagaggcagaaaataagctggaacagagccagaaaatggtaattgaaaaggaacagagtttgcaggagtccaaagaggaatgtataaaattaaaggtggacttacttgaacaaaccaaacaaggaaaaagagctgaacgacaaaggaatgaagcactatataatgccgaagagctgagtaaagctttccaacaatataaaaaaaaagtggctgaaaaactggaaaaggttcaagctgaagaagaaatattagagagaaatctaactaactgtgaaaaagaaaataaaaggctacaagaaaggtgtggtctatataaaagtgaacttgaaattctgaaagagaaattaaggcagttaaaagaagaaaataacaacggaaaagaaaaattaaggatcatggcagtgaaaaattcagaagtcatggcacaactaactgaatctagacaaagtattttgaagctagagagtgagttagagaacaaagacgaaatacttagagacaaattttctttaatgaatgaaaaccgagaattaaaggtccgtgttgcagcacagaatgagcgactagatttatgtcaacaagaaattgaaagttcaagggtagaactaagaagtttggaaaagattatatcccagttgccattaaaaagagaattatttggctttaaatcatatctttctaaataccagatgagtagcttctcaaacaaggaagaccgttgcattggctgctgtgaggcaaataaattggtgatttcggaattgagaattaagcttgcaataaaagaggcagaaattcaaaagcttcatgcaaacctgactgcaaatcagttatctcagagtcttattacttgtaatgacagccaagaaagtagcaaattaagtagtttagaaacagaacctgtaaagctaggtggtcatcaagtagaaagcgtaaaagatcaaaatcaacatactatgaacaagcaatatgaaaaagagaggcaaagacttgttactggaatagaagaactacgtactaagctgatacaaatagaagctgaaaattctgatttgaaggttaacatggctcacagaactagtcagtttcagctgattcaagaggagctgctagagaaagcttcaaactccagcaaactggaaagtgaaatgacaaagaaatgttctcaacttttaactcttgagaaacagctggaagaaaagatagttgcttattcctctattgctgcaaaaaatgcagaactagaacaggagcttatggaaaagaatgaaaagataaggagtctagaaaccaatattaatacagagcatgagaaaatttgtttagcctttgaaaaagcaaagaaaattcacttggaacagcataaagaaatggaaaagcagattgaaagacttgaagctcaactagagaaaaaggaccaacaatttaaagaacaagaaaagactatgtccatgttgcaacaagatataatatgcaaacaacatcatcttgaatcactagatagactcttgacggaaagcaaaggggaaatgaaaaaggaaaatatgaagaaagatgaagctttaaaagcattacagaaccaagtatctgaagaaacaatcaaggttaggcaactagattcagcattggaaatttgtaaggaagaacttgtcttgcatttgaatcaattggaaggaaataaggaaaagtttgaaaaacagttaaagaagaaatctgaagaggtatattgtttacagaaagagctaaagataaaaaatcacagtcttcaagagacttctgagcaaaacgttattctacagcatactcttcagcaacagcagcaaatgttacaacaagagacaattagaaatggagagctagaagatactcaaactaaacttgaaaaacaggtgtcaaaactggaacaagaacttcaaaaacaaagggaaagttcagctgaaaagttgagaaaaatggaggagaaatgtgaatcagctgcacatgaagcagatttgaaaaggcaaaaagtgattgagcttactggcactgccaggcaagtaaagattgagatggatcagtacaaagaagagctgtctaaaatggaaaaggaaataatgcacctaaaacgagatggagaaaataaagcaatgcacctctctcaattagatatgatcttagatcagacaaagacagagctagaaaagaaaacaaatgctgtaaaggagttagaaaagttacagcacagtactgaaactgaactaacagaagccttgcaaaaacgggaagtacttgagactgaactacaaaatgctcatggagaattaaaaagtactttaagacaactccaggaattgagagatgtactacagaaggctcaattatcattagaggaaaaatacactactataaaggatctcacagctgaacttagagaatgcaagatggagattgaagacaaaaagcaggagctccttgaaatggatcaggcacttaaagagagaaattgggaactaaagcaaagagcagctcaggttacacatttggatatgactattcgtgagcacagaggagaaatggaacaaaaaataattaaattagaaggtactctggagaaatcagaattggaacttaaagaatgtaacaaacagatagaaagtctgaatgacaaattacaaaatgctaaagaacagcttcgagaaaaagagtttataatgctacaaaatgaacaggagataagtcaactgaaaaaagaaattgaaagaacacaacaaaggatgaaagaaatggagagtgttatgaaagagcaagaacagtacattgccactcagtacaaggaggccatagatttggggcaagaattgaggctgacccgggagcaggtgcagaactctcatacagaattggcagaggctcgtcatcagcaagtccaagcacagagagaaatagaaaggctctctagtgaactggaggatatgaagcaactctctaaagagaaagatgctcatggaaaccatttagctgaagaactgggggcttctaaagtacgtgaagctcatttagaagcaagaatgcaagcagaaatcaagaaattgtcagcagaagtagaatctctcaaagaagcttatcatatggagatgatttcacatcaagagaaccatgcaaagtggaagatttctgctgactctcaaaagtcttctgttcagcaactaaacgaacagttagagaaggcaaaattggaattagaagaagctcaggatactgtaagcaatttgcatcaacaagtccaagataggaatgaagtaattgaagctgcaaatgaagcattacttactaaagaatcagaattaaccagattacaggccaaaatttctggacatgaaaaggcagaagacatcaagtttctgccagccccatttacatctccaacagaaattatgcctgatgttcaagatccaaaatttgctaaatgttttcacacatctttttccaagtgtacaaaattacgtcgctctattagtgccagtgatcttactttcaaaattcatggtgatgaagatctttctgaagaattactacaggacttaaagaaaatgcaattagaacagccttcaacattagaagaaagccataagaatctgacttacacccagccagactcatttaaacctctcacatataacctagaagctgatagttctgagaataatgactttaacacgcttagtgggatgctaagatacataaacaaagaagtaagactattaaaaaagtcttctatgcaaacaggtgctggtttaaatcagggagaaaatgtgtaattcaaagaagatactgatgtgttgaaaaaatggaatttttggtactgtgctgtttacttattatatgtagctcatacttcatagaagctgttattttgcttttgaataaattttatatttcaatattttaaaagaaagcccttctaaaacttaattatatttttaaagaaaatttattattttatttattgttttttggcttaaacttgctgctttcttttgctttttatataaaaatcattgttaaaatgca

SEQ ID NO: 120928 - DNA, 4552 bp, Homo sapiens
  Payload ID: 3697
  Gene Symbol: CCDC18
  Gene Name: coiled-coil domain containing 18
  ENST ID: ENST00000401026
  CDS Start-End: 523-4422
gcggccgcggcggcggcgaacactccctccgaaagagaagcgcagttctccaaagggtagggactctgggcggggctagcagtcctattccgcaaccgcctcagtctcggccccctcaggccaggcgtgagcgccgcccgcctctccccctgacggcctccggttcccatggcttcccccaccaatgggcatcatggcggtaattgtgggaaatgtagtcccgggcgggctccgctagtgggctcgggcgcgctcgccgaccacgatccccggcaagccccgcgccttcggcggcgcctcacgcagtctgcgccggggcggggcagtgaccgggtaggcgcgtcccaacggctcccgcggcggttcgaattctgtgctgccggggttcgctggttctccgagttgtgtccgaggcttccacgcgcaggggcccgggaaagggtcagaggcttcctaacgcagactcgagtgcgaagcgcgcagtcgccgggtgggtctctccccagcgacgatttgggtgaaatggaatctagttcatcagactactataataaagacaatgaagaggaaagtttgcttgcaaatgttgcttccttaagacatgaactgaagataacagaatggagtttgcagagtttaggggaagagttatccagtgttagtccaagtgaaaattctgattatgcccctaatccttcaaggtctgaaaagctaattttggatgttcagcctagccaccctggacttttgaattattcaccttatgaaaacgtctgtaaaatatctggtagcagcactgattttcaaaaaaagccaagagataagatgttttcatcttctgcccctgtggatcaggagattaaaagccttcgagagaaactaaataaacttaggcaacagaatgcttgtttggtcacacagaatcattccttaatgactaaatttgaatctattcactttgaattaacacagtcaagagcaaaagtttctatgcttgagtctgctcaacagcaggcagccagtgtcccaatcttagaagaacagattataaatttggaagcagaggtttcagctcaagataaagttttgagagaggcagaaaataagctggaacagagccagaaaatggtaattgaaaaggaacagagtttgcaggagtccaaagaggaatgtataaaattaaaggtggacttacttgaacaaaccaaacaaggaaaaagagctgaacgacaaaggaatgaagcactatataatgccgaagagctgagtaaagctttccaacaatataaaaaaaaagtggctgaaaaactggaaaaggttcaagctgaagaagaaatattagagagaaatctaactaactgtgaaaaagaaaataaaaggctacaagaaaggtgtggtctatataaaagtgaacttgaaattctgaaagagaaattaaggcagttaaaagaagaaaataacaacggaaaagaaaaattaaggatcatggcagtgaaaaattcagaagtcatggcacaactaactgaatctagacaaagtattttgaagctagagagtgagttagagaacaaagacgaaatacttagagacaaattttctttaatgaatgaaaaccgagaattaaaggtccgtgttgcagcacagaatgagcgactagatttatgtcaacaagaaattgaaagttcaagggtagaactaagaagtttggaaaagattatatcccagttgccattaaaaagagaattatttggctttaaatcatatctttctaaataccagatgagtagcttctcaaacaaggaagaccgttgcattggctgctgtgaggcaaataaattggtgatttcggaattgagaattaagcttgcaataaaagaggcagaaattcaaaagcttcatgcaaacctgactgcaaatcagttatctcagagtcttattacttgtaatgacagccaagaaagtagcaaattaagtagtttagaaacagaacctgtaaagctaggtggtcatcaagtagcagaaagcgtaaaagatcaaaatcaacatactatgaacaagcaatatgaaaaagagaggcaaagacttgttactggaatagaagaactacgtactaagctgatacaaatagaagctgaaaattctgatttgaaggttaacatggctcacagaactagtcagtttcagctgattcaagaggagctgctagagaaagcttcaaactccagcaaactggaaagtgaaatgacaaagaaatgttctcaacttttaactcttgagaaacagctggaagaaaagatagttgcttattcctctattgctgcaaaaaatgcagaactagaacaggagcttatggaaaagaatgaaaagataaggagtctagaaaccaatattaatacagagcatgagaaaatttgtttagcctttgaaaaagcaaagaaaattcacttggaacagcataaagaaatggaaaagcagattgaaagacttgaagctcaactagagaaaaaggaccaacaatttaaagaacaagaaaagactatgtccatgttgcaacaagatataatatgcaaacaacatcatcttgaatcactagatagactcttgacggaaagcaaaggggaaatgaaaaaggaaaatatgaagaaagatgaagctttaaaagcattacagaaccaagtatctgaagaaacaatcaaggttaggcaactagattcagcattggaaatttgtaaggaagaacttgtcttgcatttgaatcaattggaaggaaataaggaaaagtttgaaaaacagttaaagaagaaatctgaagaggtatattgtttacagaaagagctaaagataaaaaatcacagtcttcaagagacttctgagcaaaacgttattctacagcatactcttcagcaacagcagcaaatgttacaacaagagacaattagaaatggagagctagaagatactcaaactaaacttgaaaaacaggtgtcaaaactggaacaagaacttcaaaaacaaagggaaagttcagctgaaaagttgagaaaaatggaggagaaatgtgaatcagctgcacatgaagcagatttgaaaaggcaaaaagtgattgagcttactggcactgccaggcaagtaaagattgagatggatcagtacaaagaagagctgtctaaaatggaaaaggaaataatgcacctaaaacgagatggagaaaataaagcaatgcacctctctcaattagatatgatcttagatcagacaaagacagagctagaaaagaaaacaaatgctgtaaaggagttagaaaagttacagcacagtactgaaactgaactaacagaagccttgcaaaaacgggaagtacttgagactgaactacaaaatgctcatggagaattaaaaagtactttaagacaactccaggaattgagagatgtactacagaaggctcaattatcattagaggaaaaatacactactataaaggatctcacagctgaacttagagaatgcaagatggagattgaagacaaaaagcaggagctccttgaaatggatcaggcacttaaagagagaaattgggaactaaagcaaagagcagctcaggttacacatttggatatgactattcgtgagcacagaggagaaatggaacaaaaaataattaaattagaaggtactctggagaaatcagaattggaacttaaagaatgtaacaaacagatagaaagtctgaatgacaaattacaaaatgctaaagaacagcttcgagaaaaagagtttataatgctacaaaatgaacaggagataagtcaactgaaaaaagaaattgaaagaacacaacaaaggatgaaagaaatggagagtgttatgaaagagcaagaacagtacattgccactcagtacaaggaggccatagatttggggcaagaattgaggctgacccgggagcaggtgcagaactctcatacagaattggcagaggctcgtcatcagcaagtccaagcacagagagaaatagaaaggctctctagtgaactggaggatatgaagcaactctctaaagagaaagatgctcatggaaaccatttagctgaagaactgggggcttctaaagtacgtgaagctcatttagaagcaagaatgcaagcagaaatcaagaaattgtcagcagaagtagaatctctcaaagaagcttatcatatggagatgatttcacatcaagagaaccatgcaaagtggaagatttctgctgactctcaaaagtcttctgttcagcaactaaacgaacagttagagaaggcaaaattggaattagaagaagctcaggatactgtaagcaatttgcatcaacaagtccaagataggaatgaagtaattgaagctgcaaatgaagcattacttactaaaggagaaaatgtgtaattcaaagaagatactgatgtgttgaaaaaatggaatttttggtactgtgctgtttacttattatatgtagctcatacttcatagaagctgttattttgcttttgaataaattttatatttcaatatttta

SEQ ID NO: 120929 - DNA, 2161 bp, Homo sapiens
  Payload ID: 3697
  Gene Symbol: CCDC18
  Gene Name: coiled-coil domain containing 18
  ENST ID: ENST00000455267
  CDS Start-End: 1-2161
gaaaaagaaaataaaaggctacaagaaaggtgtggtctatataaaagtgaacttgaaattctgaaagagaaattaaggcagttaaaagaagaaaataacaacggaaaagaaaaattaaggatcatggcagtgaaaaattcagaagtcatggcacaactaactgaatctagacaaagtattttgaagctagagagtgagttagagaacaaagacgaaatacttagagacaaattttctttaatgaatgaaaaccgagaattaaaggtccgtgttgcagcacagaatgagcgactagatttatgtcaacaagaaattgaaagttcaagggtagaactaagaagtttggaaaagattatatcccagttgccattaaaaagagaattatttggctttaaatcatatctttctaaataccagatgagtagcttctcaaacaaggaagaccgttgcattggctgctgtgaggcaaataaattggtgatttcggaattgagaattaagcttgcaataaaagaggcagaaattcaaaagcttcatgcaaacctgactgcaaatcagttatctcagagtcttattacttgtaatgacagccaagaaagtagcaaattaagtagtttagaaacagaacctgtaaagctaggtggtcatcaagtagaaagcgtaaaagatcaaaatcaacatactatgaacaagcaatatgaaaaagagaggcaaagacttgttactggaatagaagaactacgtactaagctgatacaaatagaagctgaaaattctgatttgaaggttaacatggctcacagaactagtcagtttcagctgattcaagaggagctgctagagaaagcttcaaactccagcaaactggaaagtgaaatgacaaagaaatgttctcaacttttaactcttgagaaacagctggaagaaaagatagttgcttattcctctattgctgcaaaaaatgcagaactagaacaggagcttatgcttgaagctcaactagagaaaaaggaccaacaatttaaagaacaagaaaagactatgtccatgttgcaacaagatataatatgcaaacaacatcatcttgaatcactagatagactcttgacggaaagcaaaggggaaatgaaaaaggaaaatatgaagaaagatgaagctttaaaagcattacagaaccaagtatctgaagaaacaatcaaggttaggcaactagattcagcattggaaatttgtaaggaagaacttgtcttgcatttgaatcaattggaaggaaataaggaaaagtttgaaaaacagttaaagaagaaatctgaagaggtatattgtttacagaaagagctaaagataaaaaatcacagtcttcaagagacttctgagcaaaacgttattctacagcatactcttcagcaacagcagcaaatgttacaacaagagacaattagaaatggagagctagaagatactcaaactaaacttgaaaaacaggtgtcaaaactggaacaagaacttcaaaaacaaagggaaagttcagctgaaaagttgagaaaaatggaggagaaatgtgaatcagctgcacatgaagcagatttgaaaaggcaaaaagtgattgagcttactggcactgccaggcaagtaaagattgagatggatcagtacaaagaagagctgtctaaaatggaaaaggaaataatgcacctaaaacgagatggagaaaataaagcaatgcacctctctcaattagatatgatcttagatcagacaaagacagagctagaaaagaaaacaaatgctgtaaaggagttagaaaagttacagcacagtactgaaactgaactaacagaagccttgcaaaaacgggaagtacttgagactgaactacaaaatgctcatggagaattaaaaagtactttaagacaactccaggaattgagagatgtactacagaaggctcaattatcattagaggaaaaatacactactataaaggatctcacagctgaacttagagaatgcaagatggagattgaagacaaaaagcaggagctccttgaaatggatcaggcacttaaagagagaaattgggaactaaagcaaagagcagctcaggttacacatttggatatgactattcgtgagcacagaggagaaatggaacaaaaaa

SEQ ID NO: 120930 - DNA, 496 bp, Homo sapiens
  Payload ID: 3697
  Gene Symbol: CCDC18
  Gene Name: coiled-coil domain containing 18
  ENST ID: ENST00000448243
  CDS Start-End: 1-496
cccgcggcggttcgaattctgtgctgccggggttcgctggttctccgagttgtgtccgaggcttccacgcgcaggggcccgggaaagggtcagaggcttcctaacgcagactcgagtgcgaagcgcgcagtcgccggaaatggaatctagttcatcagactactataataaagacaatgaagaggaaagtttgcttgcaaatgttgcttccttaagacatgaactgaagataacagaatggagtttgcagagtttaggggaagagttatccagtgttagtccaagtgaaaattctgattatgcccctaatccttcaaggtctgaaaagctaattttggatgttcagcctagccaccctggacttttgaattattcaccttatgaaaacgtctgtaaaatatctggtagcagcactgattttcaaaaaaagccaagagataagatgttttcatcttctgcccctgtggatcaggagattaaaagccttcgagagaaa

SEQ ID NO: 120931 - DNA, 1751 bp, Homo sapiens
  Payload ID: 3697
  Gene Symbol: CCDC18
  Gene Name: coiled-coil domain containing 18
  ENST ID: ENST00000481180
  CDS Start-End: 1-1331
gtccgaggcttccacgcgcaggggcccgggaaagggtcagaggcttcctaacgcagactcgagtgcgaagcgcgcagtcgccgggtgggtctctccccagcgacgatttgggtgaaatggaatctagttcatcagactactataataaagacaatgaagaggaaagtttgcttgcaaatgttgcttccttaagacatgaactgaagataacagaatggagtttgcagagtttaggggaagagttatccagtgttagtccaagtgaaaattctgattatgcccctaatccttcaaggtctgaaaagctaattttggatgttcagcctagccaccctggacttttgaattattcaccttatgaaaacgtctgtaaaatatctggtagcagcactgattttcaaaaaaagccaagagataagatgttttcatcttctgcccctgtggatcaggagattaaaagccttcgagagaaactaaataaacttaggcaacagaatgcttgtttggtcacacagaatcattccttaatgactaaatttgaatctattcactttgaattaacacagtcaagagcaaaagtttctatgcttgagtctgctcaacagcaggcagccagtgtcccaatcttagaagaacagattataaatttggaagcagaggtttcagctcaagataaagttttgagagaggcagaaaataagctggaacagagccagaaaatggtaattgaaaaggaacagagtttgcaggagtccaaagaggaatgtataaaattaaaggtggacttacttgaacaaaccaaacaaggaaaaagagctgaacgacaaaggaatgaagcactatataatgccgaagagctgagtaaagctttccaacaatataaaaaaaaagtggctgaaaaactggaaaaggttcaagctgaagaagaaatattagagagaaatctaactaactgtgaaaaagaaaataaaaggctacaagaaaggtgtggtctatataaaagtgaacttgaaattctgaaagagaaattaaggcagttaaaagaagaaaataacaacggaaaagaaaaattaaggatcatggcagtgaaaaattcagaagtcatggcacaactaactgaatctagacaaagtattttgaagctagagagtgagttagagaacaaagacgaaatacttagagacaaattttctttaatgaatgaaaaccgagaattaaaggtccgtgttgcagcacagaatgagcgactagatttatgtcaacaagaaattgaaagttcaagggtagaactaagaagtttggaaaagattatatcccagttgccaaattaagcttgcaataaaagaggcagaaattcaaaagcttcatgcaaacctgactgcaaatcagttatctcagagtcttattacttgtaatgacagccaagaaagtagcaaattaagtagtttagaaacagaacctgtaaagctaggtggtcatcaagtagaaagcgtaaaagatcaaaatcaacatactatgaacaagcaatatgaaaaagagaggcaaagacttgttactggaatagaagaactacgtactaagctgatacaaatagaagctgaaaattctgatttgaaggttaacatggctcacagaactagtcagtttcagctgattcaagaggagctgctagagaaagcttcaaactccagcaaactggaaagtgaaatgacaaagaaatgttctcaacttttaactcttgagaaacagct

SEQ ID NO: 120932 - DNA, 541 bp, Homo sapiens
  Payload ID: 3697
  Gene Symbol: CCDC18
  Gene Name: coiled-coil domain containing 18
  ENST ID: ENST00000479653
  CDS Start-End: 1-288
tccgagttgtgtccgaggcttccacgcgcaggggcccgggaaagggtcagaggcttcctaacgcagactcgagtgcgaagcgcgcagtcgccggaaatggaatctagttcatcagactactataataaagacaatgaagaggaaagtttgcttgcaaatgttgcttccttaagacatgaactgaagataacagaatggagtttgcagagtttaggggaagagttatccagatgttttcatcttctgcccctgtggatcaggagattaaaagccttcgagagaaactaaataaacttaggcaacagaatgcttgtttggtcacacagaatcattccttaatgactaaatttgaatctattcactttgaattaacacagtcaagagcaaaagtttctatgcttgagtctgctcaacagcaggcagccagtgtcccaatcttagaagaacagattataaatttggaagcagaggtttcagctcaagataaagttttgagagaggcagaaaataagctggaacagagccagaaaatggtaattga

SEQ ID NO: 120933 - DNA, 5242 bp, Homo sapiens
  Payload ID: 3698
  Gene Symbol: CCDC180
  Gene Name: coiled-coil domain containing 180
  Uniprot ID: Q9P1Z9
  ENST ID: ENST00000529487
  CDS Start-End: 98-5203
gagcgccgttaacttttccccgaagagcatggcagagtgaagcacaagcaataatcctgtattattcgcgttcccagagtcccttcggatttgcgccatgcgcggcggggagaaccggcctcctgctcgagttcagagctcatctgaggaattggaattgagacaccaaagcctagacgcgtttcctggacgacggcttcccggcaggggcatccagccagcggccaagatgtcgtcagtggggaaggtgacccaggttccgaatgggaaagcctaccagcagatcttccaggctgaggtgcagctggtccactccctggcggccaccaggaagcgggctgcagagcgttctgtgaccctgaagagtggcaggatacccatgatgaagaaggtggagactcctgaaggggaggtgatgtctccccgacagcagaagtggatgcacagcctccccaacgactggatcatggaaaaccctgttctccacagggaaaaggaaagagccaagagggaaaaagcccgagagagtgagaacaccatcgctgcccgagaagtgcggggtctcatggatactatagttcctgagaagataagcaccagcacctttcaaaggcaagcagaacacaagaggaagagctacgagagcgctctggccagctttcaggaggagattgcgcaggtgggaaaggaaatggaacctctcatcgtggacacagggggactttttttgaagaagctgactgagtctgatgaagaaatgaaccgtctcttcctaaaggtggaaaatgacaccaaccttgaggactacaccatccaagccctgctggagctgtgggataaggtggccgggcggttactgctccggaagcaggagattaaggagctggatgaggccctgcactcgctggagttctcccgaaccgataaactaaaaagcgtgttgaagaaatatgcagaagtcatagagaaaacttcctacctcatgcggcccgaagtgtacaggctgataaatgaagaagccatggtcatgaactatgccctgctgggcaaccggaaggctctcgcccagctgtttgtcaacctgatggagtccaccctgcagcaggagctggacagccgccaccgctggcaaggcttggtggacacctggaaggctctcaagaaggaggccctgctgcagagtttcagtgagttcatggccagtgagagtatccatactcccccggctgtgacgaaggagctagaggtcatgctgaagacccagaacgtcctgcagcaaaggcggctgaagcatctctgcaccatctgtgacctcctgccccccagttacagcaaaactcagctgactgagtggcattcttccctcaactccctgaacaaggagctagacacctaccacgtggactgcatgatgcggatccgcctgctgtatgagaagacatggcaggagtgcctgatgcatgtgcagaattgtaagaagcagctgctggactggaaagccttcactgaggaggaggcagagaccctggtgaaccagttcttcttccagatggtgggagcactccagggcaaagtggaggaggacctggagctcttggacaaatccttcgagactctggcagatcagacagagtggcagagttcacacctcttcaagtatttccaggaggtggtacaactgtgggaggcacaccagagcgagctgttggtgcaggagctggagctggagaagaggatggagcagcaccggcagaagcacagcctggagagccaggtgcaggaggcccacctcgataggctcttggaccaactgaggcagcaaagtgacaaagaaacactggcgtttcacctggaaaaggtcaaagattatctgaagaacatgaaatccaggtatgaatgttttcacaccctcctgacaaaggaagtgatggagtacccagcgatcatgctgaaagaactcaactcctacagctctgccctcagccaatacttctttgtgcgtgaaatctttgaacagaacttggctggagaagtcattttcaaattcaggcaaccagaagcacatgaaaaaccctcccagaagagagtgaaaaaactgaggaagaagcaagggtctaaagaggacatgaccagaagtgaggaaagcataagtagtgggacaagtactgccaggtcagtagaagaggtggaagaagaaaacgatcaagaaatggagtccttcataactgaagaggtgctggggcagcagaaaaaatctccactgcatgctaagatggatgagtccaaagaaggctctattcagggactggaagaaatgcaggttgaaagagagggctccttaaacccatccctgaatgaggagaatgtgaagggtcaaggagaaaagaaggaggagtcagaggaggaagatgagaaggaggaagaggaggaggaggagaagctggaggaagagaaggaggagaaggaggcacaggaagagcaagagagtttatctgtgggtgaggaagaagacaaggaagagggtctagaggagatatactatgaggacatggagtccttcacaatctccagtggaaacacttattttgtctttgtacccctggaagaagagcattgtaggaagtcccattccaccttctcagccatgttcatcaacgacacttccagtgccaagttcatagaacaagtgacaattccatcgagactaattttagaaattaagaaacaacttcgagctggcttcttcgagcaccttgagaagtggtttgaccagtgttccctcaacacccgggtcaccgtggccaccaaaatcaatgagctggattcagaactggagctgcatctgcacctgcaccagccaagagcccagcagattgaaaaagacatccacaacgtcagggcagccgagcttttgcttcatcaagagcagttggacagccactgtgctggggtgaccgagacgctgaagaagaagcggctgatgttctgccagttccaagaagagcaaaacgtgaggagcaaaaacttccgccttaagatctatgacatggagcacatcttcttgaatgccaccaggagccaaaagctggtcactctcagcaacacactgcaccaggagttgcttagctatgttgatgtcacccaggtgtccctgcgcagcttccggcagtacttggaggagagtctgggcaaactccgctactcaaatattgagttcatcaaacactgcagattgttttcagagggaggcaacttttctcctaaagaaatcaattcactgtgttcccgactggagaaggaagctgcccggatagagttggttgaaagtgtcatcatgctcaacatggagaagttggagaatgagtacctggaccaggccaatgatgtcatcaacaagtttgaaagcaaattccataacctgtctgtggaccttattttcatagagaaaatccagcggttgctgacgaatctgcaagtgaaaatcaagtgccaggtggcaaaatccaattcgcaaacaaatggattaaatttctctctgcaacagcttcagaacaagataaaaacttgtcaagagtccaggggagagaaaaccacagtgaccacagaagaactcctcagcttcgtccaaacttggaaggaaaaactgagccagaggattcagtaccttaactgcagcctggacagggtgtccatgactgaactggtctttaccaacaccatcctgaaggaccaggaggaagacagtgacatcctgacatcttcagaagcccttgaagaggaggccaagctggacgtggtcacccctgagtccttcacccagctgagccgcgtggggaagcccctgattgaggacccagctgtggatgtgatcaggaagctcctgcaacttcccaacacaaaatggccaacccaccattgtgacaaagatccgtcccagacaggtagaggcgcatgggcctgtgggtctcggggcagcagtgaggcaggggctggtggtgctgtgtgctcacctcctgtcctctgctcctgtcctgggccctcgtcacccaaaggcttcaagcgacatcggtgccagccagaaaactctgggaagaaggctgtacccagtgccagtgctacctctgcaggcagcttcacaccgcaccccaagcccaacaaaatggagagaaagtaccgggtgcttggggacaagcctccccctgctgccgaggattttaaggggatcatcttgaccctcctctgggagagcagtgagaacctgctgacagtcgcagaggagttctaccgtaaagaaaaacgcccagtcaccaggcctgactgcatgtgtgacacctttgaccagtgcgccgagaacattagcaaaaagatcctggagtatcagagccaggcaaataagtaccacaactcctgcctcatagaattacggatccagatcaggagatttgaggagctgctgccccaagtgtgttggctggtgatggagaatttcaaggaacaccactggaaaaagtttttcacctctgtgaaggagatccgaggacagttcgaggaacagcagaagcggctggagaaaagaaaggacaaaaatgcccagaagctccatctaaatcttggacaccccgtacatttccaagaaatggagtctctacacttaagtgaagaggaaaggcaggaagagctggacagcatgattaggatgaacaaggagaagctggaggaatgtaccagaaggaatggccaggttttcataaccaacttggccaccttcaccgagaagttcctactgcagttggatgaggtggtcaccattgacgatgtccaggttgcaaggatggagccccccaaacagaaattatcaatgctcatacgaaggaaactcgctgggctctccctgaaggaagagagtgagaaacccctgattgaacgtggaagcaggaagtggccagggatcaaacccaccgaagtcaccatccaaaacaagattcttctccagccaacatcatcgatttccaccaccaaaaccaccctgggccacctggcggccgtggaagcccgagatgctgtgtacctgaaatatttagcatcatttgaggaggagctaaagaggatccaggatgactgtacatctcagataaaggaggctcagcgctggaaggacagctggaagcagtccctgcacactatccaaggcctgtatgtgtgaccctccgccccaccatgaataaacactttcttatacaga

SEQ ID NO: 120934 - DNA, 1914 bp, Homo sapiens
  Payload ID: 3699
  Gene Symbol: CCDC181
  Gene Name: coiled-coil domain containing 181
  Uniprot ID: Q5TID7
  ENST ID: ENST00000367805
  CDS Start-End: 211-1737
gctctcgtagttagagaggcccggatggaggacgcagaggcacgctgttgccatggcagtgtggtcctggctgccgcggaggcaggtgccggggtctcctttgcctcaatgtgaagagcttagaaagaggaggagaggagaactcccccggccatctctgtgatcccagccgccgcattttacacagcatatttccttcacaaacagaaaatgaatgaaaataaagatactgattcaaagaaaagtgaagaatacgaagatgactttgaaaaggacctggagtggttaattaatgaaaatgaaaaaagtgatgccagcataatagagatggcttgtgagaaggaagagaatattaaccaagacttaaaagagaatgagacagtaatggagcacaccaaacggcattctgatcctgacaaatctttgcaggatgaggtctcaccaagaagaaatgacatcatttctgtaccaggtattcaacctttggatcccatatcagattcagatagtgaaaactctttccaggaatccaaactagaaagccagaaagacttggaggaggaagaggatgaggaagtaaggagatatattatggagaaaattgtacaagctaacaagcttctacagaatcaagaaccggtgaatgataaaagggagcgaaaacttaagttcaaggaccagttagttgatttggaagttcctccactagaagacactactacttttaaaaattattttgaaaacgaaaggaatatgtttgggaaactgtcacaattatgtatttccaatgattttggacaagaagatgtgctcctgtcacttactaatggaagctgtgaagaaaacaaggataggacaatactggtagagagagatggaaaatttgaacttctgaatttacaagacattgccagtcaggggtttttgcctcccattaataatgcaaatagtacagaaaatgaccctcagcagttgttacccagatcttccaactcctctgtcagtggcaccaagaaagaagattctacagcaaagattcatgctgtcactcactcatcaacaggagagccgctggcttatatcgctcagccaccactcaaccgcaagacttgtccaagctctgctgtcaactcagatcgaagtaaagggaatgggaaatctaatcacaggacacagtctgcacatatctcaccagtgacttcaacatactgtctttcccctcgacagaaagaactacaaaaacaactagaagaaaagagagaaaaactgaaaagagaggaagagcgacgaaaaatagaagaagagaaagaaaaaaagagagagaatgacatagtatttaaagcgtggttgcaaaagaaaagagagcaggtcttagaaatgaggagaattcagcgagcaaaggaaattgaagacatgaacagtagagaaaacagagatccacaacaagcttttcgattatggcttaaaaaaaagcacgaagagcagatgaaagaaagacagacagaagaactaagaaagcaagaggaatgtttattcttccttaaaggaacagaaggccgggaaagggcctttaaacaatggttaagaaggaaacggatggaaaaaatggcagagcaacaagctgtcagagagagaactagacagctccgactagaagctaagcgttctaaacagttacagcaccacctatatatgtcagaagccaaaccttttcgttttactgatcattataactgaaagtttctattaaatatttcagtgggcagctgctatcaaaattttggatatgatttcttagggtctgtgtactttggttgtattctaaattatggaaatggtatttatcttttattgacagtgaatttgtttttttaatactagaacaaaataaatttttttctcacagtgttgtaa

SEQ ID NO: 120935 - DNA, 1860 bp, Homo sapiens
  Payload ID: 3699
  Gene Symbol: CCDC181
  Gene Name: coiled-coil domain containing 181
  Uniprot ID: Q5TID7
  ENST ID: ENST00000367806
  CDS Start-End: 154-1683
agtgtggtcctggctgccgcggaggcaggtgccggggtctcctttgcctcaatgtgaagagcttagaaagaggaggagaggagaactcccccggccatctctgtgatcccagccgccgcattttacacagcatatttccttcacaaacagaaaatgaatgaaaataaagatactgattcaaagaaaagtgaagaatacgaagatgactttgaaaaggacctggagtggttaattaatgaaaatgaaaaaagtgatgccagcataatagagatggcttgtgagaaggaagagaatattaaccaagacttaaaagagaatgagacagtaatggagcacaccaaacggcattctgatcctgacaaatctttgcaggatgaggtctcaccaagaagaaatgacatcatttctgtaccaggtattcaacctttggatcccatatcagattcagatagtgaaaactctttccaggaatccaaactagaaagccagaaagacttggaggaggaagaggatgaggaagtaaggagatatattatggagaaaattgtacaagctaacaagcttctacagaatcaagaaccggtgaatgataaaagggagcgaaaacttaagttcaaggaccagttagttgatttggaagttcctccactagaagacactactacttttaaaaattattttgaaaacgaaaggaatatgtttgggaaactgtcacaattatgtatttccaatgattttggacaagaagatgtgctcctgtcacttactaatggaagctgtgaagaaaacaaggataggacaatactggtagagagagatggaaaatttgaacttctgaatttacaagacattgccagtcaggggtttttgcctcccattaataatgcaaatagtacagaaaatgaccctcagcagttgttacccagatcttccaactcctctgtcagtggcaccaagaaagaagattctacagcaaagattcatgctgtcactcactcatcaacaggagagccgctggcttatatcgctcagccaccactcaaccgcaagacttgtccaagctctgctgtcaactcagatcgaagtaaagggaatgggaaatctaatcacaggacacagtctgcacatatctcaccagtgacttcaacatactgtctttcccctcgacagaaagaactacaaaaacaactagaagaaaagagagaaaaactgaaaagagaggaagagcgacgaaaaatagaagaagagaaagaaaaaaagagagagaatgacatagtatttaaagcgtggttgcaaaagaaaagagagcaggtcttagaaatgaggagaattcagcgagcaaaggaaattgaagacatgaacagtagacaggaaaacagagatccacaacaagcttttcgattatggcttaaaaaaaagcacgaagagcagatgaaagaaagacagacagaagaactaagaaagcaagaggaatgtttattcttccttaaaggaacagaaggccgggaaagggcctttaaacaatggttaagaaggaaacggatggaaaaaatggcagagcaacaagctgtcagagagagaactagacagctccgactagaagctaagcgttctaaacagttacagcaccacctatatatgtcagaagccaaaccttttcgttttactgatcattataactgaaagtttctattaaatatttcagtgggcagctgctatcaaaattttggatatgatttcttagggtctgtgtactttggttgtattctaaattatggaaatggtatttatcttttattgacagtgaatttgtttttttaatactagaacaaaataaatttttttctcacagtgttgtaa

SEQ ID NO: 120936 - DNA, 1246 bp, Homo sapiens
  Payload ID: 3699
  Gene Symbol: CCDC181
  Gene Name: coiled-coil domain containing 181
  ENST ID: ENST00000456107
  CDS Start-End: 179-1246
agagaggcccggatggaggacgcagaggcacgctgttgccatggcagtgtggtcctggctgccgcggaggcaggtgccggggtctcctttgcctcaatgtgaagagcttagaaagaggaggagaggagaactcccccggccatctctgtgatcccagccgccgcattttacacagaaaatgaatgaaaataaagatactgattcaaagaaaagtgaagaatacgaagatgactttgaaaaggacctggagtggttaattaatgaaaatgaaaaaagtgatgccagcataatagagatggcttgtgagaaggaagagaatattaaccaagacttaaaagagaatgagacagtaatggagcacaccaaacggcattctgatcctgacaaatctttgcaggatgaggtctcaccaagaagaaatgacatcatttctgtaccaggtattcaacctttggatcccatatcagattcagatagtgaaaactctttccaggaatccaaactagaaagccagaaagacttggaggaggaagaggatgaggaagtaaggagatatattatggagaaaattgtacaagctaacaagcttctacagaatcaagaaccggtgaatgataaaagggagcgaaaacttaagttcaaggaccagttagttgatttggaagttcctccactagaagacactactacttttaaaaattattttgaaaacgaaaggaatatgtttgggaaactgtcacaattatgtatttccaatgattttggacaagaagatgtgctcctgtcacttactaatggaagctgtgaagaaaacaaggataggacaatactggtagagagagatggaaaatttgaacttctgaatttacaagacattgccagtcaggggtttttgcctcccattaataatgcaaatagtacagaaaatgaccctcagcagttgttacccagatcttccaactcctctgtcagtggcaccaagaaagaagattctacagcaaagattcatgctgtcactcactcatcaacaggagagccgctggcttatatcgctcagccaccactcaaccgcaagacttgtccaagctctgctgtcaactcagatcgaagtaaagggaatgggaaatctaatcacaggacacagtctgcacatatctcaccagtgacttcaacatactgtctttcccctcgacagaaagaactacaaaaacaactagaagaaaagagagaaaaactgaaaagagag

SEQ ID NO: 120937 - DNA, 2035 bp, Homo sapiens
  Payload ID: 3699
  Gene Symbol: CCDC181
  Gene Name: coiled-coil domain containing 181
  Uniprot ID: Q5TID7
  ENST ID: ENST00000545005
  CDS Start-End: 509-2035
ggggtccaatttgtgcgcgtggagtgagacagaaaacctggagcccgatctcccggccagcgactccctccttctgggtgtgcggctgaagactggaagcaggttgccttgcctgctgcaagcccgccgtacctaccccttctccgcgtgcgcccctccctgtgcctgcgcattaccggctagccggcggcgggcgctgcagcccctacgtgattctgcggctcactcccctcggatggtctttccacccgagtttttcccgggaagaggctctcaagactagccagtgcaggaggaggagtcgaactctggatagcctgtttataaagccctaactgtgccgatgttgaccgttttctgaaactcctcctccaaaacccacgccaaaccacaagatgaaggaaattcacacatcaggatgccaaaaaccatggaagacttctgatgttctgggagggttgacaaagatggaccttaaattctagcatatttccttcacaaacagaaaatgaatgaaaataaagatactgattcaaagaaaagtgaagaatacgaagatgactttgaaaaggacctggagtggttaattaatgaaaatgaaaaaagtgatgccagcataatagagatggcttgtgagaaggaagagaatattaaccaagacttaaaagagaatgagacagtaatggagcacaccaaacggcattctgatcctgacaaatctttgcaggatgaggtctcaccaagaagaaatgacatcatttctgtaccaggtattcaacctttggatcccatatcagattcagatagtgaaaactctttccaggaatccaaactagaaagccagaaagacttggaggaggaagaggatgaggaagtaaggagatatattatggagaaaattgtacaagctaacaagcttctacagaatcaagaaccggtgaatgataaaagggagcgaaaacttaagttcaaggaccagttagttgatttggaagttcctccactagaagacactactacttttaaaaattattttgaaaacgaaaggaatatgtttgggaaactgtcacaattatgtatttccaatgattttggacaagaagatgtgctcctgtcacttactaatggaagctgtgaagaaaacaaggataggacaatactggtagagagagatggaaaatttgaacttctgaatttacaagacattgccagtcaggggtttttgcctcccattaataatgcaaatagtacagaaaatgaccctcagcagttgttacccagatcttccaactcctctgtcagtggcaccaagaaagaagattctacagcaaagattcatgctgtcactcactcatcaacaggagagccgctggcttatatcgctcagccaccactcaaccgcaagacttgtccaagctctgctgtcaactcagatcgaagtaaagggaatgggaaatctaatcacaggacacagtctgcacatatctcaccagtgacttcaacatactgtctttcccctcgacagaaagaactacaaaaacaactagaagaaaagagagaaaaactgaaaagagaggaagagcgacgaaaaatagaagaagagaaagaaaaaaagagagagaatgacatagtatttaaagcgtggttgcaaaagaaaagagagcaggtcttagaaatgaggagaattcagcgagcaaaggaaattgaagacatgaacagtagagaaaacagagatccacaacaagcttttcgattatggcttaaaaaaaagcacgaagagcagatgaaagaaagacagacagaagaactaagaaagcaagaggaatgtttattcttccttaaaggaacagaaggccgggaaagggcctttaaacaatggttaagaaggaaacggatggaaaaaatggcagagcaacaagctgtcagagagagaactagacagctccgactagaagctaagcgttctaaacagttacagcaccacctatatatgtcagaagccaaaccttttcgttttactgatcattataactga

SEQ ID NO: 120938 - DNA, 1652 bp, Homo sapiens
  Payload ID: 3699
  Gene Symbol: CCDC181
  Gene Name: coiled-coil domain containing 181
  Uniprot ID: Q5TID7
  ENST ID: ENST00000491570
  CDS Start-End: 211-1467
gctctcgtagttagagaggcccggatggaggacgcagaggcacgctgttgccatggcagtgtggtcctggctgccgcggaggcaggtgccggggtctcctttgcctcaatgtgaagagcttagaaagaggaggagaggagaactcccccggccatctctgtgatcccagccgccgcattttacacagcatatttccttcacaaacagaaaatgaatgaaaataaagatactgattcaaagaaaagtgaagaatacgaagatgactttgaaaaggacctggagtggttaattaatgaaaatgaaaaaagtgatgccagcataatagagatggcttgtgagaaggaagagaatattaaccaagacttaaaagagaatgagacagtaatggagcacaccaaacggcattctgatcctgacaaatctttgcaggatgaggtctcaccaagaagaaatgacatcatttctgtaccaggtattcaacctttggatcccatatcagattcagatagtgaaaactctttccaggaatccaaactagaaagccagaaagacttggaggaggaagaggatgaggaagtaaggagatatattatggagaaaattgtacaagctaacaagcttctacagaatcaagaaccggtgaatgataaaagggagcgaaaacttaagttcaaggaccagttagttgatttggaagttcctccactagaagacactactacttttaaaaattattttgaaaacgaaaggaatatgtttgggaaactgtcacaattatgtatttccaatgattttggacaagaagatgtgctcctgtcacttactaatggaagctgtgaagaaaacaaggataggacaatactggtagagagagatggaaaatttgaacttctgaatttacaagacattgccagtcaggggtttttgcctcccattaataatgcaaatagtacagaaaatgaccctcagcagttgttacccagatcttccaactcctctgtcagtggcaccaagaaagaagattctacagcaaagattcatgctgtcactcactcatcaacaggagagccgctggcttatatcgctcagccaccactcaaccgcaagacttgtccaagctctgctgtcaactcagatcgaagtaaagggaatgggaaatctaatcacaggacacagtctgcacatatctcaccagtgacttcaacatactgtctttcccctcgacagaaagaactacaaaaacaactagaagaaaagagagaaaaactgaaaagagaggaagagcgacgaaaaatagaagaagagaaagaaaaaaagagagagaatgacatagtatttaaagcgtggttgcaaaagaaaagagagcaggtcttagaaatgaggagaattcagcgagcaaaggaaattgaagacatgaacagtagagtaagtaaaacttctctgaaaaataagttcatacagatatgaaagctgaacttatttatagaagggagtctggatatcagactaacagcctatggaagaagtagaaaagttgttcaagaactacccttgcaaaagatgcaacatgcagataactacaattaggttctaagaggtcttgtgaaaataaaatgattcctattttgttcagactttgatggaacagaaaa

SEQ ID NO: 120939 - DNA, 832 bp, Homo sapiens
  Payload ID: 3700
  Gene Symbol: CCDC182
  Gene Name: coiled-coil domain containing 182
  Uniprot ID: A6NF36
  ENST ID: ENST00000299415
  CDS Start-End: 41-502
gtctcttggcttcctctctttgtccaacgtagaagagacaatggaacccctctaccaggctgggtccattctcatgacggtgaataccctacaggggaaaaaaatgatagagagtggcctccagtctggagacttttccctgtcccagtcatggccctcctgcctcccaccacccgctgacttggagatcctgcagcagaaggtggccggggtgcaacgggaactggaggactttaagaaagaggcattgaagtccattcattaccttgaagacgccttctgcgagatgaatggagccctggtgcaacaggaggagcaggcggctcgcgtgaggcagcggctaagggaggaggaggaccgtggcatcgtgcgcaacaaggttctcaccttcctgttgccgcgcgagaaacagctccgggagcactgcaagcggctggaggacctgctgctggacaggggacgtgacgccctgcgtgccaccaagaagagccaggctgactgaacctcgtgggtggcactagccaagcaccaagttgaagattttttttaacggaaggagaaaccccaagtccctacccccttgctttcccttcctcatttccattgctttccttctgcctaaataacaccttgctgagaggcaaaaagacttcaatattttttttggtgaaattccatttatccagcattctaaaggaaggaggcaccccagtactgagtcaggcccctgtaactttcacttgaactgttttcctgtttgtaatggtactattgctcaatgtatacctctttatttgtatagtatattcttaaactgattgtgttgaacatt

SEQ ID NO: 120940 - DNA, 1671 bp, Homo sapiens
  Payload ID: 3701
  Gene Symbol: CCDC183
  Gene Name: coiled-coil domain containing 183
  Uniprot ID: Q5T5S1
  ENST ID: ENST00000338005
  CDS Start-End: 36-1640
gtacacagggtcccttggggggcctgagagcagccatgaggaggcacagtgagacagatgtggaagagcagacccaggagctgaagaccatcactcagctccaggagcagtgtcgggcactccagatccaaggggtgaaagagaatatggaccagaacaaggccacgctggccctcctgcgcagcaacatccgccgcggggcccaggactgggctttggccaagaagtatgaccagtggaccatctccaaggcctgcgggaaaaacttgcctttgcgactggcgcactgccgcagcaccatggaggtggtgcgggagaagctgcgcaagtacgtcttcgaccgcgtgaacatgcacaacctactgatccacctggtgcggcggcgcgggcagaagctggagagcatgcagctggagctggacagcctgcggagccagcccgacgccagcaaggaggagctgcggctgctgcagatcatccgccagctggagaacaacatcgagaagacaatgatcaagatcatcaccagccagaacatccacctgctgtatttggacctgctggattatctgaagacagtgctggcaggataccccattgagctggacaagctgcagaacctcgtggtcaactactgctcagagctgtcggatatgaagatcatgtcccaagatgccatgatgatcacggatgaggtcaagaggaacatgaggcaaagggaggcgtccttcatcgaggagcgccgggcaagggagaaccggctcaaccagcagaagaagctgatcgacaagatccacacgaaggagaccagcgagaagtaccgccggggccagatggacttggacttcccctcgaacctgatgagcacggagaccctgaaattgaggagaaaagagacctccacagcagaaatggaataccagtcgggcgtgactgctgtggtggagaaggtcaagagtgctgtacggtgctctcacgtctgggacatcactagccgcttcctggcccagaggaacacggaggagaacctggagctgcagatggaggactgtgaggagtggcgggtgcagctgaaggccctggtgaagcagctggagctggaggaggccgtgctcaagttccgccagaagcctagctccatcagcttcaagtccgttgagaagaaaatgacagacatgctaaaagaggaagaagagaggctccagctggcgcacagcaacatgaccaagggccaggagctgctgctgaccatccagatgggcatcgacaacctctatgtccggctgatgggcattaacttgcctgcgacccagagagaagtggtgctctccaacaccctcgatttgaacagcaagctggcgtactgcgaggggaagctcacgtacctggctgacagagtgcagatggtgtccaggaccgaggagggcgacacaaaggtgagggacaccctggagtcctcgactctgatggagaagtacaacaccaggatcagctttgagaaccgggaggaggatatgatcgacaccttccagttccccgacatggaccacagctacgtcccttcgcgcgccgagatcaagaggcaggcgcagcggctaatcgaggggaagctcaaggcggccaagaaaaagaagaagtagccccgccgccccgctccctgctttgctacac

SEQ ID NO: 120941 - DNA, 1786 bp, Homo sapiens
  Payload ID: 3701
  Gene Symbol: CCDC183
  Gene Name: coiled-coil domain containing 183
  ENST ID: ENST00000479371
  CDS Start-End: 49-1005
gggaggctttgaggtacacagggtcccttggggggcctgagagcagccatgaggaggcacagtgagacagatgtggaagagcagacccaggagctgaagaccatcactcagctccaggagcagtgtcgggcactccagatccaaggggtgaaagagaatatggaccagaacaaggccacgctggccctcctgcgcagcaacatccgccgcggggcccaggactgggctttggccaagaagtatgaccagtggaccatctccaaggcctgcgggaaaaacttgcctttgcgactggcgcactgccgcagcaccatggaggtggtgcgggagaagctgcgcaagtacgtcttcgaccgcgtgaacatgcacaacctactgatccacctggtgcggcggcgcgggcagaagctggagagcatgcagctggagctggacagcctgcggagccagcccgacgccagcaaggaggagctgcggctgctgcagatcatccgccagctggagaacaacatcgagaagacaatgatcaagatcatcaccagccagaacatccacctgctgtatttggacctgctggattatctgaagacagtgctggcaggataccccattgagctggacaagctgcagaacctcgtggtcaactactgctcagagctgtcggatatgaagatcatgtcccaagatgccatgatgatcacggatgaggtcaaggaacatgaggcaaagggaggcgtccttcatcgaggagcgccgggcaagggagaaccggctcaaccagcagaagaagctgatcgacaagatccacacgaaggagaccagcgagaagtaccgccggggccagatggacttggacttcccctcgaacctgatgagcacggagaccctgaaattgaggagaaaagagacctccacagcagaaatggaataccagtcgggcgtgactgctgtggtggagaaggtcaagagtgctgtacggtgctctcacgtctgggacatcactagccgcttcctggcccagaggaacacggaggagaacctggagctgcagatggaggactgtgaggagtggcgggtgcagctgaaggccctggtgaagcagctggagctggaggaggccgtgctcaagttccgccagaagcctagctccatcagcttcaagtccgttgagaagaaaatgacagacatgctaaaagaggaagaagagaggctccagctggcgcacagcaacatgaccaagggccaggagctgctgctgaccatccagatgggcatcgacaacctctatgtccggctgatgggcattaacttgcctgcgacccaggtaccgggagtgaggctgagctgccacacaccaggtccctgggcagggccagaggggagatgagaccctcctcccggcctacagagagaagtggtgctctccaacaccctcgatttgaacagcaagctggcgtactgcgaggggaagctcacgtacctggctgacagagtgcagatggtgtccaggaccgaggagggcgacacaaaggtgagggacaccctggagtcctcgactctgatggagaagtacaacaccaggatcagctttgagaaccgggaggaggatatgatcgacaccttccagttccccgacatggaccacagctacgtcccttcgcgcgccgagatcaagaggcaggcgcagcggctaatcgaggggaagctcaaggcggccaagaaaaagaagaagtagccccgccgccccgctccctgctttgctacacaaataaacatttttccagga

SEQ ID NO: 120942 - DNA, 2343 bp, Homo sapiens
  Payload ID: 3702
  Gene Symbol: CCDC184
  Gene Name: coiled-coil domain containing 184
  Uniprot ID: Q52MB2
  ENST ID: ENST00000316554
  CDS Start-End: 540-1124
tttacgtgccgtgcgtcgccttggaaacagaggagcatccgcgacacccccgggagacccaccccagctgctgctgccacactcgcgggcgctgcccggtaatggcctgggggagtcccgagtccgacgcgccgctggcctcagcctggacgcggacccctccgcgagcgcgtctgtgacccacggaaccggcaggcgctctctgcttgtggcgcccagagggcggcgctgacacgggcgcgatccgggaggcgaggcagggcagggcactttcgtcccggggcgatcccaagagacgccggctctgggaccctcgccgggtcctcgtcccgcagcctcttctcggcctcccgcgatcctgcctgcgccctctgcccaggactcgtctctcacgtcggctccccgccagtctcgggagcctccgcttccctcggctcccgctagcccctcccgggacctctccccctccaccccctcccccaccccggaggccgggctggacgcgacccagagcctccgccacccgcttctgccactcaatggaggacggtctgctggagatcatgaccaaggacggcggcgacatgccggcgcccctggaggtgtccaccgtgccggcagtgggggacgtgatctccggggagtacaacggcggcatgaaggaactgatggagcacctgaaagcccagctgcaagccctgtttgaggacgtgagggccatgaggggggccctggacgagcaggcctcgcacatccaggtgctctcggacgacgtgtgcgccaaccagcgagccatcgtctccatgtgccagattatgaccactgcgccccgccagggcggcttgggcgtggtcggcggcaaggggagcttccagagcgacccccaagagccggagactccttcgcctgggatcggggacagcggcttgctgggtcgcgatcccgaggacgaggaggaagaggaagaagagaaggagatgcccagccccgccacaccctccagtcactgtgagcgccccgaaagcccctgtgctggtctccttgggggggacgggccacttgtggagcccctcgacatgcccgacattaccctgctgcaactggagggcgaggcctccctgtgaggggactccgtggggcactaccttcccgggctgtctttgggtttccgagtgcatgacgcgagggggactgaacggcgcggtgcggcatgcttcacttggacagctgctcttgtgggtcaggcagagagagactccctcgaggaaggatttgtagggtgaaggactttgggagcatcgagaattctttctgcccaactaagcgaattatagcgaactgcggaaaggtgaggctccgggagaggaagcgcccatctctggactcccatccatccctatcctgtcctttcccccttcccagacaacaggagaacccgtgaattgtgtaaataaaattctgctttttctattctgaaaaaggacttacctaggaccatggcaaataatctctaacaatttacctggaaattaaggaattgggggtattttgttctggcaacaggaaatttacccttctgctgaaatccaagatattcagtgctctgcagaagcctctccccctcacagatctctgcggctgctgattggtaaaggaagcttgaggagggaactgcagccctaggaatctgggtgaatggggttccaagggcccctgggctgggaggagctggctatgaatgtgcatgaagacataatagctcaacctctaggattttgcatgcagagcggatcctgccttgtcactgacttcatctgggattgcttttccactccctggggcttagagaacaaagagcccggttcacaggcagagactcgggggtgctcagcagcagcccagatttaggggacatttgagggactcttggggccgcagccaaaaactgtctctcctggctacacctgcttaacttcagttcctttttctgtcaatatgtccttgcccactgcctctcggtgttgccttcataatgtcttgtgtgtgttatgtgtgtctacttgtgtagtagtgtgtgagccctcaggggcagggcttgtggctctggtgttaggttcaggggcttcagacccttctacgagctccaagctatcaatggcgcttttctctccctcttcccccaaccagggcatggagcatgtggctgtcctgaggttcttttactgatgtgccgcccttccacctcctcaagtggtgactttgtgtgccctccccctcctttgtgtattccttctcaatgctttccttggtgttaaccttaataaaaaggcgtcatctcccctc

SEQ ID NO: 120943 - DNA, 2054 bp, Homo sapiens
  Payload ID: 3703
  Gene Symbol: CCDC185
  Gene Name: coiled-coil domain containing 185
  Uniprot ID: Q8N715
  ENST ID: ENST00000366875
  CDS Start-End: 60-1931
agcgtcctcgggaggtctcaggccccttgggcagacgctgcgcgtgcccagagggagggatggcaggcttcagccacttctcccagccgccctaccgggatctctgggaacccccgcggcccggcggagaacgagagtccacgcagcggctgggcgggcagaggtccggagccgactccaccgcgtgctcccgggccgggactccgggtgcggagagcgaagctggggcgtgctggctgcacccgcactgttcgttcaccccgcggcctcgcaggcgcgggtgctcagattcactgcggggcagccgaagcctgagcgatgtggcccgcaggcccctggaacgttccaggaagcaccggccccgcagcaggcgcctggaagatgcctggggagagacaggaaccaagccccgcccggcttggcagccgcagacccagctgccaccccagcggccgcagccctgcccgcattaccctctggcccagggagactcgcccccgccttgccccggaggagctggcactcccctgagtggcacattcagggtagaaaaggcacagggtggagaccagtgggcagtgccactcggcagacatctaggtcgctggtccccttcctcagttccctcggagcggtcttctgtgccctcgcaaaagttcaagaggcactcagcctgcgtgtgcgcccagaagagagacagcagcgaccaggttgagtcattagccagccgggactcccagcccttggcctccagcaaagagatgcggagcccgcacacccaggtcctgaagagcaagctggaagaggtggtggtgtcctcccaggaccagcagattgtggccctggtgctgacccgtctcaagaaggcccagaggatacgggagctgcagcagcaggcggctaaggcctgggaggagctgaagcgctcggatcagaaggtccagatgaccctggagcgggagcgccggctgctgctgcggcagagccaggagcagtggcaggagaaggagcagcgcaagaccctccagagccctgagcagcgcggcctgcggcgggacagccagaggaagaacgtgcccccgggggaaagccggtggaaggagcaaccagaggaccaggagagcccgcgccaggagaagctggagaaggcgcgcgcccaggcagagcaccgaaaacagtgccaggtgcggcgcctgcgggagcaggagaagatgctacggaacctccgggagcagcacagcctgcagctgcagaggaggctggtggaagcctgtcgcaagaggcacctacatgccgtggagggccagaagaaggtccaggacaccaacctgagctccctcatcaattaccaggcccggaaggtcctcatggactgccaggccaaggctgaggagctccttaggcagctgtccctggaacaaagtttccagcggtcccaggagatacaccagggcctgaggaaggagcggcaacgcgagctgagggagaaggcccagaaggaggaagagcagttgcagcaggccaggtggcgcgcaggggagtcagaggaacagaggaagatgcgcaaaagaattctggtggagctggcggatgagaagatccgacaggccaggagtcacgtgcacaagaccactagggacaaggtgcagcacctccgggagctcaaccacctgagggagaaaaaccaccacatcctgaaactgaaagccgagaaggaggaaaagtgtcacattgagggcatcaaggaggccattaagaaaaaggagcagagggtgcagcacatttcccaagggaaagacccaaacttccaggagttccagaagctccctcaggcctccaggagagaggagagagcgcctcccaacagctcccttgatcagatggtactagaggcccagctccgtgcctgtcagcagaacaggggttactgagaaccaaggacgcctggcttacagtgcgcagccagaaggagatgtggcaatgtgattccttttgtaatctgattataattgaacattgattttaaaaaagcatgtaaaatagctgcaatttcc

SEQ ID NO: 120944 - DNA, 2035 bp, Homo sapiens
  Payload ID: 3704
  Gene Symbol: CCDC186
  Gene Name: coiled-coil domain containing 186
  ENST ID: ENST00000369285
  CDS Start-End: 375-1010
tctttgttgatgtgtcagctccgcaggggtttggggaaacggccgctgagtgaggcgtcggctgtgtttctcaccgcggtcttttcctcccactcttggctggttggaccccgctatggaaaagttggcccctgagccagagctccagcagccttgttagggcgtggcctgaggcttggataagtgggaggaaaaagtcctggatttcgagtcagaacatctggattagaatcctacttctttcacttgataatcttgttacctgtggaaatcagaagagagaatatagtaaaaatacgcagtacagtcccagatgtaaaacgaagatcaggagcagatttgaagaattacaaagtgaattggtgccagtcagcatgtcagagacagaccacatagcctctacttcctctgataaaaatgttgggaaaacacctgaattaaaggaagactcatgcaacttgttttctggcaatgaaagcagcaaattagaaaatgagtccaaactattgtcattaaacactgataaaactttatgtcaacctaatgagcataataatcgaattgaagcccaggaaaattatattccagatcatggtggaggtgaggattcttgtgccaaaacagacacaggctcagaaaattctgaacaaatagctaattttcctagtggaaattttgctaaacatatttcaaaaacaaatgaaacagaacagaaagtaacacaaatattggtggaattaaggtcatctacatttccagaatcagctaatgaaaagacttattcagaaagcccctatgatacagactgcaccaagaaatttatttcaaaaataaagagcgtttcagcatcagaggatttgttggaagaaatagaatctgagctcttatctacggagtttgcagaacatcgagtaccaaatggaatgaataagggagaacatgcattagttctgtttgaaaagtgtgtgcaagataaatatttgcagcaggaacatatcataaaaaagtaagttttttatacctttaggttattttttttccctcacaggcacagggattcgagataaaattctttaaaggaaaataccattttgttcatttttacttgcacattagaatcatgcacatagtagttgaacaataaatgtatagttgctgaatgtgtgagcaaatgtcgagtttttcagatatctgagttcaatatgttaaatagtgtaaatgtattaacgtgctagaaatttttatagacaactcaaaatttttcacttttgaaagaatgtagaagtatattgtcaaaactaagagaaactcaaaaggaaataacaagtcataaaattccacaactttttcttaaaatctgcattctaaattcattggtttaaaacattaaaatttagagaacagaataattgattatcgttcagtaaataataatacagttttggatatgtgaagttctgttttcatgatagtttaaaatttaccatcttaaccatttttatgtgtacgtttcagtagtgttattatatattcacactgttggacaaccaatctgcagaactttttcactttgcaaatctgaaacactgtattcgttaaacaacactatttccacttgccctcagtccctggcaaccaccattctactttctgttgctgagtttgactactcatgatacctcatgtaggtgaaatcatatacttttcatttcatgactggcttatttcatttagcctaatgtcctcatttatccatgttgtaacatgtcagaatttcatttctttttaaggctcaataatattgcattgtatgtatataccacattttgtttattcatccattaatggacatctgggttccttctgctttttggctgttgttaataatgctactgtgaacttgggtttgcaagtatctcttcaagactccaaggcccttcttgatattacccccaaacaaatgcctgctgttgctattcatatccttactgtaatactatattatgtgaataaactgtatgcttttgtacttgaa

SEQ ID NO: 120945 - DNA, 1928 bp, Homo sapiens
  Payload ID: 3704
  Gene Symbol: CCDC186
  Gene Name: coiled-coil domain containing 186
  ENST ID: ENST00000369286
  CDS Start-End: 268-903
gcttcagtgtcgccgccatctttgttgatgtgtcagctccgcaggggtttggggaaacggccgctgagtgaggcgtcggctgtgtttctcaccgcggtcttttcctcccactcttggctggttggaccccgctatggaaaagttggcccctgagccagagctccagcagccttgttagggcgtggcctgaggcttggataagtgggatgtaaaacgaagatcaggagcagatttgaagaattacaaagtgaattggtgccagtcagcatgtcagagacagaccacatagcctctacttcctctgataaaaatgttgggaaaacacctgaattaaaggaagactcatgcaacttgttttctggcaatgaaagcagcaaattagaaaatgagtccaaactattgtcattaaacactgataaaactttatgtcaacctaatgagcataataatcgaattgaagcccaggaaaattatattccagatcatggtggaggtgaggattcttgtgccaaaacagacacaggctcagaaaattctgaacaaatagctaattttcctagtggaaattttgctaaacatatttcaaaaacaaatgaaacagaacagaaagtaacacaaatattggtggaattaaggtcatctacatttccagaatcagctaatgaaaagacttattcagaaagcccctatgatacagactgcaccaagaaatttatttcaaaaataaagagcgtttcagcatcagaggatttgttggaagaaatagaatctgagctcttatctacggagtttgcagaacatcgagtaccaaatggaatgaataagggagaacatgcattagttctgtttgaaaagtgtgtgcaagataaatatttgcagcaggaacatatcataaaaaagtaagttttttatacctttaggttattttttttccctcacaggcacagggattcgagataaaattctttaaaggaaaataccattttgttcatttttacttgcacattagaatcatgcacatagtagttgaacaataaatgtatagttgctgaatgtgtgagcaaatgtcgagtttttcagatatctgagttcaatatgttaaatagtgtaaatgtattaacgtgctagaaatttttatagacaactcaaaatttttcacttttgaaagaatgtagaagtatattgtcaaaactaagagaaactcaaaaggaaataacaagtcataaaattccacaactttttcttaaaatctgcattctaaattcattggtttaaaacattaaaatttagagaacagaataattgattatcgttcagtaaataataatacagttttggatatgtgaagttctgttttcatgatagtttaaaatttaccatcttaaccatttttatgtgtacgtttcagtagtgttattatatattcacactgttggacaaccaatctgcagaactttttcactttgcaaatctgaaacactgtattcgttaaacaacactatttccacttgccctcagtccctggcaaccaccattctactttctgttgctgagtttgactactcatgatacctcatgtaggtgaaatcatatacttttcatttcatgactggcttatttcatttagcctaatgtcctcatttatccatgttgtaacatgtcagaatttcatttctttttaaggctcaataatattgcattgtatgtatataccacattttgtttattcatccattaatggacatctgggttccttctgctttttggctgttgttaataatgctactgtgaacttgggtttgcaagtatctcttcaagactccaaggcccttcttgatattacccccaaacaaatgcctgctgttgctattcatatccttactgtaatactatattatgtgaataaactgtatgcttttgtacttgaa

SEQ ID NO: 120946 - DNA, 7245 bp, Homo sapiens
  Payload ID: 3704
  Gene Symbol: CCDC186
  Gene Name: coiled-coil domain containing 186
  Uniprot ID: Q7Z3E2
  ENST ID: ENST00000369287
  CDS Start-End: 268-2964
gcttcagtgtcgccgccatctttgttgatgtgtcagctccgcaggggtttggggaaacggccgctgagtgaggcgtcggctgtgtttctcaccgcggtcttttcctcccactcttggctggttggaccccgctatggaaaagttggcccctgagccagagctccagcagccttgttagggcgtggcctgaggcttggataagtgggatgtaaaacgaagatcaggagcagatttgaagaattacaaagtgaattggtgccagtcagcatgtcagagacagaccacatagcctctacttcctctgataaaaatgttgggaaaacacctgaattaaaggaagactcatgcaacttgttttctggcaatgaaagcagcaaattagaaaatgagtccaaactattgtcattaaacactgataaaactttatgtcaacctaatgagcataataatcgaattgaagcccaggaaaattatattccagatcatggtggaggtgaggattcttgtgccaaaacagacacaggctcagaaaattctgaacaaatagctaattttcctagtggaaattttgctaaacatatttcaaaaacaaatgaaacagaacagaaagtaacacaaatattggtggaattaaggtcatctacatttccagaatcagctaatgaaaagacttattcagaaagcccctatgatacagactgcaccaagaaatttatttcaaaaataaagagcgtttcagcatcagaggatttgttggaagaaatagaatctgagctcttatctacggagtttgcagaacatcgagtaccaaatggaatgaataagggagaacatgcattagttctgtttgaaaagtgtgtgcaagataaatatttgcagcaggaacatatcataaaaaagttaattaaagaaaataagaagcatcaggagctcttcgtagacatttgttcagaaaaagacaatttaagagaagaactaaagaaaagaacagaaactgagaagcagcatatgaacacaattaaacagttagaatcaagaatagaagaacttaataaagaagttaaagcttccagagatcaactaatagctcaagacgttacagctaaaaatgcagttcagcagttacacaaagagatggcccaacggatggaacaggccaacaagaaatgtgaagaggcacgccaagaaaaagaagcaatggtaatgaaatatgtaagaggtgagaaggaatctttagatcttcgaaaggaaaaagagacacttgagaaaaaacttagagatgcaaataaggaacttgagaaaaacactaacaaaattaagcagctttctcaggagaaaggacggttgcaccagctgtatgaaactaaggaaggcgaaacgactagactcatcagagaaatagacaaattaaaggaagacattaactctcacgtcatcaaagtaaagtgggcacaaaacaaattaaaagctgaaatggattcacacaaggaaaccaaagataaactcaaagaaacaacaacaaaattaacacaagcaaaggaagaagcagatcagatacgaaaaaactgtcaggatatgataaaaacatatcaggagtcagaagaaattaaatcaaatgagcttgatgcaaagcttagagtcacaaaaggagaacttgaaaaacaaatgcaagaaaaatctgaccagctagagatgcatcatgccaaaataaaggaactagaagatctgaagagaacatttaaggagggtatggatgagttaagaacactgagaacaaaggtgaaatgtctagaagatgaacgattaagaacagaagatgaattatcaaaatataaggaaattattaatcgccaaaaagctgaaattcagaatttattggacaaggtgaaaactgcagatcagctacaggagcagcttcaaagaggtaagcaagaaattgaaaatttgaaagaagaagtggaaagtcttaattctttgattaatgacctacaaaaagacatcgaaggcagtaggaaaagagaatctgagctgctgctgtttacagaaaggctcactagtaagaatgcacagcttcagtctgaatccaattctttgcagtcacaatttgataaagtttcctgtagtgaaagtcagttacaaagccagtgtgaacaaatgaaacagacaaatattaatttggaaagtaggttgttgaaagaggaagaactgcgaaaagaggaagtccaaactctgcaagctgaactcgcttgtagacaaacagaagttaaagcattgagtacccaggtagaagaattaaaagatgagttagtaactcagagacgtaaacatgcctctagtatcaaggatctcaccaaacaacttcagcaagcacgaagaaaattagatcaggttgagagtggaagctatgacaaagaagtcagcagcatgggaagtcgttctagttcatcagggtccctgaatgctcgaagcagtgcagaagatcgatctccagaaaatactgggtcctcagtagctgtggataactttccacaagtagataaggccatgttgattgagagaatagttaggctgcaaaaagcacatgcccggaaaaatgaaaagatagaatttatggaggaccacatcaaacaactggtggaagaaattaggaaaaaaacaaaaataattcaaagttatattttacgagaagaatcaggcacactttcttcagaggcatctgattttaacaaagttcatttaagtagacggggtggcatcatggcatctttatatacatcccatccagctgacaatggattaacattggagctctctttggaaatcaaccgaaaattacaggctgttttggaggatacgttactaaaaaatattactttgaaggaaaatctacaaacacttggaacagaaatagaacgtcttattaaacaccagcatgaactagaacagaggacaaagaaaacctaaaacaagcctcttgctcagtaaagagacaaaagccacacaggagtaggtgccactgacctctattgttggagactttgttccactttttgtttcagccagtaaaaatattgttttgcttcatctgtacacaaaaaaatacccttttacaatatgaatgcattgctgtatatactgtaagactgaaagctttgatgaaatttgtttttgtatggtgcaatatgacagcctgtcattgaatctaaacaacttaatttgcttgtattcataagaagtgttgaacattacaagggcttttataaaaaaccctttgttcatatttcttccctttaaaatatgtaatgtcaaaaatgactcaccttttaaaaattatgcatgaaaacaggtggtaaacattcagtaatacgctatttctccaacatcaagacaactaaaacaaatgataaaaatgtttatttttacactccagcatatcgggtgagttttagggatgtgtatgaatatttaaatcttttaatttcagttttaatgaaagctgaacttaataggaaagctagctcttggtaactagcaatgatcaggcattgtttgcctctgtcaggttttcttatctgttttaggtacattttttcagattctgattgtttgagttaatggttgaatttttaaagtttttagttacttaaaatatgattttaaattacatattaatttagaaaattcctgtgtttacttatattttaaattgtgaaatggatccaatcattagaacagagagaatagttctttgaaactgaaatactttagttttactgaccttgtgtaaagataatatgaagaaccagcttccaaaagaaaccagcatatggcactataaactatttcatttgagcaccattctttaccatggatatattaattatgtattatagtggagtgatcatacagttcccccaaatgtgatgtttcagtgtatttatttaaaacataaagtagaccaggtgcagtagctcacgcctgtaatcccagcactttgggaagccaaggcaggaggattacctgaggccaggagtttaagaccagccttggcaacatagcgagacccccatctctacaaagaaattttaaaagattatccaggcatggtggtgcatgcctatggttccagctactcgggaggctgaagcggtagaatcacttgagcacaggaggtcaaggctgcaggtgagccatgatcgtgtcactgcactccagcctaggcaacagagcaagaccctgtctcttaaaacaaaaaacctcacacatacctaaaataagtatatatctgtaaccaaaggaacttaattttagagccaaatttttctatcttgttggattttttacagtgtttaagatagacacttaagtgttgccgtagtatcaatatttctgtcattgaattttttctcaccccttattatttctcacttacaatttctgagcatgatttttcataattcattatcttcagatcattactataataagataccgtggctcttatgcagatattgcagcaagccttgtttggtttggatttttgcatccctttttctcccattaagggaattaagttttgggatgatggattaaaagcctgtaaagaattgtttgggctctaaaagttgggctcatggtggcaatatccttttaatgtgttttaacattttttaatcaacatcgtttaaaaataatttactaaggattagattatttaatgaatgtctttttttctatatattgaattagatgttatcccaaaaaaaatatcttttcacttcaaaatgaaaatatatgttcaaagatgttttatttttagaatagttataaaaagtattagtcttaacataatgtgtcttgttctttttaccaataataatttatcaaaataagagggaaagtgcaatcaaatctgaattattttactatttgtttctagacacactacttaacactcctaaagactactttgagtaggcaacataactaaatttttctagtttcttatgatacaggttcataaactacaatatttggatttttttccccaaggcacaaaatgtataatggagaccaaatagtgatctgatccatagtatcctatgcctatacactttaaaatgtatatacattttagacaaaaatgcacactccagtattaatatttgtgctaccatctacttggagaagtttaatgagaaaattttagaagaaaagtattacaaacaatattttgactctattacctgttttgccttatacattttagaaactggaaattttttaaagaaaatgctttagttttcttctgttcttcactgtctacagtgtgcttttgtatatggatcaggactgagcaaagtaattacatgtatcagagatacttatctctatactaattcacagacagctcctgatgtaaggatttagagggccttctgccctctgaatatatggtgaggagaatggggtatctggaaaaggaaaatgatctggataaatctgagacctggggggaagtttgttttatatgttcattattggttgttacatatcaaggctgttttggttatgtatcaatattgtggtttatttgagctggaagtgattttttctgtgtatgtatatgtatacacttcaataggttttaattttgaagtgaatatttgccatgactccattttccccataccacttcagactttagcctgtttagttttaaggactgaaaatggtaggtttgggcagaagaatgaatttgaactttgatggggtttttttgtttttactttctatcttcataaccatttaaagcgatttagcttgaaattaaattttatcaggctaccaacatgttatttatttatttaataaacacatttattgaaaacctatactattgtattggcaccatacagggtattgtatttatactagtgagcagaccagggcatttccatcctcatggagttcatggtctaatgaaaatagctggggccgggtgtggtggctcacccctgtaatcccagcactttgggaggctgaggtgggaggattgtttgagcccaggagtttgagaccagccagggcaacatggcaaaaccccatgtgtacaaaagattaaaaaattagccagatgcagtggcacatggctggggtcccagctacccaggaggctgagttgggaggatcatctgagcctgggaggttgaagcttgcagtgagctatgattgccactgtactctatactccagcctgggtgacagagtgaaaccctgtctcaaaaaaaaaagaggaaagaaaatagctaggagacaatcagagcagatcttgggcttctgtggctcatctcagccctttataactggcctgagaagagggtttatctacttgtgcaagtggcccagaaatctcactcgtacatgaggctttggaacatccttgcaaaggtacgctgaaagcaaattgctgttttcctggtggttctgcacgtttcctaacttttatcatagtttgattttcattatttaagaaaaaataaaaaatccaaagaccataagatggcattagattttttaccattaaattattaatgcctatttggtgctcataaagattaatcatgtcacgcatgtttccaatctttcttttgcagtatattattttctaaaaattgttacatgcaaatttaaaccaagatttatcagtaaaagaaaaaaatagaatccttaataatgtaaatgttgttatatatgctaccctggtgaaaatatttttataaatcatgttgtcatttatgctttatgtagcctatttttcaataacctttttttaaaagcaattttttttgacaccaagattgttgatttttaattaacaccagttggtggcactagaaacctgaaatttttcaaagatgaacaaagaaaaattgaaaaggtaatctaaacatggagaatttttaggaaaataaatgaaaaatataattgtatattagagatgtatttttcttctggaatggaattctttttctaaaatgcaaatcgctatccattttgactgcaatgatgaaacttgtttatcttccagaggacatatatatatgtgtgtgtgtgtgtattgtacagatacctttaatttgattacactgtttcttgtaaatatgtttctgtataaaatgaaacttttcaagaggattctatgtatatattgtacttattaaataggtaatgcctatttaccaa

SEQ ID NO: 120947 - DNA, 1576 bp, Homo sapiens
  Payload ID: 3704
  Gene Symbol: CCDC186
  Gene Name: coiled-coil domain containing 186
  ENST ID: ENST00000428953
  CDS Start-End: 1-1309
tagactcatcagagaaatagacaaattaaaggaagacattaactctcacgtcatcaaagtaaagtgggcacaaaacaaattaaaagctgaaatggattcacacaaggaaaccaaagataaactcaaagaaacaacaacaaaattaacacaagcaaaggaagaagcagatcagatacgaaaaaactgtcaggatatgataaaaacatatcaggagtcagaagaaattaaatcaaatgagcttgatgcaaagcttagagtcacaaaaggagaacttgaaaaacaaatgcaagaaaaatctgaccagctagagatgcatcatgccaaaataaaggaactagaagatctgaagagaacatttaaggagggtatggatgagttaagaacactgagaacaaaggtgaaatgtctagaagatgaacgattaagaacagaagatgaattatcaaaatataaggaaattattaatcgccaaaaagctgaaattcagaatttattggacaaggtgaaaactgcagatcagctacaggagcagcttcaaagaggtaagcaagaaattgaaaatttgaaagaagaagtggaaagtcttaattctttgattaatgacctacaaaaagacatcgaaggcagtaggaaaagagaatctgagctgctgctgtttacagaaaggctcactagtaagaatgcacagcttcagtctgaatccaattctttgcagtcacaatttgataaagtttcctgtagtgaaagtcagttacaaagccagtgtgaacaaatgaaacagacaaatattaatttggaaagtaggttgttgaaagaggaagaactgcgaaaagaggaagtccaaactctgcaagctgaactcgcttgtagacaaacagaagttaaagcattgagtacccaggtagaagaattaaaagatgagttagtaactcagagacgtaaacatgcctctagtatcaaggatctcaccaaacaacttcagcaagcacgaagaaaattagatcaggttgagagtggaagctatgacaaagaagtcagcagcatgggaagtcgttctagttcatcagggtccctgaatgctcgaagcagtgcagaagatcgatctccagaaaatactgggtcctcagtagctgtggataactttccacaagtagataaggccatgttgattgagagaatagttaggctgcaaaaagcacatgcccggaaaaatgaaaagatagaatttatggaggaccacatcaaacaactggtggaagaaattaggaaaaaaacaaagaaaatctacaaacacttggaacagaaatagaacgtcttattaaacaccagcatgaactagaacagaggacaaagaaaacctaaaacaagcctcttgctcagtaaagagacaaaagccacacaggagtaggtgccactgacctctattgttggagactttgttccactttttgtttcagccagtaaaaatattgttttgcttcatctgtacacaaaaaaatacccttttacaatatgaatgcattgctgtatatactgtaagactgaaagctttgatgaaatttgtttttgtatggtg

SEQ ID NO: 120948 - DNA, 3158 bp, Homo sapiens
  Payload ID: 3705
  Gene Symbol: CCDC187
  Gene Name: coiled-coil domain containing 187
  ENST ID: ENST00000569961
  CDS Start-End: 242-3139
ggcccgccatcaccggcctcagagacagccgcatgtctgggccagtcacggctcttggcctctgggccccaccgttgctgggaaggggaggctctgcgcacctgcagctgaggatgacgtggcagccctgaggtggcccgggccctcccagcagccagacccaccctgggcagctccccacgtggtcgggtctgacgacctcaaggaaccaggaccctgggggaaggcgtgcagcctgcccatgtggtccacaggcccggaggctagggatggggacagctcggtgtcatcgggccgcctctcgtgctcttcggggggccacgacgtgtgtgtgtcttggaaggagaggccaccccaggtgttggggccccagcagaggcccagaaagagtgacgcgcggctggagcagctgagagacaagatccgggcccaggcgtggcagcaggggagctgtgcgtccctgggcacctcagccccctccagcgcctccagactccacaaagcctccacgctgatgcttaggaggaaaggccaagaggcaaaaaatccccctccagcccctgaatgctcaggtttcagcatcttgagtgcagctgagcgcagagttgaagccaaggcatcccacggccaggggcgcgagctctccagggtctcccagcaccaggttcctgttctgagggaaaaacccaaaagggtcaaaagcagttcttgcaaaagagagaagacccccaagttgccctcccctagaagagcggccaaagacaaacacaaagacgaagattcggagctggttggtgtttacgcctggagaaagggacaagctctggtgaggtcgctgcttgggccccctcccgtcctccgcaggcaccatagcaaggatccctcgagagacccggctctcaccgtggacttaggagacagcgagaaagtcatagctgccaagtgctcaccggtttgtgcccagttgcccgatgccacctccgcctacagtgaccagcaggtgtctgggaacacacccagcctggcttccttcgaccagccagcgaccatacagacggccatggccatcctacaagacctgcgccagcaaatccaggctgggctggagctggcccaggcccgcaagggagggcaagagctcgggccatcaaagcggaggctgcaggacgtggcagggaggggctgctgcagggaccccaatgcccagagctccttctctaagagtccctgggccatgacagagaggaagcattcctctttagagagggctaggagtgtccacacctgggagccctggagctcctccactgcacgggagtcctgtccgcagagggcctggggggcccaaggacaggaccgctccttccagaggccggagagtccccatgagaggttgggccacttctcccagaggccctggagtgcactggctgggcaggcctgcagtccgcagagggcctggggggcccaaagacagggcccctcctcccagaggcctgggagcccccctgaaaagcggagccccttcccccagcagccctggagtgctgtagccacacagccctgtccacggagggcctggactgcctgtgaaacctgggaggaccctggccccagactgcggaaccctctggaaaggcccagtcctccagcccagcggccctggagcagctccggcgtgcagagggccggcccccagggcaagggcagaggcatcggctcccccgtctcggctgccaagcatgccctgccaaggcccaccgggagcttccctcagaacccacttgggaaggagaaggacacgctgcggccctgccccaggtcccgggggctcctgggaccctcgcacagctctgagtccttgcgggagttcatgcgccagaaggcgcaggcccggcggcggcaggccctggaggagaaggcctcggccctgcgcacacgggagctgaggagccggaggctgcaggaggtctaccggcagcagagggaggccgtcctcggcagggcggtccccgtggtctcccggaccacccctggcatcgtgacctttgtccccagttctgcacagtccgggggcctggaagcctccgggagcctggagtccccagtgctggaatggagcaaagtgacctctggcatggtgctggggggccaggaagccccaggcagcttctgcctgtgtttgaacagagcctggaaccatgctgagaccctagatcccccagggatggggggcccccaagatggccgggatgcccccgtgctgctgtcagcttcaccctctctgggatccctggagctccaggacctgaccacccgctacctaccccgggggatgtgcatctacctggacccaaaggaggctgagcacctgggcacttccagctccctgcacctccggcataagcaggcgcagctgcaggcgctagagaccacagccaaagtcctcaagcagcgggtcgatagcctcaccgccaagctgcagggtgccgaagcgctggacaccgtcagggacccagctgtgggcctgctgcgctcgtgcccccacagcctacctgccgcccccacgctcgccacccccacgcttgccaccccagcctgccctggagccttggggcccaactggggcagaggggcacctggggagtgggtgagcatgcagccccagccccttctgcccccgacctacttcctggacggcgagacactgtcgtggggccccagctgggagcaacagcagagtgtgagcccgagggcccactgcgagagcaagccccgaggttttccagaggagggacacgtggacgtgaaaccagacaaaaggctgcagagaggcgtggcccccttccaggccctcagcccctctgcggggagctcatatgcgggcccagccacgctgcaccctatctggggctccctgggactggaggagacgccgtcggtcggaggggcagattctgtggcgccctgcaccccccggagctgcggtaagggcgaccctgcggacaggccctgggctggctggtcgggtggccggggcatccaccgagaacaccttccactgcctagcactcgagcttggccctacggggtagagaaatccttttccacgtggagagcatccacgcctcgttattaaaggttttagaggctttcgg

SEQ ID NO: 120949 - DNA, 3543 bp, Homo sapiens
  Payload ID: 3705
  Gene Symbol: CCDC187
  Gene Name: coiled-coil domain containing 187
  ENST ID: ENST00000563590
  CDS Start-End: 241-3102
cagcccagggccgggctgcccaccgtgccagcccagtttcaatgacccacctgagggtttccatcgtgggccaggggaccggcgcaggcgggcatccggagccaggcagtggccagcccatcccgggcagggtcataggtggggctgcaggcctcgaagccgccatgtgaaggcagcagcgaccccaggcagggcgggccaggttgaccttgcacctgctctcccctcagccccgcggccatgccgaccctggtcgtgggcacgccgcccacctgcctgggggacacacctcagccctgccacaagaacagccagaggcagggccccttctcccatggggccccagggagagcagccgactggaaggctgttgccaagcccaggctctgcgcacctgcagctgaggatgacgtggcagccctgaggtggcccgggccctcccagcagccagacccaccctgggcagctccccacgtggtcgggtctgacgacctcaaggaaccaggaccctgggggaaggcgtgcagcctgcccatgtggtccacaggcccggaggctagggatggggacagctcggtgtcatcgggccgcctctcgtgctcttcggggggccacgacgtgtgtgtgtcttggaaggagaggccaccccaggtgttggggccccagcagaggcccagaaagagtgacgcgcggctggagcagctgagagacaagatccgggcccaggcgtggcagcaggggagctgtgcgtccctgggcacctcagccccctccagcgcctccagactccacaaagcctccacgctgatgcttaggaggaaaggccaagaggcaaaaaatccccctccagcccctgaatgctcaggtttcagcatcttgagtgcagctgagcgcagagttgaagccaaggcatcccacggccaggggcgcgagctctccagggtctcccagcaccaggttcctgttctgagggaaaaacccaaaagggtcaaaagcagttcttgcaaaagagagaagacccccaagttgccctcccctagaagagcggccaaagacaaacacaaagacgaagattcggagctggttggtgtttacgcctggagaaagggacaagctctggtgaggtcgctgcttgggccccctcccgtcctccgcaggcaccatagcaaggatccctcgagagacccggctctcaccgtggacttaggagacagcgagaaagtcatagctgccaagtgctcaccggtttgtgcccagttgcccgatgccacctccgcctacagtgaccagcaggtgtctgggaacacacccagcctggcttccttcgaccagccagcgaccatacagacggccatggccatcctacaagacctgcgccagcaaatccaggctgggctggagctggcccaggcccgcaagggagggcaagagctcgggccatcaaagcggaggctgcaggacgtggcagggaggggctgctgcagggaccccaatgcccagagctccttctctaagagtccctgggccatgacagagaggaagcattcctctttagagagggctaggagtgtccacacctgggagccctggagctcctccactgcacgggagtcctgtccgcagagggcctggggggcccaaggacaggaccgctccttccagaggccggagagtccccatgagaggttgggccacttctcccagaggccctggagtgcactggctgggcaggcctgcagtccgcagagggcctggggggcccaaagacagggcccctcctcccagaggcctgggagcccccctgaaaagcggagccccttcccccagcagccctggagtgctgtagccacacagccctgtccacggagggcctggactgcctgtgaaacctgggaggaccctggccccagactgcggaaccctctggaaaggcccagtcctccagcccagcggccctggagcagctccggcgtgcagagggccggcccccagggcaagggcagaggcatcggctcccccgtctcggctgccaagcatgccctgccaaggcccaccgggagcttccctcagaacccacttgggaaggagaaggacacgctgcggccctgccccaggtcccgggggctcctgggaccctcgcacagctctgagtccttgcgggagttcatgcgccagaaggcgcaggcccggcggcggcaggccctggaggagaaggcctcggccctgcgcacacgggagctgaggagccggaggctgcaggaggtctaccggcagcagagggaggccgtcctcggcagggcggtccccgtggtctcccggaccacccctggcatcgtgacctttgtccccagttctgcacagtccgggggcctggaagcctccgggagcctggagtccccagtgctggaatggagcaaagtgacctctggcatggtgctggggggccaggaagccccaggcagcttctgcctgtgtttgaacagagcctggaaccatgctgagaccctagatcccccagggatggggggcccccaagatggccgggatgcccccgtgctgctgtcagcttcaccctctctgggatccctggagctccaggacctgaccacccgctacctaccccgggggatgtgcatctacctggacccaaaggaggctgagcacctgggcacttccagctccctgcacctccggcataagcaggcgcagctgcaggcgctagagaccacagccaaagtcctcaagcagcgggtcgatagcctcaccgccaagctgcagggtgccgaagcgctggacaccgtcagggacccagctgtgggcctgctgcgctcgtgcccccacagcctacctgccgcccccacgctcgccacccccacgcttgccaccccagcctgccctggagccttggggcccaactggggcagaggggcacctggggagtgggtgagcatgcagccccagccccttctgcccccgacctacttcctggacggcgagacactgtcgtggggccccagctgggagcaacagcagagtgtgagcccgagggcccactgcgagagcaagccccgaggtgtgtctcaggctcctctcctgctgtgatggcttgggtcccccgtcccgtgctcccggctgaccagggagtgaagccaggtgccctcttctccaaggttttccagaggagggacacgtggacgtgaaaccagacaaaaggctgcagagaggcgtggcccccttccaggccctcagcccctctgcggggagctcatatgcgggcccagccacgctgcaccctatctggggctccctgggactggaggagacgccgtcggtcggaggggcagattctgtggcgccctgcaccccccggagctgcggtaagggcgaccctgcggacaggccctgggctggctggtcgggtggccggggcatccaccgagaacaccttccactgcctagcactcgagcttggccctacggggtagagaaatccttttccacgtggagagcatccacgcctcgttattaaaggttttagaggct

SEQ ID NO: 120950 - DNA, 3918 bp, Homo sapiens
  Payload ID: 3705
  Gene Symbol: CCDC187
  Gene Name: coiled-coil domain containing 187
  ENST ID: ENST00000624277
  CDS Start-End: 270-3461
agctcattaggaaggcccccagctgtggccagcccagggccgggctgcccaccgtgccagcccagtttcaatgacccacctgagggtttccatcgtgggccaggggaccggcgcaggcgggcatccggagccaggcagtggccagcccatcccgggcagggtcataggtggggctgcaggcctcgaagccgccatgtgaaggcagcagcgaccccaggcagggcgggccaggttgaccttgcacctgctctcccctcagccccgcggccatgccgaccctggtcgtgggcacgccgcccacctgcctgggggacacacctcagccctgccacaagaacagccagaggcagggccccttctcccatggggccccagggagagcagccgactggaaggctgttgccaagcccaggctctgcgcacctgcagctgaggatgacgtggcagccctgaggtggcccgggccctcccagcagccagacccaccctgggcagctccccacgtggtcgggtctgacgacctcaaggaaccaggaccctgggggaaggcgtgcagcctgcccatgtggtccacaggcccggaggctagggatggggacagctcggtgtcatcgggccgcctctcgtgctcttcggggggccacgacgtgtgtgtgtcttggaaggagaggccaccccaggtgttggggccccagcagaggcccagaaagagtgacgcgcggctggagcagctgagagacaagatccgggcccaggcgtggcagcaggggagctgtgcgtccctgggcacctcagccccctccagcgcctccagactccacaaagcctccacgctgatgcttaggaggaaaggccaagaggcaaaaaatccccctccagcccctgaatgctcaggtttcagcatcttgagtgcagctgagcgcagagttgaagccaaggcatcccacggccaggggcgcgagctctccagggtctcccagcaccaggttcctgttctgagggaaaaacccaaaagggtcaaaagcagttcttgcaaaagagagaagacccccaagttgccctcccctagaagagcggccaaagacaaacacaaagacgaagattcggagctggttggtgtttacgcctggagaaagggacaagctctggtgaggtcgctgcttgggccccctcccgtcctccgcaggcaccatagcaaggatccctcgagagacccggctctcaccgtggacttaggagacagcgagaaagtcatagctgccaagtgctcaccggtttgtgcccagttgcccgatgccacctccgcctacagtgaccagcaggtgtctgggaacacacccagcctggcttccttcgaccagccagcgaccatacagacggccatggccatcctacaagacctgcgccagcaaatccaggctgggctggagctggcccaggcccgcaagggagggcaagagctcgggccatcaaagcggaggctgcaggacgtggcagggaggggctgctgcagggaccccaatgcccagagctccttctctaagagtccctgggccatgacagagaggaagcattcctctttagagagggctaggagtgtccacacctgggagccctggagctcctccactgcacgggagtcctgtccgcagagggcctggggggcccaaggacaggaccgctccttccagaggccggagagtccccatgagaggttgggccacttctcccagaggccctggagtgcactggctgggcaggcctgcagtccgcagagggcctggggggcccaaagacagggcccctcctcccagaggcctgggagcccccctgaaaagcggagccccttcccccagcagccctggagtgctgtagccacacagccctgtccacggagggcctggactgcctgtgaaacctgggaggaccctggccccagactgcggaaccctctggaaaggcccagtcctccagcccagcggccctggagcagctccggcgtgcagagggccggcccccagggcaagggcagaggcatcggctcccccgtctcggctgccaagcatgccctgccaaggcccaccgggagcttccctcagaacccacttgggaaggagaaggacacgctgcggccctgccccaggtcccgggggctcctgggaccctcgcacagctctgagtccttgcgggagttcatgcgccagaaggcgcaggcccggcggcggcaggccctggaggagaaggcctcggccctgcgcacacgggagctgaggagccggaggctgcaggaggtctaccggcagcagagggaggccgtcctcggcagggcggtccccgtggtctcccggaccacccctggcatcgtgacctttgtccccagttctgcacagtccgggggcctggaagcctccgggagcctggagtccccagtgctggaatggagcaaagtgacctctggcatggtgctggggggccaggaagccccaggcagcttctgcctgtgtttgaacagagcctggaaccatgctgagaccctagatcccccagggatggggggcccccaagatggccgggatgcccccgtgctgctgtcagcttcaccctctctgggatccctggagctccaggacctgaccacccgctacctaccccgggggatgtgcatctacctggacccaaaggaggctgagcacctgggcacttccagctccctgcacctccggcataagcaggcgcagctgcaggcgctagagaccacagccaaagtcctcaagcagcgggtcgatagcctcaccgccaagctgcagggtgccgaagcgctggacaccgtcagggacccagctgtgggcctgctgcgctcgtgcccccacagcctacctgccgcccccacgctcgccacccccacgcttgccaccccagcctgccctggagccttggggcccaactggggcagaggggcacctggggagtgggtgagcatgcagccccagccccttctgcccccgacctacttcctggacggcgagacactgtcgtggggccccagctgggagcaacagcagagtgtgagcccgagggcccactgcgagagcaagccccgaggttttccagaggagggacacgtggacgtgaaaccagacaaaaggctgcagagaggcgtggcccccttccaggccctcagcccctctgcggggagctcatatgcgggcccagccacgctgcaccctatctggggctccctgggactggaggagacgccgtcggtcggaggggcagattctgtggcgccctgcaccccccggagctgcggtaagggcgaccctgcggacaggccctgggctggctggtcgggtggccggggcatccaccgagaacaccttccactgcctagcactcgagcttggccctacggggtagagaaatccttttccacgtggagagcatccacgcctcgttattaaaggttttagaggctttcgggaccctctgcgtgctctgtgctcaccacacctgcagtgatgggccctcggtggatgagacccacgtgcttatttcatgacagccatgccccgtgccgctgtgcccagcccacctcctagggcgcttccttacagtcccatcagctcggattcgactttttcttctgctactgagtgttttcatccggggtttccaacgagcagtgcccactgcctggtgcccaagggacccagcagctgctgaagccctgggcttgagggcctcgtgctggcgtgggctgcgctgtaggaccctcctggctggggggcttggcagggcagctggaggggctggtgcagccatgggaactgagtgtggactcagaagtgggggacccccgtttgccgcttcatcattgtctgttgattttcttcaaaagaacaggttttgagcattgga

SEQ ID NO: 120951 - DNA, 1475 bp, Homo sapiens
  Payload ID: 3706
  Gene Symbol: CCDC188
  Gene Name: coiled-coil domain containing 188
  ENST ID: ENST00000439765
  CDS Start-End: 80-1288
cagccccctcagtaagagggtggcaggttgggccaggccagagcctggacctgggatcaggaaggggttgcagggagggatggaggggctgaaaaccctgggcccctgcggccacccccacccccagtgtcccccaaccccagcctccagcagccatggaggaggcctggaccagccctgccagggatttgtagggtggccctgcctgggccccatctcctctgctcactcagtgcagtcccagagacctttcccagtcccaggggcagggggcagtgggcccacagtggagggcgaggctcccgggctctttctgtccagccaggagcagagagcgagagacactgaggggccgagacaaggagacctggaggcagggcttgggtggggctggcccctgcacccagggtcgaaccagggggctcccaggcaggggggatccattggctcagggaccagaccctgcccatgcccacccctgtcacgggagggaggggccctggcctcgcccagggtagccctgtcccagcttcagtgcgggctgctgggctctgcagaacagtccttcctgcagctggagcaggagaaccacagcctgaaaaggcagaatcaggaacttcgggagcagctgggggccctcctggggccggggcagcagttcctgcccctgtgtcccgaacactcaagctgcactgctctggcctggccccccgacccggctggcacgcagcccttggggaacagggcacctctgcagctgctgcggcgggagctgtgccaggggcaagaggctttcgtgcaacagtcccagaacgagctgcagcagatccgcctgtgctttgagaggaagaagatggtcatcacagaggtgtgggacaacgtggctgagatgcacatggccctgaacaaccaggccaccgggctcctgaacctcaagaaggacatccggggcgtgctggaccagatggaggacatccagctggagattctcagggagcgggcccagtgccgcactcgagccaggaaggagaagcagatggcaagcatgtcgaaagggaggccaaagctgggaagctccaagggcctggcaggccagctctggctgctgaccctgaggctgctgctgggcgccctgctggtctggaccgctgcctacgtgtacgtggtgaaccccacacctttcgaggggctggtgccacccctgctgagccgtgccaccgtctggaagctccgggccctgctggaccccttcctgcgcctcaaagtggacggcttcctgcccttctaggccagaggcccagcggccccagcaaggaggccaggcgaccagcactgccccggatgcccagtggccgtgccagccccctgcacatggcaccactgtgcaccatccttgccagaagctgcagagaagggtggaggtggggtctgtcctgagggctgggcctgtggctggacatagaatcatgacataa

SEQ ID NO: 120952 - DNA, 1967 bp, Homo sapiens
  Payload ID: 3707
  Gene Symbol: CCDC189
  Gene Name: coiled-coil domain containing 189
  Uniprot ID: A1A4V9
  ENST ID: ENST00000543610
  CDS Start-End: 963-1958
aagttctgagggttaaggcaagagcccacgaaccgtggaagagatgcctccaagacgaatgggctcgataagagtcgtggtggtcttctcctcacgactcagcttcttttccgggggccctgagcccccgtcgccggcggcgcgtttgttgcctggcccagacatggccgcggcggctggagcgatgcagggtcccctgaggggcgtcaaacgggaggaggcggtacttccgtcacctgcagaagacacagagcagagatgtgggaacggctggtgttccacagccccaaacaccctccaccctgcacacacctgctggatcccgtcccccccggcgccagagccctcaccagcaggagggtcagcctagcgccgccatcttggatttcaccggacgtcactgggcgtcactggacgccactgccccccccccaacggtgcgcagggcgcaggcgccaaaggcagccccggatgtgaggaaacttctttatcttctgcttctattggttacgcttggtcccgccactcgggtcctctggcttcttcccaaacacctcctctttctctcggtgattggccaagaggcagttcccatagtaactgacaccgcgctcccacttcccagcctggaggacagcaccggccctcgtattagcaacctggaagagagggcgcccaggtgggcactcgcaacttctcacgtatctgcgcgttctcttcgctcccactggcgtgagcctgcgctttccgccttccttccctcacaagcccccttggcaaccgtcgccgttgagacggagggagacgcccccacggattcgccccgccgcgcctctccgcgcgtagattggccggagcgaggcgaacgggcccggccttggtagccgccgaccgagcgctggctgtcctggaacctaggcggcgggagcccggggcgcctcgcggcacggaagagcggcgagatgctcaaccgcaagaccagccactttttgggaatgagggtgcagtcggagcttgaacatctctccgagctgcggcgggaagcggggaaggatcgcagctcagtgcatgggtcggccgcgcggacgcgtgcgagtgtgcggactcagtggacgacggcggcggcggcgaaagcggatgaagaccccggagccaacttgtttccgccgccgctgccccgaccccggatctgcatgtggaagtacctggacgtccattccatgcaccagctggagaagaccaccaatgctgagatgagggaggtgctggctgagctgctggagctagggtgtcctgagcagagcctgagggacgccatcaccctggacctcttctgccacgcgctcattttctgccgccagcagggcttctcactggagcagacgtcagcggcttgtgccctgctccaggatcttcacaaggcttgtattgcaacccccttgggcaacgtggaggagtgctaccgctacttcaccagtgtccttttttgccatggagtcaggcggcctcctttcagcatcgacctcttcaaagaggaacagctgctggccttggaagactacgtggtcaacacttacttccgccacttcaagctctataaatacgtcttcacaccccaggtgcggctggatctgtctttgacttacatggggctacagccacccaaactgtggccagagagtgagacggagaaagaagaaagcaaggagatggaggagcaggcagttaccccgcagaaagaggaactagagacagtggccccaccagagccagagccaagccacatccacgtcctccgagcctacatcaagacccaagtgaacaaagagctggagcagctccaggggctggtggaggagcggctcaaggccagcgaggaaaggctcagcagcaagttgactgcactagagcggcccttccagctacctccgggtaaaggcaagagcaagaccaagtgacccccaaca

SEQ ID NO: 120953 - DNA, 1046 bp, Homo sapiens
  Payload ID: 3707
  Gene Symbol: CCDC189
  Gene Name: coiled-coil domain containing 189
  Uniprot ID: A1A4V9
  ENST ID: ENST00000545825
  CDS Start-End: 331-864
gacagcaccggccctcgtattagcaacctggaagagagggcgcccaggtgggcactcgcaacttctcacgtatctgcgcgttctcttcgctcccactggcgtgagcctgcgctttccgccttccttccctcacaagcccccttggcaaccgtcgccgttgagacggagggagacgcccccacggattcgccccgccgcgcctctccgcgcgtagattggccggagcgaggcgaacgggcccggccttggtagccgccgaccgagcgctggctgtcctggaacctaggcggcgggagcccggggcgcctcgcggcacggaagagcggcgagatgctcaaccgcaagaccagccactttttgggaatgagggtgcagtcggagcttgaacatctctccgagctgcggcgggaagcggggaaggatcgcagctcagtgcatgggtcggccgcgcggacgcgtgcgagtgtgcggactcagtggacgacggcggcggcggcgaaagcggatgaagaccccggagccaacttgtttccgccgccgctgccccgaccccggatctgcatgtggaagtacctggacgtccattccatgcaccagctggagaagaccaccaatgctgagatgagggaggtgctggctgagctgctggagctagggtgtcctgagcagagcctgagggacgccatcaccctggacctcttctgccacgcgctcattttctgccgccagcagggcttctcactggagcagacgtcagcggcttgtgccctgctccaggatcttcacaaggcttgtattggtgagagggggcagctaccaggtttgagccccagggagaagaggaaccgggcctggcacaagtgaccatgggaagcagaagcaggggatttctgcctggaatatgtcattattagtagcatcatcatacacaagccatcagctttccaatccactgcttccttatctagaaattaaggatacagcacacattttacaggactgttctgagaaataatatatgcaaatatatgcatagtgcacaataa

SEQ ID NO: 120954 - DNA, 488 bp, Homo sapiens
  Payload ID: 3707
  Gene Symbol: CCDC189
  Gene Name: coiled-coil domain containing 189
  ENST ID: ENST00000535476
  CDS Start-End: 1-437
caacccccttgggcaacgtggaggagtgctaccgctacttcaccagtgtccttttttgccatggagtcaggcggcctcctttcagcatcgacctcttcaaagaggaacagctgctggccttggaagactacgtggtcaacacttacttccgccacttcaagctctataaatacgtcttcacaccccaggtgcggctggatctgtctttgacttacatggggctacagccacccaaactgtggccagagagtgagacgggccacatccacgtcctccgagcctacatcaagacccaagtgaacaaagagctggagcagctccaggggctggtggaggagcggctcaaggccagcgaggaaaggctcagcagcaagttgactgcactagagcggcccttccagctacctccgggtaaaggcaagagcaagaccaagtgacccccaacattttccccaataaaggtctgggccagaatggcaccatccctg

SEQ ID NO: 120955 - DNA, 1055 bp, Homo sapiens
  Payload ID: 3707
  Gene Symbol: CCDC189
  Gene Name: coiled-coil domain containing 189
  ENST ID: ENST00000545809
  CDS Start-End: 338-553
cctggaggacagcaccggccctcgtattagcaacctggaagagagggcgcccaggtgggcactcgcaacttctcacgtatctgcgcgttctcttcgctcccactggcgtgagcctgcgctttccgccttccttccctcacaagcccccttggcaaccgtcgccgttgagacggagggagacgcccccacggattcgccccgccgcgcctctccgcgcgtagattggccggagcgaggcgaacgggcccggccttggtagccgccgaccgagcgctggctgtcctggaacctaggcggcgggagcccggggcgcctcgcggcacggaagagcggcgagatgctcaaccgcaagaccagccactttttgggaatgagggtgcagtcggagcttgaacatctctccgagctgcggcgggaagcggggaaggatcgcagctcagtgcatgggtcggccgcgcggacgcgtgcgagtgtgcggactcagtggacgacggcggcggcggcgaaagcggatgaagaccccggagccaacttgtttccgtccttgagatgagatggcaagttacagcggcttctccggcctgctggagattcgctacgggccaggacaccgcagctgccttccccaattcgctttctttccgcagccgccgctgccccgaccccggatctgcatgtggaagtacctggacgtccattccatgcaccagctggagaagaccaccaatgctgagatgagggagtagggactgaggggggcgtgggaagagctcttggcaaaggctgaggggtcaggttgggaaaacatgaggaatggctgactccaaagcatgtggtgggtgtagggtgatgaaaggaggcccagttgtcactcactcctctctccctcccaagggtgctggctgagctgctggagctagggtgtcctgagcagagcctgagggacgccatcaccctggacctcttctgccacgcgctcattttctgccgccagcagggcttctcactggagcagacgtcagcggcttgtgccctgctccaggatcttcacaagg

SEQ ID NO: 120956 - DNA, 555 bp, Homo sapiens
  Payload ID: 3707
  Gene Symbol: CCDC189
  Gene Name: coiled-coil domain containing 189
  ENST ID: ENST00000544613
  CDS Start-End: 1-275
gagcagagcctgagggacgccatcaccctggacctcttctgccacgcgctcattttctgccgccagcagggcttctcactggagcagacgtcagcggcttgtgccctgctccaggatcttcacaaggcttgtattgcggcctcctttcagcatcgacctcttcaaagaggaacagctgctggccttggaagactacgtggtcaacacttacttccgccacttcaagctctataaatacgtcttcacaccccaggtgcggctggatctgtctttgacttacatggggctacagccacccaaactgtggccagagagtgagacgggccacatccacgtcctccgagcctacatcaagacccaagtgaacaaagagctggagcagctccaggggctggtggaggagcggctcaaggccagcgaggaaaggctcagcagcaagttgactgcactagagcggcccttccagctacctccgggtaaaggcaagagcaagaccaagtgacccccaacattttccccaataaaggtctgggccagaatggcaccatccctgca

SEQ ID NO: 120957 - DNA, 1531 bp, Homo sapiens
  Payload ID: 3707
  Gene Symbol: CCDC189
  Gene Name: coiled-coil domain containing 189
  ENST ID: ENST00000541260
  CDS Start-End: 332-1522
ggacagcaccggccctcgtattagcaacctggaagagagggcgcccaggtgggcactcgcaacttctcacgtatctgcgcgttctcttcgctcccactggcgtgagcctgcgctttccgccttccttccctcacaagcccccttggcaaccgtcgccgttgagacggagggagacgcccccacggattcgccccgccgcgcctctccgcgcgtagattggccggagcgaggcgaacgggcccggccttggtagccgccgaccgagcgctggctgtcctggaacctaggcggcgggagcccggggcgcctcgcggcacggaagagcggcgagatgctcaaccgcaagaccagccactttttgggaatgagggtgcagtcggagcttgaacatctctccgagctgcggcgggaagcggggaaggatcgcagctcagtgcatgggtcggccgcgcggacgcgtgcgagtgtgcggactcagtggacgacggcggcggcggcgaaagcggatgaagaccccggagccaacttgtttccgccgccgctgccccgaccccggatctgcatgtggaagtacctggacgtccattccatgcaccagctggagaagaccaccaatgctgagatgagggaggtgctggctgagctgctggagctagggtgtcctgagcagagcctgagggacgccatcaccctggacctcttctgccacgcgctcattttctgccgccagcagggcttctcactggagcagacgtcagcggcttgtgccctgctccaggatcttcacaaggcttgtattgcaacccccttgggcaacgtggaggagtgctaccgctacttcaccagtgtccttttttgccatggagtcagggtcagttcccctggaacattctggaaactttacccatccccagacaaggtctcacccagtctctctcacattcatcacccttatcttcttgtgaagaccccagtgggctctccttgctcctgttgctgggcttttggaggcaaagccagggctccggaaggtagtcagggttctaattccgagtcaccaccacagcggcctcctttcagcatcgacctcttcaaagaggaacagctgctggccttggaagactacgtggtcaacacttacttccgccacttcaagctctataaatacgtcttcacaccccaggtgcggctggatctgtctttgacttacatggggctacagccacccaaactgtggccagagagtgagacggagaaagaagaaagcaaggagatggaggagcaggcagttaccccgcagaaagaggaactagagacagtggccccaccagagccagagccaagccacatccacgtcctccgagcctacatcaagacccaagtgaacaaagagctggagcagctccaggggctggtggaggagcggctcaaggccagcgaggaaaggctcagcagcaagttgactgcactagagcggcccttccagctacctccgggtaaaggcaagagcaagaccaagtgacccccaaca

SEQ ID NO: 120958 - DNA, 1498 bp, Homo sapiens
  Payload ID: 3708
  Gene Symbol: CCDC190
  Gene Name: coiled-coil domain containing 190
  Uniprot ID: Q86UF4
  ENST ID: ENST00000367910
  CDS Start-End: 122-1030
gtgccaggcaggaatggcctgctaggagatgcagtgagcccccaggacctctccactgcctcctccacccctgtatttcacttggctctccaaattgactcaactccagaccataaagaagatggagaggcacatggtcaggggacaattgtataagcattttgatttggagaggaagaatgccaagcaggctgaagccagactggaccaaagactgcagagactaaaggttatttgcctctaccatgtgaaattgctgacctgggagcagaggcagctccaaaaagaactgcagaggttgcagcaagcagaaaccatgaagaaaaagttctcctcttatttggggaatggatttcagaagagaccagaagatgttctcgtgttctcaccacagggaaggcagaagcacagagccccacaggctaagaaaatgagagcattggcaacccgtatggcccaagacacatgcaaaagcaagtcccaggtgcctccttcacatgatgctggcctcaaagaccccatgaagagcaaaaagcagccactctctcaaaataacagaactgcctgcttcataaaagagcaaccacaagcccaagagaaagattctgtgaatccatctaaggacgtagaccccagcaagggcatctctgttccatgccaaaatcaagaggtttccaccaacaccatagaacaaggtcctagttccagcccagctagtgatagtggaatggcatgtgctgatgagaccagatcaaaagatgttgctctaaagccagatgggaacactggaaaacaaattcccccaaaacacatggaatgtgcaggaagcttcgaaggcgagttcacaaagccaaccttcttagagttgctttcaaaggccagaaatgcccattatctccggcacagggtcccccctgagtctgagaggttgcttagcattggagagatatttgggcatggggaatcctcatcatccagggcaggaaaggagtgtgaaaacagggtgccttctaagtttcttcctctctaaccgtttaacatagcctgacaataacatatgccattattgctaaggaaatgtgttcctcaaatgactatattaagcaatacagagaaaaacaaacaaacataattgaattacaattttattttaaactccctattattttccgggaatataatatttcttgaatgaacaatgctaatatatgaaaaaggagaggaagaatgaatcttctgaaaatattttaagtgatatgtttatgatgtcatcaaaaatatgaatatatattgatgactggacttgggaaaacagtaacagtcttgctttcagggacttcctgtttcctctaggagattctcatggtgccacctgctggcaaaacggcatagctattctctctgttttagtttgatatatagtagtggtaggaataggaatgtgattgtaaataggtactgtaacatggtctataaagaaaatctgctctttaaccac

SEQ ID NO: 120959 - DNA, 1395 bp, Homo sapiens
  Payload ID: 3708
  Gene Symbol: CCDC190
  Gene Name: coiled-coil domain containing 190
  Uniprot ID: Q86UF4
  ENST ID: ENST00000367911
  CDS Start-End: 19-927
ctctagaccataaagaagatggagaggcacatggtcaggggacaattgtataagcattttgatttggagaggaagaatgccaagcaggctgaagccagactggaccaaagactgcagagactaaaggttatttgcctctaccatgtgaaattgctgacctgggagcagaggcagctccaaaaagaactgcagaggttgcagcaagcagaaaccatgaagaaaaagttctcctcttatttggggaatggatttcagaagagaccagaagatgttctcgtgttctcaccacagggaaggcagaagcacagagccccacaggctaagaaaatgagagcattggcaacccgtatggcccaagacacatgcaaaagcaagtcccaggtgcctccttcacatgatgctggcctcaaagaccccatgaagagcaaaaagcagccactctctcaaaataacagaactgcctgcttcataaaagagcaaccacaagcccaagagaaagattctgtgaatccatctaaggacgtagaccccagcaagggcatctctgttccatgccaaaatcaagaggtttccaccaacaccatagaacaaggtcctagttccagcccagctagtgatagtggaatggcatgtgctgatgagaccagatcaaaagatgttgctctaaagccagatgggaacactggaaaacaaattcccccaaaacacatggaatgtgcaggaagcttcgaaggcgagttcacaaagccaaccttcttagagttgctttcaaaggccagaaatgcccattatctccggcacagggtcccccctgagtctgagaggttgcttagcattggagagatatttgggcatggggaatcctcatcatccagggcaggaaaggagtgtgaaaacagggtgccttctaagtttcttcctctctaaccgtttaacatagcctgacaataacatatgccattattgctaaggaaatgtgttcctcaaatgactatattaagcaatacagagaaaaacaaacaaacataattgaattacaattttattttaaactccctattattttccgggaatataatatttcttgaatgaacaatgctaatatatgaaaaaggagaggaagaatgaatcttctgaaaatattttaagtgatatgtttatgatgtcatcaaaaatatgaatatatattgatgactggacttgggaaaacagtaacagtcttgctttcagggacttcctgtttcctctaggagattctcatggtgccacctgctggcaaaacggcatagctattctctctgttttagtttgatatatagtagtggtaggaataggaatgtgattgtaaataggtactgtaacatggtctataaagaaaatctgctctttaaccac

SEQ ID NO: 120960 - DNA, 2605 bp, Homo sapiens
  Payload ID: 3708
  Gene Symbol: CCDC190
  Gene Name: coiled-coil domain containing 190
  Uniprot ID: Q86UF4
  ENST ID: ENST00000367912
  CDS Start-End: 176-799
ccccatggagttctacccctgctcctctggtcaccctcctgatggatccccatggtgccaggcaggaatggcctgctaggagatgcagtgagcccccaggacctctccactgcctcctccacccctgtatttcacttggctctccaaattgactcaactccagaccataaagaagatggagaggcacatggtcaggggacaattgtataagcattttgatttggagaggaagaatgccaagcaggctgaagccagactggaccaaagactgcagagactaaaggttatttgcctctaccatgtgaaattgctgacctgggagcagaggcagctccaaaaagaactgcagaggttgcagcaagaaaccatgaagaaaaagttctcctcttatttggggaatggatttcagaagagaccagaagatgttctcgtgttctcaccacagggaaggcagaagcacagagccccacaggctaagaaaatgagagcattggcaacccgtatggcccaagacacatgcaaaagcaagtcccaggtgcctccttcacatgatgctggcctcaaagaccccatgaagagcaaaaagcagccactctctcaaaataacagaactgcctgcttcataaaagagcaaccacaagcccaagagaaagattctgtgaatccatctaaggacgtagaccccagcaagggcatctctgttccatgccaaaatcaagaggtttccaccaacaccatagaacaaggtcctagttccagcccagcctctggccttcaatggggagacaatactttatagtgaaaggaacacaagaaatctgcttcctccaacactttcttccatgaagcaaagcaacagaggaaggcaggccataagtgacagaactgattgattcacaaaaacttaatttatttgcaccagccatgcctgggccaacatgaataggcatacaacaattagagaacccctttgtaaactgcgcaagctctttcctaaaagttctttcttcttgtcttctacgcaagccttgcctatcgtcatcacaattctccctcaaggctgagtcctgagtgaatggtttgtcactgctaagtgggtcttttcactgtactagctctcacagcgggaaggggccatcacaaggcaggagggagccaacttcagcctagttctctgttccaggtccacctcaatcctgccatctacagaagtgaacattctgcatgttcctccttgctatcttgcttgtgtcttcatatacatctgacagacccagatctgtctgcacttctaaaatcaatattttagtacatcctgttttaaataatattccatgcatcgccaaaaaattatacatttaaaaatcttctaaccacctagattttatcttcttatcatttagtctaatacatttgccttcttcgatacaatggatgtaatactctgattagtacaacttaactcaatcaaagagaacgctgctgcatggaacctttcttgtgtaactcattaaattctaaacagtttaaatccttaatcctgacgtggcacacggtgctctaggatggcttgctctcgaccagtccatggccactttacttataccagtggttctcagctaggagcaaatgtgccccctgtccccagaaaacatccagcactgtccagagatatttctggttgtcataactgaggtgagggggctgccactggagtctagtaggtagggaccataaattctataatacatggggcagccctctaaaacaaagaattaacaagcccgaaacatcaatagcgccaagattggaaactccaccctgtgccattacattaaatattcacagaaccttctgagacagaaaatcagggagatacttgctgccattttacagataaagaaattgaggctcatgataagtaaaatagctttctccataccagaatgtggatgaggaacaaagaccagggtactcttttcccatactctcctctcaaagaagatggggaagggcatgtgtccgatggctcctgccctcgttttcagttaagaaatgctttcaaccctacaaatacaaatctttaacattcaaattagtaacacatggttagaagggataatttatacttcaattttgaggaaacattttttattacattcattcattcattcattcattcagagatgtactggggacagatgatcccttccccatttcctcccccatgaggaagaaggggcttttgacttgttgccttaactcattcaatgggaaaagattccatttttcacctacaggcagaggcagctggaaactcccagaagtagaggctcagtctctctggaggctactgaagagcaccctgaagggtgtcacaatcctcagtgttgggggaaagttgggtaagtttttaccatgaacactggagggaccagctcctctcagggtgaaatgagccttgaaggaaggacagagggaatcacgcttgggcaagtgttttgccctcacaccaagagtaccagggaagcagagggtaccagtccaaacagatgtcagcagctctatctcaccaatgacagccagaatagcaagcaaccactgc

SEQ ID NO: 120961 - DNA, 3976 bp, Homo sapiens
  Payload ID: 3709
  Gene Symbol: CCDC191
  Gene Name: coiled-coil domain containing 191
  Uniprot ID: Q8NCU4
  ENST ID: ENST00000295878
  CDS Start-End: 148-2958
gcctcgtgggagtggtggttcgacggtgtcctatgcctgctttccttgcgggcggaggaactacaattcccagcgtgacccggaggcagcccgggcagaagggcggttgctgcagctttggccgaggttcgggctcgaacttggaaaatgctcctggcgcctcagggaaggtccttctcaaagaaaaggatggggctgaatcgctggaaacggttcacaaggaagccgagtcccaagcctacttttggtcctgacagtgtggaacactggataaagagagtggagaaagcctcagagtttgcagtgtcaaatgcattttttactagaaattcagatttacctagaagtccctggggccaaatcacagatttgaaaacatctgagcaaatagaggatcatgatgaaatctatgcagaagctcaggagctggtcaatgactggttagacaccaaacttaagcaagaattagcaagtgaggaagaaggtgatgctaaaaacactgtgtcaagtgtcactattatgccggaagccaatggccatttgaaatatgacaagtttgatgatttatgtggctatttggaggaagaagaggaaagtaccaccgttcaaaaatttatagaccatctgctccataaaaatgtggtagattctgcaatgatggaagatcttggaaggaaggaaaaccaagacaagaagcagcagaaggatcctcgtcttaccatggagatgagacataagcaggtaaaagaaaatcgcttaagacgtgagaaagaactggagtaccagagaatagaaaagaccctgaaaaaatcggccttcttggaggctcagtgtctggtgcaagaagagaagaaaaggaaggctctggaggccaagaaagaggaagaggagattcaaagggagatggtgaagctgcggagggagataattgagaggagacgcactgtgaaagcagcatggaaaatagagaagaaaaggcaagaagagaattctcaaaatagttcagaaaaagtcatgtttcaaagtactcacattcttccagatgaggaaaaaatggtgaaggaaagaaaaaggaaattgaaagaagtattaatccaaactttcaaagaaaatcaacagtgtcaaaaacggtatttcgctgcctggcacaagctgattcttgatcataggattaagctggggaaagctgggaccctgtctgactggaagattcagctgaaggtcctgcgggcctggagagactacacaagattccagaagttggagcgggagactcaagccttggaaaatgatcttagggaagaaaacagaaaacaacaactggccactgagtataaccggaaacaagttctccgacactgctttacagaatggcagcattggcatggcgccgagctcctgaagagagagctggctctcacaaaagaggaaactaggaagaagatggatgcactgctgcaggcagcatcactggggaaactcagtgccaatgggttatcaggcatcagtctacctgaggaggcaacagccatggtgggtccaccagtaaaaaatggacaggagactgctgtgccccctttgtgggaaaagcctcccttgggaagcagtggttgtatgctcagtcctcccctgggaagaacaacaacaggcaacttgcagggttcccttcagaatgtctctctgagtgcacctggcaataagcagcacaagaccctgggtgctgaaccctctcaacagcctggcagcaacgagacactcagaactaccagccagaaagcagaaccgctttgcttgggtcatttccacaaccgccatgtcttccagcaacagctgattgagaagcaaaagaagaaacttcaggaacagcagaaaacaattctcgagctgaagaaaaacctgcagctggcagaggctcagtgggcagcagagcatgccttagcagtcacagaagcacagagccacctgctgtcaaagcccagagaagaggaaccaagaacctgccagatgcttgtgaattcacctgttgcttcccctgggactgaaggcagaagtgactcccgaaattctctttctggactcagaaggaaaccaaagcaattgatgacaccgcatcccatactaaaagctatggaagagagagcaattcaacgagctgaatgtaggcggatcttggcagagaagaagaaaaaacaagaagaagaaaaattggcccagttaaaggcccaagaggaggaacgtcagaaaagggaggcagaagaaaaggaggcacagcttgaaagaaaacgagaagagaagagactgaagaaaatgaaagaacttgagaagcagaagagaattaagaggaaccagcagctggaagcaatagccaaagaacattatgaaagggtcttgctaaggaaaaaaggtctagagccttggaagagattgagaatgcaaagcaaacaaaacatccaggtggcagaagaacattactctttgttcctgcagaggaaatacatgctgacgtggttccagcgtagtcaggaaagtctggctagaaagatggcccaggctgatcaattttattcccaaatactgcttaagagagtcatccagagctggctacagtacgtgattgatctgcaggaagaagtaagaaaattttgtgtacattttcttcaaaagaagattttcagggcctggtttaacatggtcagggaggtgaagatcgattctcagggcaagcatgagattgcagcggagcacagtgacaggaggatcctctggatcacccttcggacatggaagaagtttgtaaaatttatgaaagaggaaagagtaaaagaagaaaggcgacagcaacttcgtaggaaggtagttgaaattcttccagacttccaggtacctggaaggtaccacgagctatatcagcaatcagatacttggtccttgagtaagacaagtctggtgaacgaatgagccagattagtgtaatatttaggacaggaagctcgactagtctgtatgtgtgttatctccacccacccacacacatacatacatacacctggtttattctctacgagctacttcttagatcaaaggaattattttgagaatttttattcccttctttgacttttcctggattgctagtcattcactatagcatttatcacagtgggatcatccaaaggaacattctagagatcgtctgttcaaatatatcctatatatttttagcatagtaaactttaaaaaggacaagtgtttgcctgactgagcctgtgaagaaaatgtgtccgtatagcacgacaggagttgctgatgtgaccttaatgaaacagaaataaacaggggtgagtgctcggaaaggaagggcgggccaaggcactcagccttctagtgcagtagcatcagtgacacgcaccccaccagacctcgtccactttcaccacccctgaaggcagaccatgtatgaaaaggttctctacacagctgctgcagaggacagcagcttatcctgatttcagagaaactgaggcaccagagatgcttctcttccgtgcaccttgataagcatgaaggacattccaaaaggtaatagctctatcatgacagtccagcaattcattaaattatctgttcatgctcccacctgcaactgctgaataatacactcagtttgtcttctagtactcagctcagtttgatctagatattgagatacctatcttgaattcaaagaatgttttcatctttaagatgctataaagactgataaaatgctctcttctatgaattgtgttagagaattacctgctagaaaaataatttttcattataaaatacacatttattatataacaaattcaagtagtccataaatgcatatggtaaaatgagaaagtcctgtgcagtcctgagatgattactcttatttggtgtgctgaaaatttgagttgacaaaataaaattctgtggttttttaagtgaa

SEQ ID NO: 120962 - DNA, 1957 bp, Homo sapiens
  Payload ID: 3709
  Gene Symbol: CCDC191
  Gene Name: coiled-coil domain containing 191
  ENST ID: ENST00000491000
  CDS Start-End: 129-1957
tcgacggtgtcctatgcctgctttccttgcgggcggaggaactacaattcccagcgtgacccggaggcagcccgggcagaagggcggttgctgcagctttggccgaggttcgggctcgaacttggaaaatgctcctggcgcctcagggaaggtccttctcaaagaaaaggatggggctgaatcgctggaaacggttcacaaggaagccgagtcccaagagagtggagaaagcctcagagtttgcagtgtcaaatgcattttttactagaaattcagatttacctagaagtccctggggccaaatcacagatttgaaaacatctgagcaaatagaggatcatgatgaaatctatgcagaagctcaggagctggtcaatgactggttagacaccaaacttaagcaagaattagcaagtgaggaagaaggtgatgctaaaaacactgtgtcaagtgtcactattatgccggaagccaatggccatttgaaatatgacaagtttgatgatttatgtggctatttggaggaagaagaggaaagtaccaccgttcaaaaatttatagaccatctgctccataaaaatgtggtagattctgcaatgatggaagatcttggaaggaaggaaaaccaagacaagaagcagcagaaggatcctcgtcttaccatggagatgagacataagcaggtaaaagaaaatcgcttaagacgtgagaaagaactggagtaccagagaatagaaaagaccctgaaaaaatcggccttcttggaggctcagtgtctggtgcaagaagagaagaaaaggaaggctctggaggccaagaaagaggaagaggagattcaaagggagatggtgaagctgcggagggagataattgagaggagacgcactgtgaaagcagcatggaaaatagagaagaaaaggcaagaagagaattctcaaaatagttcagaaaaagtcatgtttcaaagtactcacattcttccagatgaggaaaaaatggtgaaggaaagaaaaaggaaattgaaagaagtattaatccaaactttcaaagaaaatcaacagtgtcaaaaacggtatttcgctgcctggcacaagctgattcttgatcataggattaagctggggaaagctgggaccctgtctgactggaagattcagctgaaggtcctgcgggcctggagagactacacaagattccagaagttggagcgggagactcaagccttggaaaatgatcttagggaagaaaacagaaaacaacaactggccactgagtataaccggaaacaagttctccgacactgctttacagaatggcagcattggcatggcgccgagctcctgaagagagagctggctctcacaaaagaggaaactaggaagaagatggatgcactgctgcaggcagcatcactggggaaactcagtgccaatgggttatcaggcatcagtctacctgaggaggcaacagccatggtgggtccaccagtaaaaaatggacaggagactgctgtgccccctttgtgggaaaagcctcccttgggaagcagtggttgtatgctcagtcctcccctgggaagaacaacaacaggcaacttgcagggttcccttcagaatgtctctctgagtgcacctggcaataagcagcacaagaccctgggtgctgaaccctctcaacagcctggcagcaacgagacactcagaactaccagccagaaagcagaaccgctttgcttgggtcatttccacaaccgccatgtcttccagcaacagctgattgagaagcaaaagaagaaacttcaggaacagcagaaaacaattctcgagctgaagaaaaacctgcagctggcagaggctcagtgggcagcagagcatgccttagcagtcacagaagcacagagccacctgctgtcaaagcccagagaagaggaaccaagaacctgccagatgcttgtgaa

SEQ ID NO: 120963 - DNA, 2881 bp, Homo sapiens
  Payload ID: 3709
  Gene Symbol: CCDC191
  Gene Name: coiled-coil domain containing 191
  ENST ID: ENST00000460813
  CDS Start-End: 84-329
aattcccagcgtgacccggaggcagcccgggcagaagggcggttgctgcagctttggccgaggttcgggctcgaacttggaaaatgctcctggcgcctcagggaaggtccttctcaaagaaaaggatggggctgaatcgctggaaacggttcacaaggaagccgagtcccaagagagtggagaaagcctcagagtttgcagtgtcaaatgcattttttactagaaattcagatttacctagaagtccctggggccaaatcacagatttgaaaacatctgagcaaatagaggatcatgatgaaatctatgcagaaggagctggtcaatgactggttagacaccaaacttaagcaagaattagcaagtgaggaagaaggtgatgctaaaaacactgtgtcaagtgtcactattatgccggaagccaatggccatttgaaatatgacaagtttgatgtagagctctcaagattgtttagattgaagttctcaaggttgtttagattgaaatcttttagatttggcagtgaaggactctttagtgacttgggtgagggcaattcttgatttatgtggctatttggaggaagaagaggaaagtaccaccgttcaaaaatttatagaccatctgctccataaaaatgtggtagattctgcaatgatggaagatcttggaaggaaggaaaaccaagacaagaagcagcagaaggatcctcgtcttaccatggagatgagacataagcaggtaaaagaaaatcgcttaagacgtgagaaagaactggagtaccagagaatagaaaagaccctgaaaaaatcggccttcttggaggctcagtgtctggtgcaagaagagaagaaaaggaaggctctggaggccaagaaagaggaagaggagattcaaagggagatggtgaagctgcggagggagataattgagaggagacgcactgtgaaagcagcatggaaaatagagaagaaaaggcaagaagagaattctcaaaatagttcagaaaaagtcatgtttcaaagtactcacattcttccagatgaggaaaaaatggtgaaggaaagaaaaaggaaattgaaagaagtattaatccaaactttcaaagaaaatcaacagtgtcaaaaacggtatttcgctgcctggcacaagctgattcttgatcataggattaagctggggaaagctgggaccctgtctgactggaagattcagctgaaggtcctgcgggcctggagagactacacaagattccagaagttggagcgggagactcaagccttggaaaatgatcttagggaagaaaacagaaaacaacaactggccactgagtataaccggaaacaagttctccgacactgctttacagaatggcagcattggcatggcgccgagctcctgaagagagagctggctctcacaaaagaggaaactaggaagaagatggatgcactgctgcaggcagcatcactggggaaactcagtgccaatgggttatcaggcatcagtctacctgaggaggcaacagccatggtgggtccaccagtaaaaaatggacaggagactgctgtgccccctttgtgggaaaagcctcccttgggaagcagtggttgtatgctcagtcctcccctgggaagaacaacaacaggcaacttgcagggttcccttcagaatgtctctctgagtgcacctggcaataagcagcacaagaccctgggtgctgaaccctctcaacagcctggcagcaacgagacactcagaactaccagccagaaagcagaaccgctttgcttgggtcatttccacaaccgccatgtcttccagcaacagctgattgagaagcaaaagaagaaacttcaggaacagcagaaaacaattctcgagctgaagaaaaacctgcagctggcagaggctcagtgggcagcagagcatgccttagcagtcacagaagcacagagccacctgctgtcaaagcccagagaagaggaaccaagaacctgccagatgcttgtgaattcacctgttgcttcccctgggactgaaggcagaagtgactcccgaaattctctttctggactcagaaggaaaccaaagcaattgatgacaccgcatcccatactaaaaggcagggctgtctcggtggtggccttggtggttgttatcttctctcctagagtagaatgtgtacactgggactgaattctggcaactcttgaggttttgagacttggcagaacctgacatcaaaaatctcagaatggtagacatgtgaggagtggagtacaccagagagccccactacttttttcctgccccttttgccaacctttttggcattcccagccaacacacacacaaaaaaacatagctgaaagctatggaagagagagcaattcaacgagctgaatgtaggcggatcttggcagagaagaagaaaaaacaagaagaagaaaaattggcccagttaaaggcccaagaggaggaacgtcagaaaagggaggcagaagaaaaggaggcacagcttgaaagaaaacgagaagagaagagactgaagaaaatgaaagaacttgagaagcagaagagaattaagaggaaccagcagctggaagcaatagccaaagaacattatgaaagggtcttgctaaggaaaaaaggtctagagccttggaagagattgagaatgcaaagcaaacaaaacatccaggtggcagaagaacattactctttgttcctgcagaggaaatacatgctgacgtggttccagcgtagtcaggaaagtctggctagaaagatggcccaggctgatcaattttattcccaaatactgcttaagagagtcatccagagctggctacagtacgtgattgatctgcaggaaga

SEQ ID NO: 120964 - DNA, 591 bp, Homo sapiens
  Payload ID: 3709
  Gene Symbol: CCDC191
  Gene Name: coiled-coil domain containing 191
  ENST ID: ENST00000483766
  CDS Start-End: 1-591
gtgacccggaggcagcccgggcagaagggcggttgctgcagctttggccgaggttcgggctcgaacttggaaaatgctcctggcgcctcagggaaggtccttctcaaagaaaaggatggggctgaatcgctggaaacggttcacaaggaagccgagtcccaagctcaggagctggtcaatgactggttagacaccaaacttaagcaagaattagcaagtgaggaagaaggtgatgctaaaaacactgtgtcaagtgtcactattatgccggaagccaatggccatttgaaatatgacaagtttgatgatttatgtggctatttggaggaagaagaggaaagtaccaccgttcaaaaatttatagaccatctgctccataaaaatgtggtagattctgcaatgatggaagatcttggaaggaaggaaaaccaagacaagaagcagcagaaggatcctcgtcttaccatggagatgagacataagcaggtaaaagaaaatcgcttaagacgtgagaaagaactggagtaccagagaatagaaaagaccctgaaaaaatcggccttcttggaggctcagtgtctggtgcaagaa

SEQ ID NO: 120965 - DNA, 593 bp, Homo sapiens
  Payload ID: 3709
  Gene Symbol: CCDC191
  Gene Name: coiled-coil domain containing 191
  ENST ID: ENST00000463695
  CDS Start-End: 22-138
gttcgggctcgaacttggaaaatgctcctggcgcctcagggaaggtccttctcaaagaaaaggatggggctgaatcgctggaaacggttcacaaggaagccgagtcccaagctcaggagctggtcaatgactggttagacaccaaacttaagcaagaattagcaagtgaggaagaaggtgatgctaaaaacactgtgtcaagtgtcactattatgccggaagccaatggccatttgaaatatgacaagtttgatggatctccctctgttgtgcagtggtgatcatagctcactgcagccttgaactcctgggttcaagaaatcctccagcctcagcctccctagtagctgaaactacagatttatgtggctatttggaggaagaagaggaaagtaccaccgttcaaaaatttatagaccatctgctccataaaaatgtggtagattctgcaatgatggaagatcttggaaggaaggaaaaccaagacaagaagcagcagaaggatcctcgtcttaccatggagatgagacataagcaggtaaaagaaaatcgcttaagacgtgagaaagaactggagtaccagagaatagaaa

SEQ ID NO: 120966 - DNA, 2319 bp, Homo sapiens
  Payload ID: 3710
  Gene Symbol: CCDC22
  Gene Name: coiled-coil domain containing 22
  Uniprot ID: O60826
  ENST ID: ENST00000376227
  CDS Start-End: 171-2054
ctcacatccggcatgcgccgtgctcgctcacagaactacactttccaactctccccacacgacccgtgacactctgtggaccgcgagcacggagcagggtttctacagctgctccccactttctcggacccggtcctggacccagcccccgactccgacacggctccaccatggaggaggcggaccgaatcctcatccattcgctgcgccaggccggcacggcagttcctccagatgtgcagaccttgcgcgccttcaccactgagctggttgtagaggctgtggtccgctgcctgcgtgtgatcaaccctgcggtgggctctggcctcagccctctgctgcctcttgccatgtctgcccggttccgcctggccatgagcctggctcaggcctgcatggacctgggctatcccttggagcttggctatcagaacttcctctaccccagtgagcctgacctccgagacctgcttctcttcttggctgagcgtctgcccaccgatgcctctgaggatgcagaccagcctgcaggtgactcagctattctcctccgggccattgggagccaaattcgggaccagctggcactgccttgggtcccgccccaccttcgcactcccaagctgcagcacctccagggctcggccctccagaagcctttccatgccagcaggctggtcgtgccagaattgagttccagaggtgagccacgggagttccaggcgagtcccctgctgcttccagtccctacccaggtgcctcagcctgttggaagggtggcctcgctcctcgaacaccatgccctgcagctctgccagcagacgggccgggaccggccaggggatgaggactgggtccaccggacatcccgcctcccaccccaggaggacacacgggctcagcggcagcggctgcaaaagcaactgactgagcatctgcgccaaagctggggcctgcttggggcccccatacaagcccgggacctgggagaactgctgcaggcctggggtgctggggccaagactggtgctcctaagggctcccgcttcacgcactcagagaagttcaccttccatctggagccccaggcccaggccactcaggtgtcagatgtgccagccacctcccggcggcctgaacaggtcacgtgggcagctcaggaacaggagctcgagtcccttcgggagcagctggaaggagtgaaccgcagcattgaggaggttgaggccgacatgaagaccctgggcgtcagctttgtgcaggcagagtctgagtgccggcacagcaagctcagtacagcagagcgtgagcaggccctgcgcctgaagagccgcgcggtggagctgctgcccgatgggactgccaaccttgccaagctgcagcttgtggtggagaatagtgcccagcgggtcatccacttggcgggtcagtgggagaagcaccgggtcccactcctcgctgagtaccgccacctccgaaagctgcaggattgcagagagctggaatcttctcgacggctggcagagatccaagaactgcaccagagtgtccgggcggctgctgaagaggcccgcaggaaggaggaggtctataagcagctgatgtcagagctggagactctgcccagagatgtgtcccggctggcctacacccagcgcatcctggagatcgtgggcaacatccggaagcagaaggaagagatcaccaagatcttgtctgatacgaaggagcttcagaaggaaatcaactccctatctgggaagctggaccggacgtttgcggtgactgatgagcttgtgttcaaggatgccaagaaggacgatgctgttcggaaggcctataagtatctagctgctctgcacgagaactgcagccagctcatccagaccatcgaggacacaggcaccatcatgcgggaggttcgagacctcgaggagcagatcgagacagagctgggcaagaagaccctcagcaacctggagaagatccgggaggactaccgagccctccgccaggagaacgctggcctcctaggccgggtccgggaggcctgaggagccgccggcagaggtctctccccagcctcaggcagggatttggggtgctggaggcagtggccaagcacatgccctagctacttcctccgctgtccagttcctcctgctgcggccttggacccagacccctgcccactgaccgcaacccttatatggggtgatagtccagcatgtggggagctcggctgcagtttattggggacggtactgtgggttgggggccttggatcccaaataaatgagtagttcctctgcagtctaa

SEQ ID NO: 120967 - DNA, 1463 bp, Homo sapiens
  Payload ID: 3711
  Gene Symbol: CCDC24
  Gene Name: coiled-coil domain containing 24
  Uniprot ID: Q8N4L8
  ENST ID: ENST00000372318
  CDS Start-End: 172-1095
gctagggccctggttcccactgcctggtttctgggcccccggcatccgagtcggccaaaagccgggcagaagagagcgccaaggactggcagttccggaacgggcaatcccagccgaggggaccagcggcagagcacgggtccgagccggggacggcggcgtcggtgggtcatgctccggcactccccctcgctgtgggagctggtggaggagcacgttccgctccgggagcgacgcgaagtgaagaggattctgggggaggcggcggtggacctgagcctggagctgcgggcggaggtggcgatgttacgggcactgctccaagaggctcgatcctctcaagcccccagctcccgccccatctctgacccctcttctcttctggcaccaccgcctctcctaaaggacctcttgcgccaggagctccggcagttgctccagggtctccgccacaaagccatctgtgagggcagggaccaggcccaagcttgggtccagtatagccccagggtcctgcactttgccttggaggagcccaggtgtgatttgccagaacaggagatattccagatgagaggtggtgggcccagcagcggtcacagagatctcagcatcatcaaggaccaactgaacgtgtccaacattgaccaggtggccagacacctgaggggccttctggaggaggagtgtcacaccttggagagggagatcctcatcctgcagcgctgcctggaagaggagtatttgaggccttgccacccctctgaggcagccctggagcccaccctggcagagctaaaggaacagaagaaggccatggagcaggagctgcaggcatctgtggggccttcttgtgtctctcccaaccacaggcagcggcccttggggtcctccacacagggcctcagacccccgcttcccctctgcggggttgcacctctccagtgctgcctgcctgcacctcctctggagccctaccttcgacctcgaggccagtcggctacccaccgctggggacggcagcttcagtgcagccccagggaagggccagcttccacacccatgtccagtgcagcaccccaagccccagcctgaagggctggtcaccgagtaggctctggcttctgccacagcgcacctgtctgccgctgccgcctcagctgctttggcccagccagcttcagatctggtcttggcgagctctcgccaggaccccaaggctgttggtctgtctggcccttgccccacccccttgccagatccctggtgtctggagctgagtggccgggcatcggtcccaagcatcaaagcctttggcctttctcctcccaggcctccacaaaggcctggcagacagaggtctcattccagcctgactcttgtcccctgggggacccagacaaagcacagcagccgctcagagacaggaatagaaatttcattaaaatctatggactttaaaa

SEQ ID NO: 120968 - DNA, 773 bp, Homo sapiens
  Payload ID: 3711
  Gene Symbol: CCDC24
  Gene Name: coiled-coil domain containing 24
  ENST ID: ENST00000460543
  CDS Start-End: 167-457
ggccctggttcccactgcctggtttctgggcccccggcatccgagtcggccaaaagccgggcagaagagagcgccaaggactggcagttccggaacgggcaatcccagccgaggggaccagcggcagagcacgggtccgagccggggacggcggcgtcggtgggtcatgctccggcactccccctcgctgtgggagctggtggaggagcacgttccgctccgggagcgacgcgaagtgaagaggattctgggggaggcggcggtggacctgagcctggagctgcgggcggagcccccaccattccggacactcccctccccagtcgcaaggtatcccagctctccttgcaggtggcgatgttacgggcactgctccaagaggctcgatcctctcaagcccccagctcccgccccatctctgacccctcttctcttctggcaccaccgcctctcctaaaggacctcttgcgccaggagctccggcagttgctccagggtctccgccacaaagccatctgtgagggcagggaccaggcccaagcttgggtccagtatagccccagggtcctgcactttgccttggaggagcccaggtgtgatttgccagaacaggagatattccagatgagaggtggtgggcccagcagcggtcacagagatctcagcatcatcaaggaccaactgaacgtgtccaacattgaccaggtggccagacacctgaggggccttctggaggaggagtgtcacaccttggagagggagatcctcatcct

SEQ ID NO: 120969 - DNA, 1230 bp, Homo sapiens
  Payload ID: 3711
  Gene Symbol: CCDC24
  Gene Name: coiled-coil domain containing 24
  ENST ID: ENST00000463846
  CDS Start-End: 132-311
ggcatccgagtcggccaaaagccgggcagaagagagcgccaaggactggcagttccggaacgggcaatcccagccgaggggaccagcggcagagcacgggtccgagccggggacggcggcgtcggtgggtcatgctccggcactccccctcgctgtgggagctggtggaggagcacgttccgctccgggagcgacgcgaagtgaagaggattctgggggaggcggcggtggacctgagcctggagctgcgggcggagcggtcacagagatctcagcatcatcaaggaccaactgaacgtgtccaacattgaccaggtggccagacacctgaggggccttctggaggaggagtgtcacaccttggagagggagatcctcatcctgcagcgctgcctggaagaggagtatttgaggccttgccacccctctgaggcagccctggagcccaccctggcaggtgaggacacggagcagggcccagaacacccagcctcctgctcccaccccacacttgtacacaccctagaagagctgggcactgtctcagcccaatctctccttcagagctaaaggaacagaagaaggccatggagcaggagctgcaggcatctgtggggccttcttgtgtctctcccaaccacagcggcccttggggtcctccacacagggcctcagacccccgcttcccctctgcggggttgcacctctccagtgctgcctgcctgcacctcctctggagccctaccttcgacctcgaggccagtcggctacccaccgctggggacggcagcttcagtgcagccccagggaagggccagcttccacacccatgtccagtgcagcaccccaagccccagcctgaagggctggtcaccgagtaggctctggcttctgccacagcgcacctgtctgccgctgccgcctcagctgctttggcccagccagcttcagatctggtcttggcgagctctcgccaggaccccaaggctgttggtctgtctggcccttgccccacccccttgccagatccctggtgtctggagctgagtggccgggcatcggtcccaagcatcaaagcctttggcctttctcctcccaggcctccacaaaggcctggcagacagaggtctcattccagcctgactcttgtcccctgggggacccagacaaagcacagcagccgctcagagacaggaatagaaatttcattaaaatctatggactttaaaa

SEQ ID NO: 120970 - DNA, 697 bp, Homo sapiens
  Payload ID: 3711
  Gene Symbol: CCDC24
  Gene Name: coiled-coil domain containing 24
  ENST ID: ENST00000466180
  CDS Start-End: 38-697
cgtaggtccgagccggggacggcggcgtcggtgggtcatgctccggcactccccctcgctgtgggagctggtggaggagcacgttccgctccgggagcgacgcgaagtgaagaggattctgggggaggcggcggtggacctgagcctggagctgcgggcggagaaacagttgcctagaagtgatatttgggtcctgaaggcctggggtgagcaacatgcggagagtgatagtgacttcattgccagcagcggtcacagagatctcagcatcatcaaggaccaactgaacgtgtccaacattgaccaggtggccagacacctgaggggccttctggaggaggagtgtcacaccttggagagggagatcctcatcctgcagcgctgcctggaagaggagtatttgaggccttgccacccctctgaggcagccctggagcccaccctggcagagctaaaggaacagaagaaggccatggagcaggagctgcaggcatctgtggggccttcttgtgtctctcccaaccacagcggcccttggggtcctccacacagggcctcagacccccgcttcccctctgcggggttgcacctctccagtgctgcctgcctgcacctcctctggagccctaccttcgacctcgaggccagtcggctacccaccgctggggacggcagcttcagtgcagccccagggaag

SEQ ID NO: 120971 - DNA, 860 bp, Homo sapiens
  Payload ID: 3711
  Gene Symbol: CCDC24
  Gene Name: coiled-coil domain containing 24
  ENST ID: ENST00000486504
  CDS Start-End: 96-293
gggtttggtgagcgttgccggcgggcccgcggtacctcccgcactctgacctgcggcccgtaggtccgagccggggacggcggcgtcggtgggtcatgctccggcactccccctcgctgtgggagctggtggaggagcacgttccgctccgggagcgacgcgaagtgaagaggattctgggggaggcggcggtggacctgagcctggagctgcgggcggaggtggggagagggaagcagcggtcacagagatctcagcatcatcaaggaccaactgaacgtgtccaacattgaccaggtggccagacacctgaggggccttctggaggaggagtgtcacaccttggagagggagatcctcatcctgcagcgctgcctggaagaggagtatttgaggccttgccacccctctgaggcagccctggagcccaccctggcagagctaaaggaacagaagaaggccatggagcaggagctgcaggcatctgtggggccttcttgtgtctctcccaaccacaggcagcggcccttggggtcctccacacagggcctcagacccccgcttcccctctgcggggttgcacctctccagtgctgcctgcctgcacctcctctggagccctaccttcgacctcgaggccagtcggctacccaccgctggggacggcagcttcagtgcagccccagggaagggccagcttccacacccatgtccagtgcagcaccccaagccccagcctgaagggctggtcaccgagtaggctctggcttctgccacagcgcacctgtctgccgctgccgcctcagctgctttggcccagccagcttcagatctggtcttggcgagctctcgccaggacc

SEQ ID NO: 120972 - DNA, 2654 bp, Homo sapiens
  Payload ID: 3711
  Gene Symbol: CCDC24
  Gene Name: coiled-coil domain containing 24
  ENST ID: ENST00000486064
  CDS Start-End: 168-458
ttccgggacagtggaggcgacgaagtaataaacccgtggacccagatttctcaggtcttaacacgttccctgaggcctaaaggtgcccagggccgagcccaaagtgcttgggtcagggctcggtggagcgccgaggtccgagccggggacggcggcgtcggtgggtcatgctccggcactccccctcgctgtgggagctggtggaggagcacgttccgctccgggagcgacgcgaagtgaagaggattctgggggaggcggcggtggacctgagcctggagctgcgggcggagcccccaccattccggacactcccctccccagtcgcaaggtatcccagctctccttgcaggtggcgatgttacgggcactgctccaagaggctcgatcctctcaagcccccagctcccgccccatctctgacccctcttctcttctggcaccaccgcctctcctaaaggacctcttgcgccaggagctccggcagttgctccagggtctccgccacaaagccatctgtgagggcagggaccaggcccaagcttgggtccagtatagccccagggtcctgcactttgccttggaggagcccaggtgtgatttgccagaacaggagatattccagatgagaggtggtgggcccagcggtcacagagatctcagcatcatcaaggaccaactgaacgtgtccaacattgaccaggtggccagacacctgaggtgaggcccaggggcacctgcatgtgtataggcaggggtggagacaaggatggatcttgaggtgctgggattgtgagacaggaggtgggtagtatacttggcggggaggcccatgtgcgtaaggctgagaggtggaaagagctggctgctatagagctagtgaggttgctttcaggaagcagccaagtacagatgccacggccgagcatgatggtgcatgcctataatcccagcaatttgggaggccgaggcaagagggtcatttgggcccaggaattcgaaaccagcttggccaacatgggaaaaccccatctctaccaaaacaaatacaaaaattagctgggcgtggtggtgcacgcctgtaccagttacttgggaggctgaggtgagaagggattgattgagccctggaaggtaaggctacagtgagtcatgatgggtggcagagcaagaccctgtttctttctttctttctttcttttttttttttttttgagatggagtcttgttctggcgcccaggctggagtgcagtggcgtgatcttggctcactgcaagctccacctcccgggttcacaccattctcctgcctaagcctcccgagtagctgggactacagatgcccaccaccatgcccagctaatttttttgtatttttagtagaggcggggtttcactgtgttagccaggatggtctcgatctcttgatctcatgatccgcccatctcagcctcccaaagtgctgggattacaggcatgagccacctcgcctggccgaccctgtttcaaaaataaataccttgacacaggggtagcctgtgtcagaggattttaagcagcggaagggctgtgatgtgggggaagatggaggcaagaagaatcacagtgcagaagtgtgggagagagaaggatgcctgccagggtgaggcaggcgaggggaagatacttcctgcccagaaagagcctcacaggggccagacgtctatgctgggtcagcccccaagcagcagagggcagtgtgggctgaggaaggacaggttgggtggggctcctgctgaggctggaggttggggccatgtggtggactcagctgagccctggtcctgtgtctcgggttctggctgctgctccctcatgtcccaggggccttctggaggaggagtgtcacaccttggagagggagatcctcatcctgcagcgctgcctggaagaggagtatttgaggccttgccacccctctgaggcagccctggagcccaccctggcagagctaaaggaacagaagaaggccatggagcaggagctgcaggcatctgtggggccttcttgtgtctctcccaaccacaggcagcggcccttggggtcctccacacagggcctcagacccccgcttcccctctgcggggttgcacctctccagtgctgcctgcctgcacctcctctggagccctaccttcgacctcgaggccagtcggctacccaccgctggggacggcagcttcagtgcagccccagggaagggccagcttccacacccatgtccagtgcagcaccccaagccccagcctgaagggctggtcaccgagtaggctctggcttctgccacagcgcacctgtctgccgctgccgcctcagctgctttggcccagccagcttcagatctggtcttggcgagctctcgccaggaccccaaggctgttggtctgtctggcccttgccccacccccttgccagatccctggtgtctggagctgagtggccgggcatcggtcccaagcatcaaagcctttggcctttctcctcccaggcctccacaaaggcctggcagacagaggtctcattccagcctgactcttgtcccctgggggacccagacaaagcacagcagccgctcagagacaggaatagaaatttcattaaaatctatggacttt

SEQ ID NO: 120973 - DNA, 728 bp, Homo sapiens
  Payload ID: 3711
  Gene Symbol: CCDC24
  Gene Name: coiled-coil domain containing 24
  ENST ID: ENST00000490064
  CDS Start-End: 106-285
tagaggggcggggtttggtgagcgttgccggcgggcccgcggtacctcccgcactctgacctgcggcccgtaggtccgagccggggacggcggcgtcggtgggtcatgctccggcactccccctcgctgtgggagctggtggaggagcacgttccgctccgggagcgacgcgaagtgaagaggattctgggggaggcggcggtggacctgagcctggagctgcgggcggagcggtcacagagatctcagcatcatcaaggaccaactgaacgtgtccaacattgaccaggtggccagacacctgaggggccttctggaggaggagtgtcacaccttggagagggagatcctcatcctgcagcgctgcctggaagaggagtatttgaggccttgccacccctctgaggcagccctggagcccaccctggcagagctaaaggaacagaagaaggccatggagcaggagctgcaggcatctgtggggccttcttgtgtctctcccaaccacaggcagcggcccttggggtcctccacacagggcctcagacccccgcttcccctctgcggggttgcacctctccagtgctgcctgcctgcacctcctctggagccctaccttcgacctcgaggccagtcggctacccaccgctggggacggcagcttcagtgcagccccagggaagggccagcttccacacccatgtccagtgcagcaccccaagccccag

SEQ ID NO: 120974 - DNA, 3626 bp, Homo sapiens
  Payload ID: 3712
  Gene Symbol: CCDC25
  Gene Name: coiled-coil domain containing 25
  Uniprot ID: Q86WR0
  ENST ID: ENST00000356537
  CDS Start-End: 95-721
gggggccaggcggccgccgcgagtctggtatcctgagcttcgtgagttgagcgctgctgctccgcggtggagtcaccgcaccgctcccgggatcatggtgttctacttcaccagcagcagcgttaattcatctgcctacactatttacatgggaaaagataaatatgaaaatgaagatctgatcaagcatggctggcctgaagatatctggtttcatgtggacaaactctcttcggctcatgtataccttcgattacataagggagagaatatagaagacatcccaaaggaagtgctgatggactgtgcccaccttgtgaaggccaatagcattcaaggctgcaagatgaacaacgttaatgtggtatatacgccgtggtctaacctgaagaaaacagctgacatggatgtggggcagataggctttcacaggcagaaggatgtaaaaattgtgacagtggagaagaaagtaaatgagatcctgaaccgattagaaaagaccaaagtcgagcggttcccagacctagcagcagagaaagaatgcagagatcgtgaagagaggaatgagaaaaaagcccaaattcaggaaatgaaaaagagagaaaaagaagaaatgaagaagaagagggaaatggatgaacttaggagctattcatcactaatgaaagttgaaaatatgtcttcaaatcaggatggcaatgattcagatgaattcatgtaaaaggagaaaaggagaaaaggacctttgaaagatgtgaatgtagagacaattgcagaccttttggtttcatctgtgttctgaaatataaaatacaaccaaaattctaccttcatcctacccagaaattattgattttcaagttttaaaaaaattgtaccttttttgctgacagaaaaggatcagatatgtataaaatagttgaacttgacagcatataacttaaagtgaaaatgtttttgccagaacatgtcttggtaccttgtgaaagcaggctgcccttgttcttgagatagactttaaaatgaaccagctctgaaaagtacttctgctgctctggtctatccctgaaaacagatgtcttgaaacacttttcatattcttaaaataatcttcacttctgttaagaagaacatgttggtgggtaattatgcgaatgtttccctgtccctgatttctcgattaggcgtatgggttttgaaaaagagatttttcagaagattgtcagcttcagtattcatgttccatcgtgtcatctgggtctgttagtgtagtgaccctcagtgcagtctgtcccagcgtttacgtccttgcttcctctgagcagaggcctccatcttagtatcaacatatttaaagaaattgatggtgttcatcaagctggggcctgtggcagttgttgcctgagcaccaagtaacccaagccacctatgtgacaacttctgggcccaggagtaatttctcagcattgagggtaaaataggatggagtgctctgttgatcatttgggagatgtaggttacctgatttgtgccttaggatgcagcgtgaagcagaagtccatattgcaattatgattttagaaggaactaagcattttactcacacccacagcagcaagaatgacctcctgcagcagatattccacctgtaatagcactttggaactgtgggcaaaaccaaaaggctagtgtttccatttattccatgttggtgtatggggttgaactggaaaattccctgaggcaaaactcactggccaaattttgagagggtatagaaaatgactttagagatgagtggttttgtgtatgtgtctgatgatattcagtctgatgttccgcaattttaaaagttataataaaataccatttttttaatctggaaggacattgatatatgaattcttagaatttgctattaaaaagggtagcccccattccacaagctggttttgagggtgatcttgctctaaaaaacctcattcatcataggctcagtctgacaggttctgtacggggctatcatctttctcctcctctgctaaatgcctctttcttccagctgctcactgggtcaaagggatgtcctttctcagatgtattcttgatacatctcagatgtattcgtagctgtgctccttccatacttccaaggagtccggcttctacagaattcctctgtacctcacactgcaacacatgtagatagcgcttttgaaaaatacatatatttttactatagtatgagaggtcctggggctcaaactttaaacatttcctaactcagcttacactggtttaaaatgtccaggtctctgctgaattctcttgttgaattcatagctctgtgttgattcctatgcccctaaccctgcagcctctttgttttatttttttccccatctctgttggtcccagggaaagcaaggaaattttcttttgaggacttataggttgattgcccacaggtcaaactgttggcattgaactcctctcatttcttgccattggattgtttcctaaacgttggataggagaattcgaaattgttgctatttttatgagctgtgcccttgatcaaatctgtgctgtgggtctgagtcactttgccaatgtcgtcttcagtttcaacactctgatcagcatgcaggcgaggggcatgtttaatttacttcactaactgctatattctatagctttagacttcatatttcttatccacctttgtctaggctcacgatctttgggcaagggagctttgtcaccgtggttgggctagaacaaatattgagaagtttaccaacacagatgttgagaagtttattgaaaggcactgacattagcagaataagtgatggacattagttgaaccccttcagtgtctatgtgttttattgtattgtctttaactcgttcttgaagcacagatttcagcgagcctttcagctattcagtgccagcggttttccccactcaggaaagatggtgtgagccatacacacagcaggattagacggggagagtttcagctgcagcttctagtttaagaccaaagcccttcctcccgctgctgcatctgtctgagaggggaagctcttgttttccaagctggaaccgtttatgaggaaaactgagcagggtggcaaaatggaaaaggaacaattttctagtttttcctacgcgtgatattgacgcgtgctttttctttgatttgaggtacagcatgtaaataacaaatttccatattcaaaatgatcatattagagtgactgagtgaccttttgattttgaagcagactaaaatctgaccagaccacaatgaaaagtataaaattagaaacttaaattccaagctaaatttcagctttgacccacctaactccagtgaataggtggcagctcagaaacaaggacagcactgctgctgccagagcaagctcacatccagctggcacttcgtgagagctccttcctgccgggcacgtgtgagttcagcgtgggcaagagacttttatgcacattctgtcattcaaaagggaaatgatgccaaccccagatgcagcatgtcctgaatgaatgatctgtaaaatacaataataaaagcttatagtttgagtagaactgtg

SEQ ID NO: 120975 - DNA, 3586 bp, Homo sapiens
  Payload ID: 3712
  Gene Symbol: CCDC25
  Gene Name: coiled-coil domain containing 25
  ENST ID: ENST00000520486
  CDS Start-End: 114-242
aagtgcacggaggagttccgggggccaggcggccgccgcgagtctggtatcctgagcttcgtgagttgagcgctgctgctccgcggtggagtcaccgcaccgctcccgggatcatggtgttctacttcaccagcagcagcgttaattcatctgcctacactatttacatgggaaaagataaatatgaaaatgaagatctgatcaagcatggctggcctgaagatatctgggagagaatatagaagacatcccaaaggaagtgctgatggactgtgcccaccttgtgaaggccaatagcattcaaggctgcaagatgaacaacgttaatgtggtatatacgccgtggtctaacctgaagaaaacagctgacatggatgtggggcagataggctttcacaggcagaaggatgtaaaaattgtgacagtggagaagaaagtaaatgagatcctgaaccgattagaaaagaccaaagtcgagcggttcccagacctagcagcagagaaagaatgcagagatcgtgaagagaggaatgagaaaaaagcccaaattcaggaaatgaaaaagagagaaaaagaagaaatgaagaagaagagggaaatggatgaacttaggagctattcatcactaatgaaagttgaaaatatgtcttcaaatcaggatggcaatgattcagatgaattcatgtaaaaggagaaaaggagaaaaggacctttgaaagatgtgaatgtagagacaattgcagaccttttggtttcatctgtgttctgaaatataaaatacaaccaaaattctaccttcatcctacccagaaattattgattttcaagttttaaaaaaattgtaccttttttgctgacagaaaaggatcagatatgtataaaatagttgaacttgacagcatataacttaaagtgaaaatgtttttgccagaacatgtcttggtaccttgtgaaagcaggctgcccttgttcttgagatagactttaaaatgaaccagctctgaaaagtacttctgctgctctggtctatccctgaaaacagatgtcttgaaacacttttcatattcttaaaataatcttcacttctgttaagaagaacatgttggtgggtaattatgcgaatgtttccctgtccctgatttctcgattaggcgtatgggttttgaaaaagagatttttcagaagattgtcagcttcagtattcatgttccatcgtgtcatctgggtctgttagtgtagtgaccctcagtgcagtctgtcccagcgtttacgtccttgcttcctctgagcagaggcctccatcttagtatcaacatatttaaagaaattgatggtgttcatcaagctggggcctgtggcagttgttgcctgagcaccaagtaacccaagccacctatgtgacaacttctgggcccaggagtaatttctcagcattgagggtaaaataggatggagtgctctgttgatcatttgggagatgtaggttacctgatttgtgccttaggatgcagcgtgaagcagaagtccatattgcaattatgattttagaaggaactaagcattttactcacacccacagcagcaagaatgacctcctgcagcagatattccacctgtaatagcactttggaactgtgggcaaaaccaaaaggctagtgtttccatttattccatgttggtgtatggggttgaactggaaaattccctgaggcaaaactcactggccaaattttgagagggtatagaaaatgactttagagatgagtggttttgtgtatgtgtctgatgatattcagtctgatgttccgcaattttaaaagttataataaaataccatttttttaatctggaaggacattgatatatgaattcttagaatttgctattaaaaagggtagcccccattccacaagctggttttgagggtgatcttgctctaaaaaacctcattcatcataggctcagtctgacaggttctgtacggggctatcatctttctcctcctctgctaaatgcctctttcttccagctgctcactgggtcaaagggatgtcctttctcagatgtattcttgatacatctcagatgtattcgtagctgtgctccttccatacttccaaggagtccggcttctacagaattcctctgtacctcacactgcaacacatgtagatagcgcttttgaaaaatacatatatttttactatagtatgagaggtcctggggctcaaactttaaacatttcctaactcagcttacactggtttaaaatgtccaggtctctgctgaattctcttgttgaattcatagctctgtgttgattcctatgcccctaaccctgcagcctctttgttttatttttttccccatctctgttggtcccagggaaagcaaggaaattttcttttgaggacttataggttgattgcccacaggtcaaactgttggcattgaactcctctcatttcttgccattggattgtttcctaaacgttggataggagaattcgaaattgttgctatttttatgagctgtgcccttgatcaaatctgtgctgtgggtctgagtcactttgccaatgtcgtcttcagtttcaacactctgatcagcatgcaggcgaggggcatgtttaatttacttcactaactgctatattctatagctttagacttcatatttcttatccacctttgtctaggctcacgatctttgggcaagggagctttgtcaccgtggttgggctagaacaaatattgagaagtttaccaacacagatgttgagaagtttattgaaaggcactgacattagcagaataagtgatggacattagttgaaccccttcagtgtctatgtgttttattgtattgtctttaactcgttcttgaagcacagatttcagcgagcctttcagctattcagtgccagcggttttccccactcaggaaagatggtgtgagccatacacacagcaggattagacggggagagtttcagctgcagcttctagtttaagaccaaagcccttcctcccgctgctgcatctgtctgagaggggaagctcttgttttccaagctggaaccgtttatgaggaaaactgagcagggtggcaaaatggaaaaggaacaattttctagtttttcctacgcgtgatattgacgcgtgctttttctttgatttgaggtacagcatgtaaataacaaatttccatattcaaaatgatcatattagagtgactgagtgaccttttgattttgaagcagactaaaatctgaccagaccacaatgaaaagtataaaattagaaacttaaattccaagctaaatttcagctttgacccacctaactccagtgaataggtggcagctcagaaacaaggacagcactgctgctgccagagcaagctcacatccagctggcacttcgtgagagctccttcctgccgggcacgtgtgagttcagcgtgggcaagagacttttatgcacattctgtcattcaaaagggaaatgatgccaaccccagatgcagcatgtcctgaatgaatgatctgtaaaatacaataataaaagcttatagtttgagtag

SEQ ID NO: 120976 - DNA, 785 bp, Homo sapiens
  Payload ID: 3712
  Gene Symbol: CCDC25
  Gene Name: coiled-coil domain containing 25
  Uniprot ID: Q86WR0
  ENST ID: ENST00000522915
  CDS Start-End: 199-621
gggggccaggcggccgccgcgagtctggtatcctgagcttcgtgagttgagcgctgctgctccgcggtggagtcaccgcaccgctcccgggatcatggtgttctacttcaccagcagcagcgatgaagatctgatcaagcatggctggcctgaagatatctgggagagaatatagaagacatcccaaaggaagtgctgatggactgtgcccaccttgtgaaggccaatagcattcaaggctgcaagatgaacaacgttaatgtggtatatacgccgtggtctaacctgaagaaaacagctgacatggatgtggggcagataggctttcacaggcagaaggatgtaaaaattgtgacagtggagaagaaagtaaatgagatcctgaaccgattagaaaagaccaaagtcgagcggttcccagacctagcagcagagaaagaatgcagagatcgtgaagagaggaatgagaaaaaagcccaaattcaggaaatgaaaaagagagaaaaagaagaaatgaagaagaagagggaaatggatgaacttaggagctattcatcactaatgaaagttgaaaatatgtcttcaaatcaggatggcaatgattcagatgaattcatgtaaaaggagaaaaggagaaaaggacctttgaaagatgtgaatgtagagacaattgcagaccttttggtttcatctgtgttctgaaatataaaatacaaccaaaattctaccttcatcctacccagaaattattgattttcaagttttaaaaaaattgtacctttttt

SEQ ID NO: 120977 - DNA, 877 bp, Homo sapiens
  Payload ID: 3712
  Gene Symbol: CCDC25
  Gene Name: coiled-coil domain containing 25
  ENST ID: ENST00000517979
  CDS Start-End: 74-154
agtctggtatcctgagcttcgtgagttgagcgctgctgctccgcggtggagtcaccgcaccgctcccgggatcatggtgttctacttcaccagcagcagcgttaattcatctgcctacactatttacatgggaaaagataaatatgaaagctgaggcgagaggatcacttgagcccaggagttcgagacctgcctgagcaacatagggagaccctgtctctacaaaaaacaacaataaaagaaaatattagctgggcatagtgacacacacctgttgtccttgctactctggaggctgaggcaggaagatcgcttgagcctgggaggtaggctgcagtgagctgtgatcatgccactgcattccagcttaagagacagcgagaatctgttgtctgaaatgaagatctgatcaagcatggctggcctgaagatatctggtttcatgtggacaaactctcttcggctcatgtataccttcgattacataagggagagaatatagaagacatcccaaaggaagtgctgatggactgtgcccaccttgtgaaggccaatagcattcaaggctgcaagatgaacaacgttaatgtggtatatacgccgtggtctaacctgaagaaaacagctgacatggatgtggggcagataggctttcacaggcagaaggatgtaaaaattgtgacagtggagaagaaagtaaatgagatcctgaaccgattagaaaagaccaaagtcgagcggttcccagacctagcagcagagaaagaatgcagagatcgtgaagagaggaatgagaaaaaagcccaaattcaggaaatgaaaaagagagaaaaagaagaaatgaagaagaagagggaaatggatgaacttaggtatg

SEQ ID NO: 120978 - DNA, 977 bp, Homo sapiens
  Payload ID: 3712
  Gene Symbol: CCDC25
  Gene Name: coiled-coil domain containing 25
  ENST ID: ENST00000519509
  CDS Start-End: 101-379
agttccgggggccaggcggccgccgcgagtctggtatcctgagcttcgtgagttgagcgctgctgctccgcggtggagtcaccgcaccgctcccgggatcatggtgttctacttcaccagcagcagcgttaattcatctgcctacactatttacatgggaaaagataaatatgaaaatgaagatctgatcaagcatggctggcctgaagatatctggtttcatgtggacaaactctcttcggctcatgtataccttcgattacataagggagagaatatagaagacatcccaaaggaagtgctgatggactgtgcccaccttgtgaaggccaatagcattcaaggtaaaaattgtgacagtggagaagaaagtaaatgagatcctgaaccgattagaaaagaccaaagtcgagcggttcccagacctagcagcagagaaagaatgcagagatcgtgaagagaggaatgagaaaaaagcccaaattcaggaaatgaaaaagagagaaaaagaagaaatgaagaagaagagggaaatggatgaacttaggagctattcatcactaatgaaagttgaaaatatgtcttcaaatcaggatggcaatgattcagatgaattcatgtaaaaggagaaaaggagaaaaggacctttgaaagatgtgaatgtagagacaattgcagaccttttggtttcatctgtgttctgaaatataaaatacaaccaaaattctaccttcatcctacccagaaattattgattttcaagttttaaaaaaattgtaccttttttgctgacagaaaaggatcagatatgtataaaatagttgaacttgacagcatataacttaaagtgaaaatgtttttgccagaacatgtcttggtaccttgtgaaagcaggctgcccttgttcttgagatagactttaaaatgaaccagctctgaaaagtacttctgctgctctggtctatccctgaaaacag

SEQ ID NO: 120979 - DNA, 1734 bp, Homo sapiens
  Payload ID: 3712
  Gene Symbol: CCDC25
  Gene Name: coiled-coil domain containing 25
  ENST ID: ENST00000520202
  CDS Start-End: 100-228
gttccgggggccaggcggccgccgcgagtctggtatcctgagcttcgtgagttgagcgctgctgctccgcggtggagtcaccgcaccgctcccgggatcatggtgttctacttcaccagcagcagcgttaattcatctgcctacactatttacatgggaaaagataaatatgaaaatgaagatctgatcaagcatggctggcctgaagatatctgggagagaatatagaagacatcccaaaggaagtgctgatggactgtgcccaccttgtgaaggccaatagcattcaaggtaaaaattgtgacagtggagaagaaagtaaatgagatcctgaaccgattagaaaagaccaaagtcgagcggttcccagacctagcagcagagaaagaatgcagagatcgtgaagagaggaatgagaaaaaagcccaaattcaggaaatgaaaaagagagaaaaagaagaaatgaagaagaagagggaaatggatgaacttaggagctattcatcactaatgaaagttgaaaatatgtcttcaaatcaggatggcaatgattcagatgaattcatgtaaaaggagaaaaggagaaaaggacctttgaaagatgtgaatgtagagacaattgcagaccttttggtttcatctgtgttctgaaatataaaatacaaccaaaattctaccttcatcctacccagaaattattgattttcaagttttaaaaaaattgtaccttttttgctgacagaaaaggatcagatatgtataaaatagttgaacttgacagcatataacttaaagtgaaaatgtttttgccagaacatgtcttggtaccttgtgaaagcaggctgcccttgttcttgagatagactttaaaatgaaccagctctgaaaagtacttctgctgctctggtctatccctgaaaacagatgtcttgaaacacttttcatattcttaaaataatcttcacttctgttaagaagaacatgttggtgggtaattatgcgaatgtttccctgtccctgatttctcgattaggcgtatgggttttgaaaaagagatttttcagaagattgtcagcttcagtattcatgttccatcgtgtcatctgggtctgttagtgtagtgaccctcagtgcagtctgtcccagcgtttacgtccttgcttcctctgagcagaggcctccatcttagtatcaacatatttaaagaaattgatggtgttcatcaagctggggcctgtggcagttgttgcctgagcaccaagtaacccaagccacctatgtgacaacttctgggcccaggagtaatttctcagcattgagggtaaaataggatggagtgctctgttgatcatttgggagatgtaggttacctgatttgtgccttaggatgcagcgtgaagcagaagtccatattgcaattatgattttagaaggaactaagcattttactcacacccacagcagcaagaatgacctcctgcagcagatattccacctgtaatagcactttggaactgtgggcaaaaccaaaaggctagtgtttccatttattccatgttggtgtatggggttgaactggaaaattccctgaggcaaaactcactggccaaattttgagagggtatagaaaatgactttagagatgagtggttttgtgtatgtgtctgatgatattcagtctgatgttccgcaattttaaaagttataataaaataccatttttttaatctggaa

SEQ ID NO: 120980 - DNA, 460 bp, Homo sapiens
  Payload ID: 3712
  Gene Symbol: CCDC25
  Gene Name: coiled-coil domain containing 25
  ENST ID: ENST00000524084
  CDS Start-End: 88-348
aggcggccgccgcgagtctggtatcctgagcttcgtgagttgagcgctgctgctccgcggtggagtcaccgcaccgctcccgggatcatggtgttctacttcaccagcagcagcgttaattcatctgcctacactatttacatgggaaaagataaatatgaaaatgaagatctgatcaagcatggctggcctgaagatatctggtttcatgtggacaaactctcttcggctcatgtataccttcgattacataagggagagaatatagaagacatcccaaaggaagtgctgatggactgtgcccaccttgtgaaggccaatagcattcaaggagctattcatcactaatgaaagttgaaaatatgtcttcaaatcaggatggcaatgattcagatgaattcatgtaaaaggagaaaaggagaaaaggacctttgaaagatgtgaatgtagagacaattgc

SEQ ID NO: 120981 - DNA, 947 bp, Homo sapiens
  Payload ID: 3712
  Gene Symbol: CCDC25
  Gene Name: coiled-coil domain containing 25
  ENST ID: ENST00000523841
  CDS Start-End: 68-346
gtatcctgagcttcgtgagttgagcgctgctgctccgcggtggagtcaccgcaccgctcccgggatcatggtgttctacttcaccagcagcagcgttaattcatctgcctacactatttacatgggaaaagataaatatgaaaatgaagatctgatcaagcatggctggcctgaagatatctggtttcatgtggacaaactctcttcggctcatgtataccttcgattacataagggagagaatatagaagacatcccaaaggaagtgctgatggactgtgcccaccttgtgaaggccaatagcattcaaggtaaaaattgtgacagtggagaagaaagtaaatgagatcctgaaccgattagaaaagaccaaagtcgagcggttcccagacctagcagcagagaaagaatgcagagatcgtgaagagaggaatgagaaaaaagcccaaattcaggaaatgaaaaagagagaaaaagaagaaatgaagaagaagagggaaatggatgaacttaggatggcaatgattcagatgaattcatgtaaaaggagaaaaggagaaaaggacctttgaaagatgtgaatgtagagacaattgcagaccttttggtttcatctgtgttctgaaatataaaatacaaccaaaattctaccttcatcctacccagaaattattgattttcaagttttaaaaaaattgtaccttttttgctgacagaaaaggatcagatatgtataaaatagttgaacttgacagcatataacttaaagtgaaaatgtttttgccagaacatgtcttggtaccttgtgaaagcaggctgcccttgttcttgagatagactttaaaatgaaccagctctgaaaagtacttctgctgctctggtctatccctgaaaacagatgtcttgaaacacttttcatattcttaaaataatcttcacttctgtta

SEQ ID NO: 120982 - DNA, 2176 bp, Homo sapiens
  Payload ID: 3713
  Gene Symbol: CCDC27
  Gene Name: coiled-coil domain containing 27
  Uniprot ID: Q2M243
  ENST ID: ENST00000294600
  CDS Start-End: 85-2055
gtgatgccaccactgctcccaggagcccacaggacctggagctctggaagctgatctcctcccactgcaccagccagcaggttcatgttcgaggccatcttcccctccacaccccaagccaggctgaagagagatccacgggaaaagccgggcctgtcctcattcaggtccacattcaggcaacaaagctcacttggtctttgcatcccacgcctcatgttacctaaggaggccagcccatctcagaggcacagttcgatgtccagctcgatggccagggccctggtgctcctccagagcatggccagccgggacgcccggtgcccagaatggaaaccgcaccaaaagccacgcacgctcagcaagtcggtccagaccatcagccgctactacaggaagacgagtgaacccaaggatgccgccagcctcaccggcttcatgtccaaaatggaacttcgaagggtcttccccacgcatcctgactgcccccagttcagcaccagggccacatccatgtcccactgtggttcacccactgaggccgatttgtccggagagattgacaacagctcggagacctggagaggcacccaggacctgttcttggccaggcggggctcagacacgaacgtggacgggtacctccttcccttcagtaagagcatctgcgagttcgattacttgcggaagaggagaaaatcccagactttgagtccggtcaccagcagctcagtcgcatctcagagctgcctgagaaagaggatgccctggtacctctcagtcatccacgagaaggatcactgcctgtctgagctggagatacaggttcagaagaaagacgaggagatcctgctgctccaggaggagagggaggccctgaagatgcagctgaaatgccttctgaaaggcaaaggccaagagacatccatgtccccaggcaggagggagcagctctcagacgcttcgctgaagctgggcaggctgagcctcctgaaggccttctccagacatgaggaggagctgcagcactggtggcagatgcaggaggagtctgcggcaccggagaggggcaaggagcccgacctgggaggtggcgaggaggacgagggcctggaaggggagcccgatggggtggaggacacgggtgcctggggaggtgtgagccagatgggatccgtgcatgaggagggaagcgaggaggaggaagaggaggaaggggacagggatgaggactcagaggaaagggagctgccggaggaagaggagatccccaggagaagggcctcctccctggccgagtcgtttgaggaggagctgctggcccagctggaggagtacgagcaggtcatcctggacttccagttcaacctggaggccaccaggaccagatactcccttgcaacaggagtgattgcgtctttacaacaacaagtggatttccaagaaacccagctgcgaaagatcaatacggaaaatgagacgctgcagaaggagctccgagagcggaggcagcagctacaagccatgaccgacaagttctccaacctccgagaagataagaaacaccaagagatgatggggctcattgaaaaggacaaccagctcctccgacagcaagtgtcggaactggagagaaagctcaccaagcgggactgtgtcatctcagagttggacaccaaggtcagccagctgcaggagcaggtggaactggaccagaaccacctgcagaggtggaagcagctgcaggaggatttgcagagcaagaaggagatgattcagcaggcagagcagcacacccgcgtggccctggagagctcccagtccaggctcgagaggttaaggaataagatcatccaggccacctttagcatctccgggaccaagtccttggccaacgagatctctgacaatgacatcctggaagccctgcagagaattatctcagagagaagcgactactataatcagctgaagcagaaaggcgtcaaagtgccccccctgcaacagtcagaggccttcctgaccagcaaatccaagaaggggacctccaagtaggcccagccaggcccccaaatacggtcagcccagcagaggccggggcccagctccagaaccacccgcccccaccatgcgtcctgctctcagactcagaattaaaccccggtgttggcactgt

SEQ ID NO: 120983 - DNA, 2252 bp, Homo sapiens
  Payload ID: 3713
  Gene Symbol: CCDC27
  Gene Name: coiled-coil domain containing 27
  ENST ID: ENST00000462521
  CDS Start-End: 38-646
aagctgatctcctcccactgcaccagccagcaggttcatgttcgaggccatcttcccctccacaccccaagccaggctgaagagagatccacgggaaaagccgggcctgtcctcattcaggtccacattcaggcaacaaagctcacttggtctttgcatcccacgcctcatgttacctaaggaggccagcccatctcagaggcacagttcgatgtccagctcgatggccagggccctggtgctcctccagagcatggccagccgggacgcccggtgcccagaatggaaaccgcaccaaaagccacgcacgctcagcaagtcggtccagaccatcagccgctactacaggaagacgagtgaacccaaggatgccgccagcctcaccggcttcatgtccaaaatggaacttcgaagggtcttccccacgcatcctgactgcccccagttcagcaccagggccacatccatgtcccactgtggttcacccactgaggccgatttgtccggagagattgacaacagctcggagacctggagaggcacccaggacctgttcttggccaggcggggctcagacacgaacgtggacgtaagagcatctgcgagttcgattacttgcggaagaggagaaaatcccagactttgagtccggtcaccagcagctcagtcgcatctcagagctgcctgagaaagaggatgccctggtacctctcagtcatccacgagaaggatcactgcctgtctgagctggagatacaggttcagaagaaagacgaggagatcctgctgctccaggaggagagggaggccctgaagatgcagctgaaatgccttctgaaaggcaaaggccaagagacatccatgtccccaggcaggagggagcagctctcagacgcttcgctgaagctgggcaggctgagcctcctgaaggccttctccagacatgaggaggagctgcagcactggtggcaggcagatgctctcccactccctggaccctgcagcagcctggaaggaggcgccctccccggtgcccccgccatgagcattagagccctctgccctgggggtgccccgcagccctgcccagcccctgccctacccatcttacagatgcaggaggagtctgcggcaccggagaggggcaaggagcccgacctgggaggtggcgaggaggacgagggcctggaaggggagcccgatggggtggaggacacgggtgcctggggaggtgtgagccagatgggatccgtgcatgaggagggaagcgaggaggaggaagaggaggaaggggacagggatgaggactcagaggaaagggagctgccggaggaagaggagatccccaggagaagggcctcctccctggccgagtcgtttgaggaggagctgctggcccagctggaggagtacgagcaggtcatcctggacttccagttcaacctggaggccaccaggaccagatactcccttgcaacaggagtgattgcgtctttacaacaacaagtggatttccaagaaacccagctgcgaaagatcaatacggaaaatgagacgctgcagaaggagctccgagagcggaggcagcagctacaagccatgaccgacaagttctccaacctccgagaagataagaaacaccaagagatgatggggctcattgaaaaggacaaccagctcctccgacagcaagtgtcggaactggagagaaagctcaccaagcgggactgtgtcatctcagagttggacaccaaggtcagccagctgcaggagcaggtggaactggaccagaaccacctgcagaggtggaagcagctgcaggaggatttgcagagcaagaaggagatgattcagcaggcagagcagcacacccgcgtggccctggagagctcccagtccaggctcgagaggttaaggaataagatcatccaggccacctttagcatctccgggaccaagtccttggccaacgagatctctgacaatgacatcctggaagccctgcagagaattatctcagagagaagcgactactataatcagctgaagcagaaaggcgtcaaagtgccccccctgcaacagtcagaggccttcctgaccagcaaatccaagaaggggacctccaagtaggcccagccaggcccccaaatacggtcagcccagcagaggccggggcccagctccagaaccacccgcccccaccatgcgtcctgctctcagactcagaattaaaccccggtgttggcactgtc

SEQ ID NO: 120984 - DNA, 1496 bp, Homo sapiens
  Payload ID: 3714
  Gene Symbol: CCDC28A
  Gene Name: coiled-coil domain containing 28A
  Uniprot ID: Q8IWP9
  ENST ID: ENST00000332797
  CDS Start-End: 156-980
ggcggagtagcttccggaaagggtactgcatttcccgtttctacctccactgcacccgcttattgcgtcttgctcctgggtcacagagcctaaaacgacacacccaacacgcccgccggagttacagctaaaggaaggacaggggaagcaatgaaatgccgagggcggagccaagagcgacactgggggagcaggaaaaggcggggcttccgcttggggcatggaggctgtacctcttacgtcacttccgtaaacaaacggagctgcggaggagcgggtcccgggatgtgaccggggctctgcttgtggctgcggcggtggcttctgaggctgtcgggtctttgcgggttgcggaagggggccccaatacccttcttcttcaggtcttaagaagctggccgtggtgcaataaggaacttaaaacaatggaagagcggaaagtgaagaggaggagtcctaagtcttttagtgcccactgtactcaggttgtcaatgccaaaaaaaatgccattccagtgagtaaaagcacagggttttcaaatcctgcatcacagtcaacttcacagcgaccaaagttaaaaagagtgatgaaagaaaagaccaaacctcagggtggagagggcaaaggcgctcagtcaactccgatccagcactccttcctcactgatgtctcagatgttcaggagatggagagagggctgctcagtcttttgaatgatttccactctggaaaacttcaagcatttggaaatgaatgttccattgaacagatggaacatgttcggggaatgcaggagaaattagctcgcttgaatttggagctctatggggagttagaggaacttcctgaggataagagaaaaacagccagtgactccaatctggataggcttctgtcagatttagaagaattgaattcttccatacaaaaactccatttggcagatgcacaagatgttccaaatacttctgctagctaaaatgaaatgtagtttgctttcttgtgatttgaagagaagcagcagtctttacttttccagccaaatccagtagcagaatcatcttccacaacaaggaattaaagtaattaaagtgcaagttcaatgatcgttttcacttactgcttttagtaaatgtgactcgctgtaattcaccataactggaggcctaggccttgttgaaggcttcatcaggaaatgtgacgcagagattgtgctgctgtgcttcatattgttgccttatgggattatacttgaaatgcattgtgctgatgttcttgacagggcggagggatttctctttcctgagctcaccaaacttattccagtgttgatcgcaagctgttgatgcacaggcgtcttgtggcaagcccagcttcagtttatgttagacaatcagtacacatgctggtgtgttttccaatggccagtgataagaaattaaataagtatttgtgagatttgctattttttaataaagtaattgttttaaattaa

SEQ ID NO: 120985 - DNA, 1505 bp, Homo sapiens
  Payload ID: 3714
  Gene Symbol: CCDC28A
  Gene Name: coiled-coil domain containing 28A
  Uniprot ID: Q8IWP9
  ENST ID: ENST00000611852
  CDS Start-End: 167-991
actcaccgaggggcggagtagcttccggaaagggtactgcatttcccgtttctacctccactgcacccgcttattgcgtcttgctcctgggtcacagagcctaaaacgacacacccaacacgcccgccggagttacagctaaaggaaggacaggggaagcaatgaaatgccgagggcggagccaagagcgacactgggggagcaggaaaaggcggggcttccgcttggggcatggaggctgtacctcttacgtcacttccgtaaacaaacggagctgcggaggagcgggtcccgggatgtgaccggggctctgcttgtggctgcggcggtggcttctgaggctgtcgggtctttgcgggttgcggaagggggccccaatacccttcttcttcaggtcttaagaagctggccgtggtgcaataaggaacttaaaacaatggaagagcggaaagtgaagaggaggagtcctaagtcttttagtgcccactgtactcaggttgtcaatgccaaaaaaaatgccattccagtgagtaaaagcacagggttttcaaatcctgcatcacagtcaacttcacagcgaccaaagttaaaaagagtgatgaaagaaaagaccaaacctcagggtggagagggcaaaggcgctcagtcaactccgatccagcactccttcctcactgatgtctcagatgttcaggagatggagagagggctgctcagtcttttgaatgatttccactctggaaaacttcaagcatttggaaatgaatgttccattgaacagatggaacatgttcggggaatgcaggagaaattagctcgcttgaatttggagctctatggggagttagaggaacttcctgaggataagagaaaaacagccagtgactccaatctggataggcttctgtcagatttagaagaattgaattcttccatacaaaaactccatttggcagatgcacaagatgttccaaatacttctgctagctaaaatgaaatgtagtttgctttcttgtgatttgaagagaagcagcagtctttacttttccagccaaatccagtagcagaatcatcttccacaacaaggaattaaagtaattaaagtgcaagttcaatgatcgttttcacttactgcttttagtaaatgtgactcgctgtaattcaccataactggaggcctaggccttgttgaaggcttcatcaggaaatgtgacgcagagattgtgctgctgtgcttcatattgttgccttatgggattatacttgaaatgcattgtgctgatgttcttgacagggcggagggatttctctttcctgagctcaccaaacttattccagtgttgatcgcaagctgttgatgcacaggcgtcttgtggcaagcccagcttcagtttatgttagacaatcagtacacatgctggtgtgttttccaatggccagtgataagaaattaaataagtatttgtgagatttgctattttttaataaagtaattgttttaaatt

SEQ ID NO: 120986 - DNA, 1226 bp, Homo sapiens
  Payload ID: 3714
  Gene Symbol: CCDC28A
  Gene Name: coiled-coil domain containing 28A
  ENST ID: ENST00000610978
  CDS Start-End: 227-712
cggaggagcgggtcccgggatgtgaccggggctctgcttgtggctgcggcggtggcttctgaggctgtcgggtctttgcgggttgcggaagggggccccaatacccttcttcttcaggtcttaagaagctggccgtggtgcaataaggaacttaaaacaatggaagagcggaaagtgaagaggaggagtcctaagtcttttagtgcccactgtactcaggttgtcaatgccaaaaaatgccattccagtgagtaaaagcacagggttttcaaatcctgcatcacagtcaacttcacagcgaccaaagttaaaaagagtgatgaaagaaaagaccaaacctcagggtggagagggcaaaggcgctcagtcaactccgatccagcactccttcctcactgatgtctcagatgttcaggagatggagagagggctgctcagtcttttgaatgatttccactctggaaaacttcaagcatttggaaatgaatgttccattgaacagatggaacatgttcggggaatgcaggagaaattagctcgcttgaatttggagctctatggggagttagaggaacttcctgaggataagagaaaaacagccagtgactccaatctggataggcttctgtcagatttagaagaattgaattcttccatacaaaaactccatttggcagatgcacaagatgttccaaatacttctgctagctaaaatgaaatgtagtttgctttcttgtgatttgaagagaagcagcagtctttacttttccagccaaatccagtagcagaatcatcttccacaacaaggaattaaagtaattaaagtgcaagttcaatgatcgttttcacttactgcttttagtaaatgtgactcgctgtaattcaccataactggaggcctaggccttgttgaaggcttcatcaggaaatgtgacgcagagattgtgctgctgtgcttcatattgttgccttatgggattatacttgaaatgcattgtgctgatgttcttgacagggcggagggatttctctttcctgagctcaccaaacttattccagtgttgatcgcaagctgttgatgcacaggcgtcttgtggcaagcccagcttcagtttatgttagacaatcagtacacatgctggtgtgttttccaatggccagtgataagaaattaaataagtatttgtgagatttgctattttttaataaagtaattgttttaaatt

SEQ ID NO: 120987 - DNA, 1240 bp, Homo sapiens
  Payload ID: 3714
  Gene Symbol: CCDC28A
  Gene Name: coiled-coil domain containing 28A
  ENST ID: ENST00000617445
  CDS Start-End: 177-731
gtaaacaaacggagctgcggaggagcgggtcccgggatgtgaccggggctctgcttgtggctgcggcggtggcttctgaggctgtcgggtctttgcgggttgcggaagggggccccaatacccttcttcttcaggtcttaagaagctggccgtggtgcaataaggaacttaaaacaatggaagagcggaaagtgaagaggaggagtcctaagtcttttagtgcccactgtactcaggttgtcaatgccaaaaaaaatgccattccagtgagtaaaagcacagggttttcaaatcctgcatcacagtcaacttcacagcgaccaaagttaaaaagagtgatgaaagaaaagaccaaacctcagggtggagagggcaaaggcgctcagtcaactccgatccagcactccttcctcactgatgtctcagatgttcaggagatggagagagggctgctcagtcttttgaatgatttccactctggaaaacttcaagcatttggaaatgaatgttccattgaacagatggaacatgttcggggaatgcaggagaaattagctcgcttgaatttggagctctatggggagttagaggaacttcctgaggataagagaaaaacagccagtgactccaatctggataggcttctgtcagatttagaagaattgaattcttccatacaaaaactccatttggcagatgcacaagatgttccaaatacttctgctagctaaaatgaaatgtagtttgctttcttgtgatttgaagagaagcagcagtctttacttttccagccaaatccagtagcagaatcatcttccacaacaaggaattaaagtaattaaagtgcaagttcaatgatcgttttcacttactgcttttagtaaatgtgactcgctgtaattcaccataactggaggcctaggccttgttgaaggcttcatcaggaaatgtgacgcagagattgtgctgctgtgcttcatattgttgccttatgggattatacttgaaatgcattgtgctgatgttcttgacagggcggagggatttctctttcctgagctcaccaaacttattccagtgttgatcgcaagctgttgatgcacaggcgtcttgtggcaagcccagcttcagtttatgttagacaatcagtacacatgctggtgtgttttccaatggccagtgataagaaattaaataagtatttgtgagatttgctattttttaataaagtaattgtttt

SEQ ID NO: 120988 - DNA, 1089 bp, Homo sapiens
  Payload ID: 3715
  Gene Symbol: CCDC28B
  Gene Name: coiled-coil domain containing 28B
  Uniprot ID: Q9BUN5
  ENST ID: ENST00000373602
  CDS Start-End: 348-950
aaagccaccaccattttgtaaggaactgtagcttctctctgaaactgccgggaaagggaaaatctttttaaaatagacatcacacaaccaacagggtcccctaggttcaggcggggaggtgaggtcgagtgagaggaactgcttagcatacgcggggatgctcctcccatctcaccccaccgcgctaaggagaaggtcactttctctttaaatgcaaatgaactccctccagcttagctttcacccggtggtgttcccgggaggagagggcggagggcggagggaacttgcaccgaagcatcactcgagaccccaaacctccaggcctgaggcccagccagcgcccaatggatgacaaaaagaagaaacggagtcccaagccctgcctggcccagccagcccaggccccaggcacactacggagggtccctgtgcctaccagccacagcggctccttggccctaggacttcctcatctgccatcccccaagcagcgggccaagttcaagagagtaggcaaagagaagtgccgcccagtcctggctggaggtggaagcggctctgcaggcacgcccctgcagcactccttcctgaccgaggtgactgatgtctatgagatggaggggggactcctgaacctgctcaatgatttccactctggccggctgcaggccttcgggaaggaatgctcctttgagcagctggagcacgttcgggagatgcaggagaagctagcccggctgcacttcagcctggatgtgtgtggggaggaggaggacgatgaagaggaagaggatggggtcactgaggggctgccagaggagcagaagaagacaatggctgaccgtaacctggaccagctgcttagcaatctggaagacctcagtaattctatccagaagctgcacctggccgagaacgccgagcctgaggagcagtccgctgcgtaggcgtcccacgcaggcccacactgcccctctcattctcttcaaactgtgactttttacagactcgggcgggtgttctgcggccccccaggtgctatgggggaggggggcgttgaatggaattaaaccagaaagaaagcaa

SEQ ID NO: 120989 - DNA, 1415 bp, Homo sapiens
  Payload ID: 3715
  Gene Symbol: CCDC28B
  Gene Name: coiled-coil domain containing 28B
  Uniprot ID: Q9BUN5
  ENST ID: ENST00000421922
  CDS Start-End: 101-826
gtggtgttcccgggaggagagggcggagggcggagggaacttgcaccgaagcatcactcgagaccccaaacctccaggcctgaggcccagccagcgcccaatggatgacaaaaagaagaaacggagtcccaagccctgcctggcccagccagcccaggccccaggcacactacggagggtccctgtgcctaccagccacagcggctccttggccctaggacttcctcatctgccatcccccaagcagcgggccaagttcaagagagtaggcaaagagaagtgccgcccagtcctggctggaggtggaagcggctctgcaggcacgcccctgcagcactccttcctgaccgaggtgactgatgtctatgagatggaggggggactcctgaacctgctcaatgatttccactctggccggctgcaggccttcgggaaggaatgctcctttgagcagctggagcacgttcgggagatgcaggagaagctagcccggctgcacttcagcctggatgtgtgtggggaggaggaggacgatgaagaggaagaggatggggtcactgaggggctgccagaggagcagaagaagacaatggctgaccgtaacctggaccagctgcttagcaatctggaagacctcagtaattctatgtatcctttccaaggaacccgtctatgtgtgtgtgttcctgagaggtcagtttcctcctctccagccctccaggagtattcacacacaaccaacttccccacctcttgcagtcctgtcagatttagccacagactgcccaaacccaggtacaggaatttagaatttccccaaaattagaagaaaagtggttgtaggggatgttttactactgatcaaaatctttgtgagtactttagctgacatcaatcatagcaaagcttgtccgatgtcctcctatcctttcagcattgaacaattatttttactaatttacactaccacctcacctggtcctcagtcagaaacagcgcgagtgcgcgcgcacacaccccagtgtgtctgacctgcacgatctggatgaagagagagggggtgagagagggcaggcggggactgcaacctcagtccacagacggcccgagaccctcgtccccggccctttgcacaggtgagggaactaaacctgtgcaagatgggagaccggggtgggaggaaggactggtccaaagcgccacgatccttgacgggcacagccagaagctgcacctggccgagaacgccgagcctgaggagcagtccgctgcgtaggcgtcccacgcaggcccacactgcccctctcattctcttcaaactgtgactttttacagactcgggcgggtgttctgcggccccccaggtgctatgggggaggggggcgttgaatggaattaaaccagaaagaaagcaa

SEQ ID NO: 120990 - DNA, 780 bp, Homo sapiens
  Payload ID: 3715
  Gene Symbol: CCDC28B
  Gene Name: coiled-coil domain containing 28B
  ENST ID: ENST00000461819
  CDS Start-End: 90-479
gggaggagagggcggagggcggagggaacttgcaccgaagcatcactcgagaccccaaacctccaggcctgaggcccagccagcgcccaatggatgacaaaaagaagaaacggagtcccaagccctgcctggcccagccagcccaggccccaggcacactacggagggtccctgtgcctaccagccacagcggctccttggccctaggacttcctcatctgccatcccccaagcagcgggccaagttcaagagagtaggcaaagagaagtgccgcccagtcctggctggaggtggaagcggctctgcaggcacgcccctgcagcactccttcctgaccgaggtgactgatgtctatgagatggaggggggactcctgaacctgctcaatgatttccactctggccggctgcaggccttcggagaagctagcccggctgcacttcagcctggatgtgtgtggggaggaggaggacgatgaagaggaagaggatggggtcactgaggggctgccagaggagcagaagaagacaatggctgaccgtaacctggaccagctgcttagcaatctggaagacctcagtaattctatccagaagctgcacctggccgagaacgccgagcctgaggagcagtccgctgcgtaggcgtcccacgcaggcccacactgcccctctcattctcttcaaactgtgactttttacagactcgggcgggtgttctgcggccccccaggtgctatgggggaggggggcgttgaatggaattaaaccagaaagaaa

SEQ ID NO: 120991 - DNA, 1235 bp, Homo sapiens
  Payload ID: 3715
  Gene Symbol: CCDC28B
  Gene Name: coiled-coil domain containing 28B
  ENST ID: ENST00000469003
  CDS Start-End: 133-384
aaatgaactccctccagcttagctttcacccggtggtgttcccgggaggagagggcggagggcggagggaacttgcaccgaagcatcactcgagaccccaaacctccaggcctgaggcccagccagcgcccaatggatgacaaaaagaagaaacggagtcccaagccctgcctggcccagccagcccaggccccaggcacactacggagggtccctgtgcctaccagccacagcggctccttggccctaggacttcctcatctgccatcccccaagcagcgggccaagttcaagagacccctgagaactcagagctcactcagacccagtccctaccctcaactgtgtggcaaaaaggccaggtgggtcactgggatcacatagcgtgaggattcgcctcagaggagggagtgagcaactctgcaagaaagtgaatgttccacgctgagaggcttacctggtataaatatggaagaaagctattacctgaaaggtttcaggaaccacaggtggtttgggggccctggagtatcagggaacaggaaatggtgaggaaatacctgggggcacaatttgaattctctgttgaattttttttatgattgggagtttgcatgctgccttataatgtgtccatgtttgttccccactaaatacaatgtattctttctccagttgctccagataagaccactgtgtttccccctggttttgcacaccacttgcctaaggggcatgaagctcaaggctgtggggagagtagcaggaaaggcaactgggaaggcaggagggccaggctggcaggggcattcaattttatcctgagagcagtggaaattttaagacagtttttttggtttattggtttggctttgttttctatgtatttttgtttttgtttaaaagagtttttaaatagaagagggttggctgggcatggtggctcagcctataatcccagcacttggggacgctgaggcaggcagatcacctgaggtcagaagtttgagaccagcttggtcaacatggtgaaacctcatctctgttaaaaatacaaaagttagccaggcgtgatggtgggtgcctataatcccagcaacttgggaggctgaggcacaagaatcacttgaacctggaaggcagaggttgcagtgaaccgagattgtgccactgcactccagcctgtgtgacagtgagactctgtctcaaacaaaaaaaaaattttttttttaatt

SEQ ID NO: 120992 - DNA, 2731 bp, Homo sapiens
  Payload ID: 3716
  Gene Symbol: CCDC3
  Gene Name: coiled-coil domain containing 3
  Uniprot ID: Q9BQI4
  ENST ID: ENST00000378825
  CDS Start-End: 128-940
cggagacagcggtgcgctcagctcccgggagcggcccgagcagccgagcgcccagggctgcccttcccgggccggcgggctccccgggctccccgccgccgccccgtgcgccccgggagggcccggcatgctgcgccagctgctgctcgccgcgctctgcctggcgggtcccccagcgcccgcgcgcgcctgccagctgccctccgagtggaggcccctgagcgagggctgccgcgccgagctggccgagaccatcgtgtacgccagggtgctggcgctgcaccccgaggcgcccggcctctacaaccacctgccctggcagtaccacgccggccaggggggcctcttctactcggccgaggtcgagatgctgtgcgaccaggcgtggggcagcatgctggaggtgcccgccggctccaggctcaacctcaccggcctgggctacttctcgtgccactcccacaccgtggtccaggactactcctatttcttcttcctcaggatggatgaaaattataacctcttgcctcacggagtcaatttccaagatgccatcttcccagacactcaagagaacagaaggatgttttctagccttttccagttttcaaactgttcgcaagggcagcagctggcgactttctccagtgactgggaaatccaggaagacagtaggctcatgtgctcctcggtgcagaaggccttgtttgaggaggaggaccacgtcaagaaactgcagcagaaagtggccaccctggagaagcgcaaccggcagctccgggagcgagtgaagaaggtcaagaggtccttgcggcaggcgcgtaagaagggccgccacctggagctggcgaaccagaaactcagtgagaagctggcggcgggcgcgctgccgcacatcaatgcccgggggcccgtgcgccccccctacctgcgggggtaacgggcctgggggctgccaggtgtgcagggccaatcctgacggtaattgagaatgagtgaggtttcgtacatgcagctatttcaagggttgtaagagtttttgtttttaatcacgcatttggtagagtctaaatggataaaatgcaaggcttgctttccccttgggtgctggcctcaatgtcagaccccacgcgctgccccttcctggcctgaccccagacgcagtgcctggcagtccagaggcagtgggatccctgagtgctgaatgctcgcctgcagagcagcccagaaagagccctgactggggagagaacattttagaatctctagtgtaaaagacatcaacgtgcttagcctttatttcagaaaaaaatcagggtggttcccagctccccagtccaggacaaccattagtcctgatgagtgagctgacgctggtgctggaacctgctggcacctcactggccacatctttggaaggggatggtggccttgcatccaagatgcctgaaaatcagcacgtgcagggcctccctatccagccagcattttccttccagctgaggcaggtgaagacttcataagctcatcacaggggagggaattaggagcagggcagcaggtaattaaacaagataaattatacctgatttccaacaccagctacaaagagttgaagatgatacctatgggtcgcgttaacacagggggcaactgccttgatcggcctgccatgggtcatcagactgcttcctaaattgagagaaactgagcaatctctcagccactgctatagtctaacttcttgtttgctgagtaattgtttctaatgtctctgaactcaaagtgaggtgctccaagacgctgtgaacttctgcaaagacacctccttacctactgggatcacgtgacctgacctcactcccagccaggctcccaaagggctcattccagccattccaatctcttcttctttatgcaaacacttttcccccacaacaagccttgtttgttccgataggaatacgtgtacgtcagtgcacttgtccttacgtcagttccttacaccaccaaagcacttcacctttctggaaataaaacttttaagacactactataagtaaaaatgagagtattcactagacttattgctcaggcacatttgagtgggtcccagctgtgtgattaagaagtcaactgggtggccttttctgggttatcttctgatcatggcctttcaacccaacaagggcccttccctgctcttccaccagtaaaggctcctggcctctcatcaggatctgccccccagagaccccccccagacactgcagggcctggtgatgctgtcctctgtaccggaaatggcaggcactgtcagatttccactcttctgcctttaggaaggctgggtgcttcttgctctgacagccagtctggggagatgactcttacgttgcttgagtcttggtggcaggctgctgtccacgggggagaagtctctgctctggactggacagaagagagacttttaccctggggcactcacacggccaagcttctgccaccacttcattagctgtattctccatagtatggtgaaatagcaggtgcgtcttctagtttattcctcctggggacatttcctcaaagcagttttgcgcccccgcaagggaatggtcagcctaagggtaatgtacagcccgtgcttggagaaccatggaagctacacccctacaggtgcatactgttctgcttttccaataaatacgagcggcgatttcaaccacaa

SEQ ID NO: 120993 - DNA, 3180 bp, Homo sapiens
  Payload ID: 3716
  Gene Symbol: CCDC3
  Gene Name: coiled-coil domain containing 3
  Uniprot ID: Q9BQI4
  ENST ID: ENST00000378839
  CDS Start-End: 954-1391
aatacactcaaaaagcagaaagcctgcaggatgcttcttgggctcttgttgcggacgaataggctcggctattcttgttgctgaagaatagcctctgctggtgtggaggagggaagctgcccccggattagacagcaggatgacaaggaaaaaggcagatgcgccctctcctggtatctccgaaggattctgcttcgctgtctggacctcctgctgcctggccaagcctgactctcaaccctgcccctgaggctaaccccaagagcagggcagagaagcaagcaagtcagcgactgccccagacccaattccgggccctcgagttggtgtggtgtaggaggggcagatgaggctagaggctgctttataaggagcagaaaagacggtgtcacagctgtaccctgggatcggcagaaaagggtccccccggggcctgtaaggggtgcctgcgtaacaggtgacttgaatttcaagtgattatcatataaatggaggattagaaaagagacaccaactctggaaccagttcaatggaattcttcaagagactgtaacttagtgcttacaaagacttggaatgatctacactgcatggtgtacctgttagaggaggtgacatcaaagctttaggtactgagagaggatacttcctactgtggaagggaagaaaagaaaaaagcaaagctacttcttggaagagcagtggagagaaaaatattgtttctttttcttgggaaattggcagaggcatgctgaagaaatcagctacagctgttctccacacctggataaatttttaataagaacttaacacacccgccctccagaaagggtggtctgaggtgtcgatggtgttgtctctcccagggctcttctgggcagccttctctgtgacctggagagcgaagagtctatttccatcacatttcagctgccaaactcccctttaaacgatggatgaaaattataacctcttgcctcacggagtcaatttccaagatgccatcttcccagacactcaagagaacagaaggatgttttctagccttttccagttttcaaactgttcgcaagggcagcagctggcgactttctccagtgactgggaaatccaggaagacagtaggctcatgtgctcctcggtgcagaaggccttgtttgaggaggaggaccacgtcaagaaactgcagcagaaagtggccaccctggagaagcgcaaccggcagctccgggagcgagtgaagaaggtcaagaggtccttgcggcaggcgcgtaagaagggccgccacctggagctggcgaaccagaaactcagtgagaagctggcggcgggcgcgctgccgcacatcaatgcccgggggcccgtgcgccccccctacctgcgggggtaacgggcctgggggctgccaggtgtgcagggccaatcctgacggtaattgagaatgagtgaggtttcgtacatgcagctatttcaagggttgtaagagtttttgtttttaatcacgcatttggtagagtctaaatggataaaatgcaaggcttgctttccccttgggtgctggcctcaatgtcagaccccacgcgctgccccttcctggcctgaccccagacgcagtgcctggcagtccagaggcagtgggatccctgagtgctgaatgctcgcctgcagagcagcccagaaagagccctgactggggagagaacattttagaatctctagtgtaaaagacatcaacgtgcttagcctttatttcagaaaaaaatcagggtggttcccagctccccagtccaggacaaccattagtcctgatgagtgagctgacgctggtgctggaacctgctggcacctcactggccacatctttggaaggggatggtggccttgcatccaagatgcctgaaaatcagcacgtgcagggcctccctatccagccagcattttccttccagctgaggcaggtgaagacttcataagctcatcacaggggagggaattaggagcagggcagcaggtaattaaacaagataaattatacctgatttccaacaccagctacaaagagttgaagatgatacctatgggtcgcgttaacacagggggcaactgccttgatcggcctgccatgggtcatcagactgcttcctaaattgagagaaactgagcaatctctcagccactgctatagtctaacttcttgtttgctgagtaattgtttctaatgtctctgaactcaaagtgaggtgctccaagacgctgtgaacttctgcaaagacacctccttacctactgggatcacgtgacctgacctcactcccagccaggctcccaaagggctcattccagccattccaatctcttcttctttatgcaaacacttttcccccacaacaagccttgtttgttccgataggaatacgtgtacgtcagtgcacttgtccttacgtcagttccttacaccaccaaagcacttcacctttctggaaataaaacttttaagacactactataagtaaaaatgagagtattcactagacttattgctcaggcacatttgagtgggtcccagctgtgtgattaagaagtcaactgggtggccttttctgggttatcttctgatcatggcctttcaacccaacaagggcccttccctgctcttccaccagtaaaggctcctggcctctcatcaggatctgccccccagagaccccccccagacactgcagggcctggtgatgctgtcctctgtaccggaaatggcaggcactgtcagatttccactcttctgcctttaggaaggctgggtgcttcttgctctgacagccagtctggggagatgactcttacgttgcttgagtcttggtggcaggctgctgtccacgggggagaagtctctgctctggactggacagaagagagacttttaccctggggcactcacacggccaagcttctgccaccacttcattagctgtattctccatagtatggtgaaatagcaggtgcgtcttctagtttattcctcctggggacatttcctcaaagcagttttgcgcccccgcaagggaatggtcagcctaagggtaatgtacagcccgtgcttggagaaccatggaagctacacccctacaggtgcatactgttctgcttttccaataaatacgagcggcgatttcaaccac

SEQ ID NO: 120994 - DNA, 3098 bp, Homo sapiens
  Payload ID: 3717
  Gene Symbol: CCDC30
  Gene Name: coiled-coil domain containing 30
  Uniprot ID: Q5VVM6
  ENST ID: ENST00000342022
  CDS Start-End: 111-2462
attgaggcttccatgttagagcctgaattatcagtaacataggaagatagaagagaaaccagtacaaaagatcaagagacaaagtacaagatttgaatgagatcctgaaaatgagccaagaaaaaaatgaaatgtttgaaagtgagtggtcaaaagagagagagagagagaagcagttggcatctggtcttgacactgcagagaaggccttgaaagttgaaagtgaggaattgcaaaaatcaaagtcagagcttatatgcctttataatgaagttcacaatcttccaggggaatcagaaagcaaagaccattttttaatagcatgtgacctgttacaaagagagaattctgaattagaaacaaaggtcttgaagctttcacaagaatttgcacaattaaatcattttactctagggggaaaaactgcaccttctaatttaattacaagtgaaaatacctgtaaagatcctgaatctaatgaaccaattttggaaacagaaattcaaagccgaaaggaagagacagaggaactctgtcccaaattaggagaaagaaagcagaaggaaattccagaggagtcagtaaaggagggcagttttccaagagaggggcagaaggaggagggctcacaacagaatcgagatatgaaagatgaagaaaaagaacagcagttaaccatgaagcctgaggaaattgtgaggcttagagaagagctgagccatataaatcagagccttcttcagtctcagagctctggggatagttcagatgacagtggtgcccagcatccatcatctggagaaaaactaaaatacaaccagcaaggggaagtacaacaacttcaccagaatttgcaccggctccagattctatgcaactcagctgaaaatgagcttcgatatgaacgagggcagaacttggacttaaagcaacataatagcttacttcaggaagaaaacattaagataaagattgaactaaagcatgcccaacagaagttattagacagcacaaagatgtgctcttcactcacggcagagtacaagcactgtcagcagaaaatcaaggaactggagttggaagtacttaaacacactcagagcattaaatcacagaacaacctacaggaaaagctggttcaggagaaatctaaagttgctgatgcagaggaaaagattttggacctgcagcggaaattagaacatgctcataaagtctgtctcacagacacttgtatttcagagaagcagcagctagaggaaaagataaaagaagcaacacaaaatgaagctaaagtaaagcaacaatatcaagaagaacaacagaagaggaaacttctatatcagaacgtagatgagttacacaggcaagtgagaaccttacaagataaagaaaatctactggaaatgacctgttctcagcaacaatccagaattcagcaacaagaggccctacttaaacaactggaaaatgaaaaaagaaaatatgatgagcatgtcaaaagcaaccaggaattgtcagagaagctatctaagctacagcaagagaaggaagctctacgtgaagaatatttgcgattattgaagctgcttaatgtccatgtgagaaactataatgagaaacatcaccaacaaaaagtcaagcttcaaaaagtcaagtatcgtttaactaatgaagtagaactacgagataagagaattaaccaatttgaagatgaaattggaatcctgcaacataaaatagaaaaggagaaggcaatacaggaccagatcactgcccaaaatgataccctgcttctagaaaaaaggaaacttcaggagcaagtcatagagcaagaacagttgatccacagcaacaaatggacgatatcttccatccagagcagggtactttacatggataaagaaaataagcaattacaggaaaatagtcttcgtctcacacagcagattggcttcttagagcgaattataaggagcatccatattcgcagaggagagaatcttaaggagtttcctgttccaaaatggtggcatagaggcaagctggcttctctccctccaacaaagaaacagaaagaaatatacagcactgaggtcttcaccagcaacaatgcagaactccagcatgaggatgagtcagttcctgaggccacagagaagtggaaacactctgagcagatggaaacaacaattagtgacatccttgaatccgaagtagtgaatgaaatattgcctttatcaaactccagtttttcaggaaaaggtttggtagagtcatttgcaagtcttcaagagactgaagagatcaagtcaaaagaagcaatggcaagttcaaagtcccctgaaaagtctcctgagaatcttgtgtgttcacagaattctgaggctggatacataaatgtggcttctctgaaggagacacatggtatacaagaacaagaccaaaagtcagaactataaaatcactggtgcctaaagctatactgaacaaaagtggtaatttaaagcctggacaaaaggtggaccatgacattgagaagagttaccacagatcccaaatggatatcacccaagagtcttcaaaactgctgataaattcattaaagcagttgtaaaaatggatttctcaagtttgtttgatatcctcagatgccttgtattgaccaaaatattgactttagttcaatgatttatttaggtttctcttcagcagagcacatgtagggttaattcaacattctttcccattatcatgggtatcttttctgatttattttttaacagtaaaaacaatacagtcacattaaagcaaattttgtttttaaaaaaaccctcctatgctgggcgtggtggctcacgcctataatcccagcactttgggaggctgaggtgggtggatcacgaggtcaggagatcgagaccatcctggctaacacggtgaaaccctgtctctactaaaaatacaaaaaaattaaccgagtgtggtggcgggtgcctgtagtcccagctactcagaaggctgaggcaggagaatggcgtgaacctgcgatagcaccactgcactccagcctgggtgacagagtgagactccgtctc

SEQ ID NO: 120995 - DNA, 2664 bp, Homo sapiens
  Payload ID: 3717
  Gene Symbol: CCDC30
  Gene Name: coiled-coil domain containing 30
  Uniprot ID: Q5VVM6
  ENST ID: ENST00000340612
  CDS Start-End: 1-2352
atgagccaagaaaaaaatgaaatgtttgaaagtgagtggtcaaaagagagagagagagagaagcagttggcatctggtcttgacactgcagagaaggccttgaaagttgaaagtgaggaattgcaaaaatcaaagtcagagcttatatgcctttataatgaagttcacaatcttccaggggaatcagaaagcaaagaccattttttaatagcatgtgacctgttacaaagagagaattctgaattagaaacaaaggtcttgaagctttcacaagaatttgcacaattaaatcattttactctagggggaaaaactgcaccttctaatttaattacaagtgaaaatacctgtaaagatcctgaatctaatgaaccaattttggaaacagaaattcaaagccgaaaggaagagacagaggaactctgtcccaaattaggagaaagaaagcagaaggaaattccagaggagtcagtaaaggagggcagttttccaagagaggggcagaaggaggagggctcacaacagaatcgagatatgaaagatgaagaaaaagaacagcagttaaccatgaagcctgaggaaattgtgaggcttagagaagagctgagccatataaatcagagccttcttcagtctcagagctctggggatagttcagatgacagtggtgcccagcatccatcatctggagaaaaactaaaatacaaccagcaaggggaagtacaacaacttcaccagaatttgcaccggctccagattctatgcaactcagctgaaaatgagcttcgatatgaacgagggcagaacttggacttaaagcaacataatagcttacttcaggaagaaaacattaagataaagattgaactaaagcatgcccaacagaagttattagacagcacaaagatgtgctcttcactcacggcagagtacaagcactgtcagcagaaaatcaaggaactggagttggaagtacttaaacacactcagagcattaaatcacagaacaacctacaggaaaagctggttcaggagaaatctaaagttgctgatgcagaggaaaagattttggacctgcagcggaaattagaacatgctcataaagtctgtctcacagacacttgtatttcagagaagcagcagctagaggaaaagataaaagaagcaacacaaaatgaagctaaagtaaagcaacaatatcaagaagaacaacagaagaggaaacttctatatcagaacgtagatgagttacacaggcaagtgagaaccttacaagataaagaaaatctactggaaatgacctgttctcagcaacaatccagaattcagcaacaagaggccctacttaaacaactggaaaatgaaaaaagaaaatatgatgagcatgtcaaaagcaaccaggaattgtcagagaagctatctaagctacagcaagagaaggaagctctacgtgaagaatatttgcgattattgaagctgcttaatgtccatgtgagaaactataatgagaaacatcaccaacaaaaagtcaagcttcaaaaagtcaagtatcgtttaactaatgaagtagaactacgagataagagaattaaccaatttgaagatgaaattggaatcctgcaacataaaatagaaaaggagaaggcaatacaggaccagatcactgcccaaaatgataccctgcttctagaaaaaaggaaacttcaggagcaagtcatagagcaagaacagttgatccacagcaacaaatggacgatatcttccatccagagcagggtactttacatggataaagaaaataagcaattacaggaaaatagtcttcgtctcacacagcagattggcttcttagagcgaattataaggagcatccatattcgcagaggagagaatcttaaggagtttcctgttccaaaatggtggcatagaggcaagctggcttctctccctccaacaaagaaacagaaagaaatatacagcactgaggtcttcaccagcaacaatgcagaactccagcatgaggatgagtcagttcctgaggccacagagaagtggaaacactctgagcagatggaaacaacaattagtgacatccttgaatccgaagtagtgaatgaaatattgcctttatcaaactccagtttttcaggaaaaggtttggtagagtcatttgcaagtcttcaagagactgaagagatcaagtcaaaagaagcaatggcaagttcaaagtcccctgaaaagtctcctgagaatcttgtgtgttcacagaattctgaggctggatacataaatgtggcttctctgaaggagacacatggtatacaagaacaagaccaaaagtcagaactataaaatcactggtgcctaaagctatactgaacaaaagtggtaatttaaagcctggacaaaaggtggaccatgacattgagaagagttaccacagatcccaaatggatatcacccaagagtcttcaaaactgctgataaattcattaaagcagttgtaaaaatggatttctcaagtttgtttgatatcctcagatgccttgtattgaccaaaatattgactttagttcaatgatttatttaggtttctcttcagcagagcacatgtagggttaattcaacattctttcccattatcatgggtatcttttctgattt

SEQ ID NO: 120996 - DNA, 3063 bp, Homo sapiens
  Payload ID: 3717
  Gene Symbol: CCDC30
  Gene Name: coiled-coil domain containing 30
  Uniprot ID: Q5VVM6
  ENST ID: ENST00000428554
  CDS Start-End: 559-2910
atttcagtatcataatgaagacctggaaaaagacaaaacatcacaaaactgcctaggaagaggaatggaacaagtagcaaagaagttaggggtggctcatgaagagattcaaaggctcactgatgaactacaagtgaaggagaaggaacaatgtaaattagattctgcacttaagaaggctcaactagaaattgacaaattgaaggaaaatttggtaaagctgaaagaaaatgatgcagctgacctacagaaagcaaaggaacaaaatcagagactggatgaggaaattctggctttaagaaatagggttcgatcacttgactcagaaaaaaaggtgcttggtgaaatggttgaaagacttaaaggagaggtgtgtgaatctcaagagaataagcaacttggaaaccactcccctggaaaaactgtgggtggtgaacagagagaacagattgaggcttccatgttagagcctgaattatcagtaacataggaagatagaagagaaaccagtacaaaagatcaagagacaaagtacaagatttgaatgagatcctgaaaatgagccaagaaaaaaatgaaatgtttgaaagtgagtggtcaaaagagagagagagagagaagcagttggcatctggtcttgacactgcagagaaggccttgaaagttgaaagtgaggaattgcaaaaatcaaagtcagagcttatatgcctttataatgaagttcacaatcttccaggggaatcagaaagcaaagaccattttttaatagcatgtgacctgttacaaagagagaattctgaattagaaacaaaggtcttgaagctttcacaagaatttgcacaattaaatcattttactctagggggaaaaactgcaccttctaatttaattacaagtgaaaatacctgtaaagatcctgaatctaatgaaccaattttggaaacagaaattcaaagccgaaaggaagagacagaggaactctgtcccaaattaggagaaagaaagcagaaggaaattccagaggagtcagtaaaggagggcagttttccaagagaggggcagaaggaggagggctcacaacagaatcgagatatgaaagatgaagaaaaagaacagcagttaaccatgaagcctgaggaaattgtgaggcttagagaagagctgagccatataaatcagagccttcttcagtctcagagctctggggatagttcagatgacagtggtgcccagcatccatcatctggagaaaaactaaaatacaaccagcaaggggaagtacaacaacttcaccagaatttgcaccggctccagattctatgcaactcagctgaaaatgagcttcgatatgaacgagggcagaacttggacttaaagcaacataatagcttacttcaggaagaaaacattaagataaagattgaactaaagcatgcccaacagaagttattagacagcacaaagatgtgctcttcactcacggcagagtacaagcactgtcagcagaaaatcaaggaactggagttggaagtacttaaacacactcagagcattaaatcacagaacaacctacaggaaaagctggttcaggagaaatctaaagttgctgatgcagaggaaaagattttggacctgcagcggaaattagaacatgctcataaagtctgtctcacagacacttgtatttcagagaagcagcagctagaggaaaagataaaagaagcaacacaaaatgaagctaaagtaaagcaacaatatcaagaagaacaacagaagaggaaacttctatatcagaacgtagatgagttacacaggcaagtgagaaccttacaagataaagaaaatctactggaaatgacctgttctcagcaacaatccagaattcagcaacaagaggccctacttaaacaactggaaaatgaaaaaagaaaatatgatgagcatgtcaaaagcaaccaggaattgtcagagaagctatctaagctacagcaagagaaggaagctctacgtgaagaatatttgcgattattgaagctgcttaatgtccatgtgagaaactataatgagaaacatcaccaacaaaaagtcaagcttcaaaaagtcaagtatcgtttaactaatgaagtagaactacgagataagagaattaaccaatttgaagatgaaattggaatcctgcaacataaaatagaaaaggagaaggcaatacaggaccagatcactgcccaaaatgataccctgcttctagaaaaaaggaaacttcaggagcaagtcatagagcaagaacagttgatccacagcaacaaatggacgatatcttccatccagagcagggtactttacatggataaagaaaataagcaattacaggaaaatagtcttcgtctcacacagcagattggcttcttagagcgaattataaggagcatccatattcgcagaggagagaatcttaaggagtttcctgttccaaaatggtggcatagaggcaagctggcttctctccctccaacaaagaaacagaaagaaatatacagcactgaggtcttcaccagcaacaatgcagaactccagcatgaggatgagtcagttcctgaggccacagagaagtggaaacactctgagcagatggaaacaacaattagtgacatccttgaatccgaagtagtgaatgaaatattgcctttatcaaactccagtttttcaggaaaaggtttggtagagtcatttgcaagtcttcaagagactgaagagatcaagtcaaaagaagcaatggcaagttcaaagtcccctgaaaagtctcctgagaatcttgtgtgttcacagaattctgaggctggatacataaatgtggcttctctgaaggagacacatggtatacaagaacaagaccaaaagtcagaactataaaatcactggtgcctaaagctatactgaacaaaagtggtaatttaaagcctggacaaaaggtggaccatgacattgagaagagttaccacagatcccaaatggatatcacccaagagtcttcaaaactgctgataaattcattaaagcagttgt

SEQ ID NO: 120997 - DNA, 3653 bp, Homo sapiens
  Payload ID: 3717
  Gene Symbol: CCDC30
  Gene Name: coiled-coil domain containing 30
  ENST ID: ENST00000477155
  CDS Start-End: 2050-3495
gggacgctcgcggcaccctccgcaggaaaatttccgacttggttcttgaggttcctgcctcagccccaaggaggaaagcacccattctcccctcttttccgcattacgggccttttctgcttctccccagtatggtccgaaactacaggaggggaacccctcctggcccggcctttctattccctggctggagtgattccgcctgaaggagaattcgcccgttttccccggacccagctgccacaagcatttagtattaggctgccgcttattattagagcgggcttagaacatcctcagcgagggaaaagttcagttagaagacatacttcaccatcttgaaaaagaagaaatcaatccccttgctactacagaagaacaactctgtttggtgcttattccagccagcacagtgaagacaggctgaggactgctaccacagatgtagaagagcttatagtgaagcacatgggtgaaacaaaagaagttggagtgctggagtgcagtagcatgatctccgttcactgcagcctcaacctcctgggctcaagtaatcctcctgtcttgtcctcccaaaatgctggaattacagtatcataatgaagacctggaaaaagacaaaacatcacaaaactgcctaggaagaggaatggaacaagtagcaaagaagttaggggtggctcatgaagagattcaaaggctcactgatgaactacaagtgaaggagaaggaacaatgtaaattagattctgcacttaagaaggctcaactagaaattgacaaattgaaggaaaatttggtaaagctgaaagaaaatgatgcagctgacctacagaaagcaaaggaacaaaatcagagactggatgaggaaattctggctttaagaaatagggttcgatcacttgactcagaaaaaaaggtgcttggtgaaatggttgaaagacttaaaggagaggtgtgtgaatctcaagagaataagcaacttggaaaccactcccctggaaaaactgtgggtggtgaacagagagaacagattgaggcttccatgttagagcctgaattatcagtaacataggaagatagaagagaaaccagtacaaaagatcaagagacaaagtacaagatttgaatgagatcctgaaaatgagccaagaaaaaaatgaaatgtttgaaagtgagtggtcaaaagagagagagagagagaagcagttggcatctggtcttgacactgcagagaaggccttgaaagttgaaagtgaggtcttgaagctttcacaagaatttgcacaattaaatcattttactctagggggaaaaactgcaccttctaatttaattacaagtgaaaatacctgtaaagatcctgaatctaatgaaccaattttggaaacagaaattcaaagccgaaaggaagagacagaggaactctgtcccaaattaggagaaagaaagcagaaggaaattccagaggagtcagtaaaggagggcagttttccaagagaggggcagaaggaggagggctcacaacagaatcgagatatgaaagatgaagaaaaagaacagcagttaaccatgaagcctgaggaaattgtgaggcttagagaagagctgagccatataaatcagagccttcttcagtctcagagctctggggatagttcagatgacagtggtgcccagagtgactgaactggaaaatgtagatgagaagaactactgttctggtttttccatccttcaaaagaagctaaaacttttgggcctttgtcctcttggtaaaactggggtgcatctcttgtatacagtatctctgttttgcatccatcatctggagaaaaactaaaatacaaccagcaaggggaagtacaacaacttcaccagaatttgcaccggctccagattctatgcaactcagctgaaaatgagcttcgatatgaacgagggcagaacttggacttaaagcaacataatagcttacttcaggaagaaaacattaagataaagattgaactaaagcatgcccaacagaagttattagacagcacaaagatgtgctcttcactcacggcagagtacaagcactgtcagcagaaaatcaaggaactggagttggaagtacttaaacacactcagagcattaaatcacagaacaacctacaggaaaagctggttcaggagaaatctaaagttgctgatgcagaggaaaagattttggacctgcagcggaaattagaacatgctcataaagtctgtctcacagacacttgtatttcagagaagcagcagctagaggaaaagataaaagaagcaacacaaaatgaagctaaagtaaagcaacaatatcaagaagaacaacagaagaggaaacttctatatcagaacgtagatgagttacacaggcaagtgagaaccttacaagataaagaaaatctactggaaatgacctgttctcagcaacaatccagaattcagcaacaagaggccctacttaaacaactggaaaatgaaaaaagaaaatatgatgagcatgtcaaaagcaaccaggaattgtcagagaagctatctaagctacagcaagagaaggaagctctacgtgaagaatatttgcgattattgaagctgcttaatgtccatgtgagaaactataatgagaaacatcaccaacaaaaagtcaagcttcaaaaagtcaagtatcgtttaactaatgaagtagaactacgagataagagaattaaccaatttgaagatgaaattggaatcctgcaacataaaatagaaaaggagaaggcaatacaggaccagatcactgcccaaaatgataccctgcttctagaaaaaaggaaacttcaggagcaagtcatagagcaagaacagttgatccacagcaacaaatggacgatatcttccatccagagcagggtactttacatggataaagaaaataagcaattacaggaaaatagtcttcgtctcacacagcagattggcttcttagagcgaattataaggagcatccatattcgcagaggagagaatcttaaggagtttcctgttccaaaatggtggcatagaggcaagctggcttctctccctccaacaaagaaacagaaagaaatatacagcactgaggtcttcaccagcaacaatgcagaactccagcatgaggatgagtcagttcctgaggccacagagaagtggaaacactctgagcagatggaaacaacaattagtgacatccttgaatccgaagtagtgaatgaaatattgcctttatcaaactccagtttttcaggaaaaggtttggtagagtcatttgcaagtcttcaagagactgaagagatcaagtcaaaagaagcaatggcaagttcaaagtcccctgaaaagtctcctgagaatcttgtgtgttcacagaattctgaggctggatacataaatgtggcttctctgaaggagacacatggtatacaagaacaagaccaaaagtcagaactataaaatcactggtgcctaaagctatactgaacaaaagtggtaatttaaagcctggacaaaaggtggaccatgacattgagaagagttaccacagatcccaaatggatatcacccaagagtcttcaaaactgctgataaattcattaaagcagttgtaaaaa

SEQ ID NO: 120998 - DNA, 2559 bp, Homo sapiens
  Payload ID: 3717
  Gene Symbol: CCDC30
  Gene Name: coiled-coil domain containing 30
  ENST ID: ENST00000471390
  CDS Start-End: 83-268
acaccatctccagagtcgttggtggctacccatgctaagtcattagtcctctttgcttactgctggctggcagatcctgaaaatgagccaagaaaaaaatgaaatgtttgaaagtgagtggtcaaaagagagagagagagagaagcagttggcatctggtcttgacactgcagagaaggccttgaaagttgaaagtgagagtcatgggcttatcgctcgttttaacttcttgtcctgccatcttggaaagatctatcaggagacataatcagcctatattatgaaaagagacctggaagaattgcaaaaatcaaagtcagagcttatatgcctttataatgaagttcacaatcttccaggggaatcagaaagcaaagaccattttttaatagcatgtgacctgttacaaagagagaattctgaattagaaacaaaggtcttgaagctttcacaagaatttgcacaattaaatcattttactctagggggaaaaactgcaccttctaatttaattacaagtgaaaatacctgtaaagatcctgaatctaatgaaccaattttggaaacagaaattcaaagccgaaaggaagagacagaggaactctgtcccaaattaggagaaagaaagcagaaggaaattccagaggagtcagtaaaggagggcagttttccaagagaggggcagaaggaggagggctcacaacagaatcgagatatgaaagatgaagaaaaagaacagcagttaaccatgaagcctgaggaaattgtgaggcttagagaagagctgagccatataaatcagagccttcttcagtctcagagctctggggatagttcagatgacagtggtgcccagcatccatcatctggagaaaaactaaaatacaaccagcaaggggaagtacaacaacttcaccagaatttgcaccggctccagattctatgcaactcagctgaaaatgagcttcgatatgaacgagggcagaacttggacttaaagcaacataatagcttacttcaggaagaaaacattaagataaagattgaactaaagcatgcccaacagaagttattagacagcacaaagatgtgctcttcactcacggcagagtacaagcactgtcagcagaaaatcaaggaactggagttggaagtacttaaacacactcagagcattaaatcacagaacaacctacaggaaaagctgaagcaacacaaaatgaagctaaagtaaagcaacaatatcaagaagaacaacagaagaggaaacttctatatcagaacgtagatgagttacacaggcaagtgagaaccttacaagataaagaaaatctactggaaatgacctgttctcagcaacaatccagaattcagcaacaagaggccctacttaaacaactggaaaatgaaaaaagaaaatatgatgagcatgtcaaaagcaaccaggaattgtcagagaagctatctaagctacagcaagagaaggaagctctacgtgaagaatatttgcgattattgaagctgcttaatgtccatgtgagaaactataatgagaaacatcaccaacaaaaagtcaagcttcaaaaagtcaagtatcgtttaactaatgaagtagaactacgagataagagaattaaccaatttgaagatgaaattggaatcctgcaacataaaatagaaaaggagaaggcaatacaggaccagatcactgcccaaaatgataccctgcttctagaaaaaaggaaacttcaggagcaagtcatagagcaagaacagttgatccacagcaacaaatggacgatatcttccatccagagcagggtactttacatggataaagaaaataagcaattacaggaaaatagtcttcgtctcacacagcagattggcttcttagagcgaattataaggagcatccatattcgcagaggagagaatcttaaggagtttcctgttccaaaatggtggcatagaggcaagctggcttctctccctccaacaaagaaacagaaagaaatatacagcactgaggtcttcaccagcaacaatgcagaactccagcatgaggatgagtcagttcctgaggccacagagaagtggaaacactctgagcagatggaaacaacaattagtgacatccttgaatccgaagtagtgaatgaaatattgcctttatcaaactccagtttttcaggaaaaggtttggtagagtcatttgcaagtcttcaagagactgaagagatcaagtcaaaagaagcaatggcaagttcaaagtcccctgaaaagtctcctgagaatcttgtgtgttcacagaattctgaggctggatacataaatgtggcttctctgaaggagacacatggtatacaagaacaagaccaaaagtcagaactataaaatcactggtgcctaaagctatactgaacaaaagtggtaatttaaagcctggacaaaaggtggaccatgacattgagaagagttaccacagatcccaaatggatatcacccaagagtcttcaaaactgctgataaattcattaaagcagttgtaaaaatgga

SEQ ID NO: 120999 - DNA, 1566 bp, Homo sapiens
  Payload ID: 3717
  Gene Symbol: CCDC30
  Gene Name: coiled-coil domain containing 30
  ENST ID: ENST00000509712
  CDS Start-End: 433-1371
acagaaagcaaaggaacaaaatcagagactggatgaggaaattctggctttaagaaatagggttcgatcacttgactcagaaaaaaaggtgcttggtgaaatggttgaaagacttaaaggagaggtgtgtgaatctcaagagaataagcaacttggaaaccactcccctggaaaaactgtgggtggtgaacagagagaacaggaaaagcctcaagatttcttgatggtgtttggcagccaggtgatggtgatagcaacaagtattaactgaaggatcattttcagcataggaattaagtgaactgagtgctgtagtcagcagattgaggcttccatgttagagcctgaattatcagtaacataggaagatagaagagaaaccagtacaaaagatcaagagacaaagtacaagatttgaatgagatcctgaaaatgagccaagaaaaaaatgaaatgtttgaaagtgagtggtcaaaagagagagagagagagaagcagttggcatctggtcttgacactgcagagaaggccttgaaagttgaaagtgaggtcttgaagctttcacaagaatttgcacaattaaatcattttactctagggggaaaaactgcaccttctaatttaattacaagtgaaaatacctgtaaagatcctgaatctaatgaaccaattttggaaacagaaattcaaagccgaaaggaagagacagaggaactctgtcccaaattaggagaaagaaagcagaaggaaattccagaggagtcagtaaaggagggcagttttccaagagaggggcagaaggaggagggctcacaacagaatcgagatatgaaagatgaagaaaaagaacagcagttaaccatgaagcctgaggaaattgtgaggcttagagaagagctgagccatataaatcagagccttcttcagtctcagagctctggggatagttcagatgacagtggtgcccagcatccatcatctggagaaaaactaaaatacaaccagcaaggggaagtacaacaacttcaccagaatttgcaccggctccagattctatgcaactcagctgaaaatgagcttcgatatgaacgagggcagaacttggacttaaagcaacataatagcttacttcaggaagaaaacattaagataaagattgaactaaagcatgcccaacagaagttattagacagcacaaagatgtgctcttcactcacggcagagtacaagcactgtcagcagaaaatcaaggaactggagttggaagtacttaaacacactcagagcattaaatcacagaacaacctacaggaaaagctggttcaggagaaatctaaagttgctgatgcagaggaaaagtgttattcatgaatctagccacactgtggagaaactaggtgcactcacaatgctgttgggagtataaattggtctaatacctgtggaggcagtttggcattatctatcaaacaaacaaatactcagcttcctgagtagctgggactacagattttggacctgcagcggaaattagaacatgctcataaagtctgtctcacagacact

SEQ ID NO: 121000 - DNA, 2445 bp, Homo sapiens
  Payload ID: 3717
  Gene Symbol: CCDC30
  Gene Name: coiled-coil domain containing 30
  Uniprot ID: Q5VVM6
  ENST ID: ENST00000507855
  CDS Start-End: 569-2287
gaaagacaattacaagatcagataatcagggatagggctaaatatagggtgcagtaggaactctaagagagaagtctgggaaaattccctgaggagctgacatttaagcagaaactcctaggacagtagccaggtgaaagaaagtgttccagagagagagagtcatttgaaatttgattattatactaatcatttgttccttatacaaatattttatttctttttttagattctgcacttaagaaggctcaactagaaattgacaaattgaaggaaaatttggtaaagctgaaagaaaatgatgcagctgacctacagaaagcaaaggaacaaaatcagagactggatgaggaaattctggctttaagaaatagggttcgatcacttgactcagaaaaaaaggtgcttggtgaaatggttgaaagacttaaaggagaggtgtgtgaatctcaagagaataagcaacttggaaaccactcccctggaaaaactgtgggtggtgaacagagagaacagtagagacggggtttcaccatgttagccaggatggtctcaatctcctgacctcatgatccacccgcctcggcctcccaaagtgctgggattacagcatccatcatctggagaaaaactaaaatacaaccagcaaggggaagtacaacaacttcaccagaatttgcaccggctccagattctatgcaactcagctgaaaatgagcttcgatatgaacgagggcagaacttggacttaaagcaacataatagcttacttcaggaagaaaacattaagataaagattgaactaaagcatgcccaacagaagttattagacagcacaaagatgtgctcttcactcacggcagagtacaagcactgtcagcagaaaatcaaggaactggagttggaagtacttaaacacactcagagcattaaatcacagaacaacctacaggaaaagctggttcaggagaaatctaaagttgctgatgcagaggaaaagattttggacctgcagcggaaattagaacatgctcataaagtctgtctcacagacacttgtatttcagagaagcagcagctagaggaaaagataaaagaagcaacacaaaatgaagctaaagtaaagcaacaatatcaagaagaacaacagaagaggaaacttctatatcagaacgtagatgagttacacaggcaagtgagaaccttacaagataaagaaaatctactggaaatgacctgttctcagcaacaatccagaattcagcaacaagaggccctacttaaacaactggaaaatgaaaaaagaaaatatgatgagcatgtcaaaagcaaccaggaattgtcagagaagctatctaagctacagcaagagaaggaagctctacgtgaagaatatttgcgattattgaagctgcttaatgtccatgtgagaaactataatgagaaacatcaccaacaaaaagtcaagcttcaaaaagtcaagtatcgtttaactaatgaagtagaactacgagataagagaattaaccaatttgaagatgaaattggaatcctgcaacataaaatagaaaaggagaaggcaatacaggaccagatcactgcccaaaatgataccctgcttctagaaaaaaggaaacttcaggagcaagtcatagagcaagaacagttgatccacagcaacaaatggacgatatcttccatccagagcagggtactttacatggataaagaaaataagcaattacaggaaaatagtcttcgtctcacacagcagattggcttcttagagcgaattataaggagcatccatattcgcagaggagagaatcttaaggagtttcctgttccaaaatggtggcatagaggcaagctggcttctctccctccaacaaagaaacagaaagaaatatacagcactgaggtcttcaccagcaacaatgcagaactccagcatgaggatgagtcagttcctgaggccacagagaagtggaaacactctgagcagatggaaacaacaattagtgacatccttgaatccgaagtagtgaatgaaatattgcctttatcaaactccagtttttcaggaaaaggtttggtagagtcatttgcaagtcttcaagagactgaagagatcaagtcaaaagaagcaatggcaagttcaaagtcccctgaaaagtctcctgagaatcttgtgtgttcacagaattctgaggctggatacataaatgtggcttctctgaaggagacacatggtatacaagaacaagaccaaaagtcagaactataaaatcactggtgcctaaagctatactgaacaaaagtggtaatttaaagcctggacaaaaggtggaccatgacattgagaagagttaccacagatcccaaatggatatcacccaagagtcttcaaaactgctgataaattcattaaagcagttgtaaaaa

SEQ ID NO: 121001 - DNA, 2093 bp, Homo sapiens
  Payload ID: 3718
  Gene Symbol: CCDC33
  Gene Name: coiled-coil domain containing 33
  Uniprot ID: Q8N5R6
  ENST ID: ENST00000268082
  CDS Start-End: 21-1124
caggactgctagcagtaaagatgggggagccagggcccccatcccctccagcccccaaggctgccccaggcctcattgacagcttctctgagatgaacaactaccggcgggccatgcagaagatggcagaggacatcctgtctctgcggagacaggccagcatcctggaaggagagaaccgcatactgaggagccgcctggcccagcaggaggaggaagaggggcagggcaaagccagtgaggcccagaacacggtgtccatgaagcagaaactgctgctgagtgagctggatatgaagaaactgagggacagggtgcagcatttgcagaatgagctgattcgaaagaatgatcgagagaaggagctgctccttctgtatcaggcccagcagccacaggccgctctgctgaagcagtaccagggcaagctgcagaagatgaaggcgctggaggagactgtgcggcaccaagagaaggtgatcgagaagatggagcgggtgctggaggacaggctgcaggacaggagcaagccccctcctctgaacaggcagcagggaaagccctacacgggcttccctatgctctcagcctctggccttcccttgggttctatgggagagaacctgccggttgaactttactcggtgctgctggcagaaaacgcgaagctgcggacggagctggataagaaccgccaccagcaggcccccatcattctgcagcaacaggccctgccggtggaccccggggagttgggagcaggaggagacttgacagagaggctacaagagacgcatggcccaggccactcagagtgcacagagaccctgcccgcacaggatctcctctctggtacttcagacaagttcaacctcctggccaagctggaacacgctcagagccggatcctgtccctggaaagccagttagaggactcagctcgacgctggggacgagagaagcaggatctggccacacggctgcaggagcaagaaaaaggtttcaggcacccctcgaactccatcatcatagaacagcctgtgagtgacccccctggagtagctcccaggggttcaggtggtggagcaggaagccaccgcacccccaaagtcactgggccctgagaaaagccattgtggagccaactccagggctgggggtcaggagtcctaggctcccattcctgctccattaccaaccgaaggctcggtcttaattcccccacctgtctaaggggaacagaaaacccctgccaaaactaccctttcccccatggggtgctgtgaaactcaaggagatgactgtggatgaggggtccatgcaggcatctccaggatgccctgacactgtgctttaggactggctgcgctcatgggcagagtagcttgtggccctacccccctgaatccatagagcctaagattctcaaattagcacacccttctcagatggccacgatgtaggctccactttgccaacttcccgagaacaaacaggcctgctcacaactgcccctcaagttcaaccccgggaccgcccagccccgcaaagcaaagaccctgacttctcctgctcttgagccagctgtgctttgcccgtggccagaagctcagcagcggctcctgggaaaggcctggaaaggatgagggaacaggcaaggaacaaaggcaacctttgcacactcacctgagccctggggacccttggagaaattaggtgtcacctgctgtggcaaaatgggtttagaaatctttgccaggtcatggcccactggattctggatactctgaggcctggtttgtcaggcaatatgcccttgagcaggtcaccccctgggaatggggggtactcacgcaccccgctttgcacaccacagagtgccctcacccactccatggacctcaagcagccctcagagctggagcccctgctgcccagctcagactctaagctcaacaagcccttgagcccccagaaggagaccgctaactctcagcagacctgagccccagagcaggcctccttccctgtgtgctggggagtctcatcaccgccccctaaaaatgacgttattaaatgttgtagctctgtga

SEQ ID NO: 121002 - DNA, 1450 bp, Homo sapiens
  Payload ID: 3718
  Gene Symbol: CCDC33
  Gene Name: coiled-coil domain containing 33
  Uniprot ID: Q8N5R6
  ENST ID: ENST00000321374
  CDS Start-End: 50-1051
aacagtccctggggacccatcctggggaacaggactgctagcagtaaagatgggggagccagggcccccatcccctccagcccccaaggctgccccaggcctcattgacagcttctctgagatgaacaactaccggcgggccatgcagaagatggcagaggacatcctgtctctgcggagacaggccagcatcctggaaggagagaaccgcatactgaggagccgcctggcccagcaggaggaggaagaggggcagggcaaagccagtgaggcccagaacacggtgtccatgaagcagaaactgctgctgagtgagctggatatgaagaaactgagggacagggtgcagcatttgcagaatgagctgattcgaaagaatgatcgagagaaggagctgctccttctgtatcaggcccagcagccacaggccgctctgctgaagcagtaccagggcaagctgcagaagatgaaggcgctggaggagactgtgcggcaccaagagaaggtgatcgagaagatggagcgggtgctggaggacaggctgcaggacaggagcaagccccctcctctgaacaggcagcagggaaagccctacacgggcttccctatgctctcagcctctggccttcccttgggttctatgggagagaacctgccggttgaactttactcggtgctgctggcagaaaacgcgaagctgcggacggagctggataagaaccgccaccagcaggcccccatcattctgcagcaacaggccctgccggatctcctctctggtacttcagacaagttcaacctcctggccaagctggaacacgctcagagccggatcctgtccctggaaagccagttagaggactcagctcgacgctggggacgagagaagcaggatctggccacacggctgcaggagcaagaaaaaggtttcaggcacccctcgaactccatcatcatagaacagcctgtgagtgacccccctggagtagctcccaggggttcaggtggtggagcaggaagccaccgcacccccaaagtcactgggccctgagaaaagccattgtggagccaactccagggctgggggtcaggagtcctaggctcccattcctgctccattaccaaccgaaggctcggtcttaattcccccacctgtctaaggggaacagaaaacccctgccaaaactaccctttcccccatggggtgctgtgaaactcaaggagatgactgtggatgaggggtccatgcaggcatctccaggatgccctgacactgtgctttaggactggctccactttgccaacttcccgagaacaaacaggcctgctcacaactgcccctcaagttcaaccccgggaccgcccagccccgcaaagcaaagaccctgacttctcctgctcttgagccagctgtgctttgcccgtggccagaagctcagcagcggctcct

SEQ ID NO: 121003 - DNA, 2787 bp, Homo sapiens
  Payload ID: 3718
  Gene Symbol: CCDC33
  Gene Name: coiled-coil domain containing 33
  Uniprot ID: Q8N5R6
  ENST ID: ENST00000398814
  CDS Start-End: 432-2699
agtgttgcccaggtgacccagctaggtggaagagcttattgttttccaggcctgggcagagacagggcccccctgccccatctctccaccgtcctaggtgtgccaagagtcaattgcctcattgctgaccctgtccagctggccatggccctcaacccccaaggcccttccacccacagaccatctcgctgctgagagatccaggacctgctcccacctggccaccctccccctccccccacatccaggccccagggctggtgtgtggcacccctgagaccacattgacctccatactgtctactacccataaggactccaagacgcccaggccagctgtctgggcaggactgattcctgatcacccactgataccaagtactcatccccaagattgttaaacaaggccagacactcctggcctcaagaggatgggactgaaaaacaaaaagaacactgaagacccagaggagcccctgatcgcctcccagagcacggaacctgagatcggtcacctgtctccctctaagaaggagaccatcatggtcaccctccatggggctaccaacctgcctgcctgcaaggatggctccgagccgtggccctatgtggtggtgaaaagcacatctgaggaaaagaacaatcagagctccaaggcagtcacatctgtgacctcagagcccaccagagcccctatctggggggacacggtgaatgtggagatccaagctgaggatgcagggcaagaagatgtgatcctcaaggtggtggacaacagaaagaaacaggagttgttgtcctacaaaatccccatcaagtacctgcgtgtcttccacccctaccactttgagctggtgaagcccactgagtctgggaaagccgatgaagccactgccaagacccagttgtacgcaacagtcgttcggaagagcagcttcataccccgctacatcggctgcaaccacatggctctggagatctttctccggggagtcaacgagcccctggccaacaaccccaaccccatagtggtgattgcccgggtcgttcccaactacaaggaatttaaggtcagccaggctaacagggacctggcctctgtggggctgcccatcaccccactgtccttccctatcccgtccatgatgaactttgacgtgcctcgcgtcagccagaacggatgccctcagctgtccaagcctgggggacccccagagcagcccctgtggaatcagtccttcctcttccaaggccgagatggagctaccagcttctcagaagacacagccctggtgctggagtactactcctcaacttcaatgaaaggcagccagccgtggaccctcaaccagcccctgggcatctctgtgttgccgctaaagagccgtttgtaccagaagatgctgacagggaaaggcttggacgggcttcacgtggagcggctccccatcatggacaccagcctgaaaactatcaatgatgaggcccccacagtggctctctccttccagctgctttcctctgagagaccagaaaacttcttgacaccaaacaacagcaaggctcttcctaccttggaccccaagatcctggataagaagctgagaaccatccaagagtcctggtccaaggacacagtgagctccacaatggacttgagcacgtccactccacgagaagcagaggaggaacctctggtgcctgagatgtcccatgacacagagatgaacaactaccggcgggccatgcagaagatggcagaggacatcctgtctctgcggagacaggccagcatcctggaaggagagaaccgcatactgaggagccgcctggcccagcaggaggaggaagaggggcagggcaaagccagtgaggcccagaacacggtgtccatgaagcagaaactgctgctgagtgagctggatatgaagaaactgagggacagggtgcagcatttgcagaatgagctgattcgaaagaatgatcgagagaaggagctgctccttctgtatcaggcccagcagccacaggccgctctgctgaagcagtaccagggcaagctgcagaagatgaaggcgctggaggagactgtgcggcaccaagagaaggtgatcgagaagatggagcgggtgctggaggacaggctgcaggacaggagcaagccccctcctctgaacaggcagcagggaaagccctacacgggcttccctatgctctcagcctctggccttcccttgggttctatgggagagaacctgccggttgaactttactcggtgctgctggcagaaaacgcgaagctgcggacggagctggataagaaccgccaccagcaggcccccatcattctgcagcaacaggccctgccggatctcctctctggtacttcagacaagttcaacctcctggccaagctggaacacgctcagagccggatcctgtccctggaaagccagttagaggactcagctcgacgctggggacgagagaagcaggatctggccacacggctgcaggagcaagaaaaaggtttcaggcacccctcgaactccatcatcatagaacagcctagtgccctcacccactccatggacctcaagcagccctcagagctggagcccctgctgcccagctcagactctaagctcaacaagcccttgagcccccagaaggagaccgctaactctcagcagacctgagccccagagcaggcctccttccctgtgtgctggggagtctcatcaccgccccctaaaaatgacgttattaaatgttgtagctctgtga

SEQ ID NO: 121004 - DNA, 1993 bp, Homo sapiens
  Payload ID: 3718
  Gene Symbol: CCDC33
  Gene Name: coiled-coil domain containing 33
  Uniprot ID: Q8N5R6
  ENST ID: ENST00000558821
  CDS Start-End: 32-1033
atcctggggaacaggactgctagcagtaaagatgggggagccagggcccccatcccctccagcccccaaggctgccccaggcctcattgacagcttctctgagatgaacaactaccggcgggccatgcagaagatggcagaggacatcctgtctctgcggagacaggccagcatcctggaaggagagaaccgcatactgaggagccgcctggcccagcaggaggaggaagaggggcagggcaaagccagtgaggcccagaacacggtgtccatgaagcagaaactgctgctgagtgagctggatatgaagaaactgagggacagggtgcagcatttgcagaatgagctgattcgaaagaatgatcgagagaaggagctgctccttctgtatcaggcccagcagccacaggccgctctgctgaagcagtaccagggcaagctgcagaagatgaaggcgctggaggagactgtgcggcaccaagagaaggtgatcgagaagatggagcgggtgctggaggacaggctgcaggacaggagcaagccccctcctctgaacaggcagcagggaaagccctacacgggcttccctatgctctcagcctctggccttcccttgggttctatgggagagaacctgccggttgaactttactcggtgctgctggcagaaaacgcgaagctgcggacggagctggataagaaccgccaccagcaggcccccatcattctgcagcaacaggccctgccggatctcctctctggtacttcagacaagttcaacctcctggccaagctggaacacgctcagagccggatcctgtccctggaaagccagttagaggactcagctcgacgctggggacgagagaagcaggatctggccacacggctgcaggagcaagaaaaaggtttcaggcacccctcgaactccatcatcatagaacagcctgtgagtgacccccctggagtagctcccaggggttcaggtggtggagcaggaagccaccgcacccccaaagtcactgggccctgagaaaagccattgtggagccaactccagggctgggggtcaggagtcctaggctcccattcctgctccattaccaaccgaaggctcggtcttaattcccccacctgtctaaggggaacagaaaacccctgccaaaactaccctttcccccatggggtgctgtgaaactcaaggagatgactgtggatgaggggtccatgcaggcatctccaggatgccctgacactgtgctttaggactggctgcgctcatgggcagagtagcttgtggccctacccccctgaatccatagagcctaagattctcaaattagcacacccttctcagatggccacgatgtaggctccactttgccaacttcccgagaacaaacaggcctgctcacaactgcccctcaagttcaaccccgggaccgcccagccccgcaaagcaaagaccctgacttctcctgctcttgagccagctgtgctttgcccgtggccagaagctcagcagcggctcctgggaaaggcctggaaaggatgagggaacaggcaaggaacaaaggcaacctttgcacactcacctgagccctggggacccttggagaaattaggtgtcacctgctgtggcaaaatgggtttagaaatctttgccaggtcatggcccactggattctggatactctgaggcctggtttgtcaggcaatatgcccttgagcaggtcaccccctgggaatggggggtactcacgcaccccgctttgcacaccacagagtgccctcacccactccatggacctcaagcagccctcagagctggagcccctgctgcccagctcagactctaagctcaacaagcccttgagcccccagaaggagaccgctaactctcagcagacctgagccccagagcaggcctccttccctgtgtgctggggagtctcatcaccgccccctaaaaatgacgttattaaatgttgta

SEQ ID NO: 121005 - DNA, 2119 bp, Homo sapiens
  Payload ID: 3718
  Gene Symbol: CCDC33
  Gene Name: coiled-coil domain containing 33
  ENST ID: ENST00000558659
  CDS Start-End: 1-2104
gttgttgtcctacaaaatccccatcaagtacctgcgtgtcttccacccctaccactttgagctggtgaagcccactgagtctgggaaagccgatgaagccactgccaagacccagttgtacgcaacagtcgttcggaagagcagcttcataccccgctacatcggctgcaaccacatggctctggagatctttctccggggagtcaacgagcccctggccaacaaccccaaccccatagtggtgattgcccgggtcgttcccaactacaaggaatttaaggtcagccaggctaacagggacctggcctctgtggggctgcccatcaccccactgtccttccctatcccgtccatgatgaactttgacgtgcctcgcgtcagccagaacggatgccctcagctgtccaagcctgggggacccccagagcagcccctgtggaatcagtccttcctcttccaaggccgagatggagctaccagcttctcagaagacacagccctggtgctggagtactactcctcaacttcaatgaaaggcagccagccgtggaccctcaaccagcccctgggcatctctgtgttgccgctaaagagccgtttgtaccagaagatgctgacagggaaaggcttggacgggcttcacgtggagcggctccccatcatggacaccagcctgaaaactatcaatgatgaggcccccacagtggctctctccttccagctgctttcctctgagagaccagaaaacttcttgacaccaaacaacagcaaggctcttcctaccttggaccccaagatcctggataagaagctgagaaccatccaagagtcctggtccaaggacacagtgagctccacaatggacttgagcacgtccactccacgagaagcagaggaggaacctctggtgcctgagatgtcccatgacacagagatgaacaactaccggcgggccatgcagaagatggcagaggacatcctgtctctgcggagacaggccagcatcctggaaggagagaaccgcatactgaggagccgcctggcccagcaggaggaggaagaggggcagggcaaagccagtgaggcccagaacacggtgtccatgaagcagaaactgctgctgagtgagctggatatgaagaaactgagggacagggtgcagcatttgcagaatgagctgattcgaaagaatgatcgagagaaggagctgctccttctgtatcaggcccagcagccacaggccgctctgctgaagcagtaccagggcaagctgcagaagatgaaggcgctggaggagactgtgcggcaccaagagaaggtgatcgagaagatggagcgggtgctggaggacaggctgcaggacaggagcaagccccctcctctgaacaggcagcagggaaagccctacacgggcttccctatgctctcagcctctggccttcccttgggttctatgggagagaacctgccggttgaactttactcggtgctgctggcagaaaacgcgaagctgcggacggagctggataagaaccgccaccagcaggcccccatcattctgcagcaacaggccctgccggtggaccccggggagttgggagcaggaggagacttgacagagaggctacaagagacgcatggcccaggccactcagagtgcacagagaccctgcccgcacaggatctcctctctggtacttcagacaagttcaacctcctggccaagctggaacacgctcagagccggatcctgtccctggaaagccagttagaggactcagctcgacgctggggacgagagaagcaggatctggccacacggctgcaggagcaagaaaaaggtttcaggcacccctcgaactccatcatcatagaacagcctccttacagcctcccgcctgccccaggagccagcatctttggaaagccaagggccacagtggacccaggagggtggagagaagaggccttccaaagcaggggccagggagacgggccccttccagacccggagaagaagcaaggccaccagagaccagctctgttgggaaatacgagggaggcttgtccttttcatctgccccaaaacatctatcatgtctgatattccttctttcaa

SEQ ID NO: 121006 - DNA, 2109 bp, Homo sapiens
  Payload ID: 3719
  Gene Symbol: CCDC34
  Gene Name: coiled-coil domain containing 34
  Uniprot ID: Q96HJ3
  ENST ID: ENST00000317945
  CDS Start-End: 41-730
tccccgccgcggctccgccagtttgaacttggcgggccagatgtgggcggcggggcgctgggggcctacttttccctcttcctacgccggtttctctgctgactgcagacccaggtctcggccctcctcggactcctgctcagtccctatgacgggcgcacgtgggcaggggctggaggtggtgcgctcgccgtcgccgccgctgccgctgagctgcagcaattccaccaggtcgctgttgtctccccttggccaccagagcttccagtttgacgaggacgacggtgacggggaggatgaggaagacgtggatgatgaggaagacgtggatgaagatgcccatgattcagaggccaaagtggcgagcctgagaggaatggagttacaggggtgcgccagcactcaggttgaatcagaaaataaccaagaagaacagaaacaggtgcgcttaccagaaagccgcctgacaccatgggaggtgtggtttattggcaaagaaaaagaagaacgtgaccggctgcaactgaaagctctagaggaattaaatcaacaactagaaaaaagaaaagaaatggaagaacgtgaaaaaagaaagataattgctgaagaaaagcacaaggaatgggttcagaaaaagaatgagcaagtaaggaggggaaaatggatacacacattgacatctcttttgcaaaatatttcttcctattatacttcattacctaggttttaaaaaatacttctcttagagtctttcttctttggcttgttttgtttttctatcctggtggacatttatcaagtctctatcttctgccctttgccctctacttttctcctttttccctcctgtggcttgcactaatatttgcctgcaggcagtcaccaagtctgtatttctaggcctgaccttttggatccttatggcaagtgcctccaagtctgcaaatctaaaacaacccattttgcccatttctccttcgtaaatccatcctcccatttctctgtttcattcagctgtcttctcggtcatcaaggcttaattagaattcttctgttgttcctaatcatctcctccttttctttacaattactactcccctgtttgtgatctctttccattatatctttcaacttgttgtttacttcttatactggattgtaagctacataagggcagggatttttgcctcttttgttcagttttccaggagctagatgaatacctgcgcatgatatatgtccaaaaatagtttaattgagtgaagatgttcattgaatggctgcattttttccttttaattttaatatattcttctatggatcacacacattcgaaattttaaaaatacttattctgtggtcaatttgtcttctgttgtgatttttacatatttagagtggtactgcttttattattataatccagttttacaaatgtggaaaaatgtttaaattgtaggacaatattttaaattttaattctaactttttatctttattgttgaatctaatgcctaatggtattaataagagtactaagtaaataatttcagtaaattgaagatgatataaccttcttcatccaagtattataagaaggaaattggttagatgtatgtgtgttataaccatatttgtttagaagtcaattactttgtttttttaaaaaagtttacttcatcccatgatataacatgaaagagatctttgtgaataaattcaaaaatcaaaataaatctctgtgactgttataaaactttgggtaatatctttttgaaatttgtaactataaaacaaaattattttacacatgcagaatagtttgctctttcctctaaaagtccttcttatcttctaactccattaagctaattttaccatgccaatcaaacctagttgttgtttgtctaggaatgtaagatacttctgggagacaatatattcactgttttaattagtggcagtagacctaatccaattatttgaagaaaaaaaaaattatttcttttggagggaagtggcttgccctgacataaatcactagttattgaaggcaaaattccgtaatgttgagaattatttaaaaataaaactgagacgttatattta

SEQ ID NO: 121007 - DNA, 2103 bp, Homo sapiens
  Payload ID: 3719
  Gene Symbol: CCDC34
  Gene Name: coiled-coil domain containing 34
  Uniprot ID: Q96HJ3
  ENST ID: ENST00000328697
  CDS Start-End: 675-1796
gagacttttaatcatctatcccttgtgctttacgcagaccctacaatacactagaggcttcaaagaggtcaaaaattcacatgtgtagacaaattaggtcccttaagatgccaggcaaacgaagtgctaccaaaacacgcaatgactgtcctaaaagtgcgttctgggatacacctgtaaacttggatcaagttccctcccctctcctcaaaatatatcgacttgtgctgaaagaaatcacgaccgatgctcacaattctgacctcgtaattatatagggggtggttttggtttctgcgtctttccctgattcagtggcaggtaacatatttcatgtacaaaatgaactgcaacaccacggcaaacaagggacaggccctcaaagttgtcggtagggagccaggaccccgccagtggcgtggggagacaccgtactaaacaagcttgcaaacagcaggcaccttcctgccactgaggaggaagggctggctaagggaggccggggcggaggaagccaagctctgcaggccctgacaaagtcctcccggcctccacgcgtcgccatggcaacgcggggtctgtgctggccgggattggccggcctggcgcgcgcagggcccgctgggaaagcgcgtccccgccgcggctccgccagtttgaacttggcgggccagatgtgggcggcggggcgctgggggcctacttttccctcttcctacgccggtttctctgctgactgcagacccaggtctcggccctcctcggactcctgctcagtccctatgacgggcgcacgtgggcaggggctggaggtggtgcgctcgccgtcgccgccgctgccgctgagctgcagcaattccaccaggtcgctgttgtctccccttggccaccagagcttccagtttgacgaggacgacggtgacggggaggatgaggaagacgtggatgatgaggaagacgtggatgaagatgcccatgattcagaggccaaagtggcgagcctgagaggaatggagttacaggggtgcgccagcactcaggttgaatcagaaaataaccaagaagaacagaaacaggtgcgcttaccagaaagccgcctgacaccatgggaggtgtggtttattggcaaagaaaaagaagaacgtgaccggctgcaactgaaagctctagaggaattaaatcaacaactagaaaaaagaaaagaaatggaagaacgtgaaaaaagaaagataattgctgaagaaaagcacaaggaatgggttcagaaaaagaatgagcaaaaaagaaaagaaagagaacaaaaaattaataaagaaatggaggaaaaagcagcaaaggaactggagaaagaatacttgcaagaaaaagcaaaagaaaaatatcaagaatggttaaagaaaaaaaatgctgaagaatgtgagaggaagaagaaagaaaaggaaaaagaaaaacaacagcaagctgaaatacaggagaaaaaggaaatagcagaaaaaaagtttcaagaatggttggaaaatgcgaaacataaacctcgtccagctgcaaagagctatggttatgccaatggaaaacttacaggtttttacagtggaaattcctatccagaaccagccttttataatccaattccgtggaaaccaattcatatgccacctcccaaagaagctaaggatctatcaggaaggaagagtaaaagacctgtgataagtcagccacacaagtcatcatctctggtaattcataaagccaggagcaatctttgccttggaactctgtgcagaatacaaagatagcgtatgtggaaaataacatgcttttatctggagctatttaatttaaaaatcagaaattgttttttactgctcagtcaataactcaacacttaatgtgattattgacaaatagcaatttttgcatttgtatatggagtccttagagttgaggaagatattttctggattttggtttttataaactttttaaggttgatcttggcatgttgttttgcagaataagtggctgaatatgtaagaattgtgtttgtatttagcttgtattaaaagtacactgtaataccaataaaactaacaatttttcttg

SEQ ID NO: 121008 - DNA, 2613 bp, Homo sapiens
  Payload ID: 3720
  Gene Symbol: CCDC36
  Gene Name: coiled-coil domain containing 36
  Uniprot ID: Q8IYA8
  ENST ID: ENST00000296449
  CDS Start-End: 388-2172
gcttttccttcatctccaaagtcctctaaactgacagggtctcattctgtcgcccaggctggagtgtagtgacgcgatctcggctcactgcaacctctacctcccaggttcaaacgatcctcccgcctcagcctccgagtagctgggaccacaggggcccggttcgatgtccccatctgcccacggcgcctctcgtgccagctgctccgcctgtcctgcccttgctcagaccacccaagtatcatctgtgctctggcccctggccaccagttccaccccacatgctgtcctcacaggtggcgccttgccattcctggggaccagggcctccttgttctggtcatacacagtggagtgtaggtcgagcgacaagtataactataagaaatgaattttaatgtctggaatatcaaagagatgctcagtattccttcaggctctgggaacaagaagtcatccaactggaataataatcaaaatgattattccagtctcagtgattcccagttcctctttggatctcagttctgtccagaaaattcagaaaccctatcagcacccttggactttggtgcccacttgagacattcaaaacagtcacaacagaactatctggagggtgaacctagcattttcacaaagtaccagacaaagccccagctgttcggaggagatataaaagatggaggtttatttcctcctcctttgtcagttggaaaatcaaaaggcctcttggaacagtttgaggagaaaaagaaaagggcaaaagacaaatgtgacagtgagactctatacaactttgtttctaatgttagagaaagcattctcaggttgcagacgtctgtggaaaagtctgaggaccatctcagttcaagaagccaatctattttggattctttggagactgtggccaagacattacaagagactatacaggcccagaatgacctggtgtttgaggcagtccaggacaaaggcaacatggagcaggccatccttgagatgaagaaaagatttgaagctagacaaggagagtttatagaaatgaagtccaacctgaagcaccttgaagttttagttgctcagcagagtcaggaattccagcagctgtgtgagcagctaggccagctgaatgtgcccagtgtcctagcagagctgaagagattgatctcagtgcctccagtgaaagacagtgcttctcagacgtcgccacctttggcccagagcctcaatctcaccaggcaggaaaaatacacctctgagaaaccagttttatggcaggcccaggccctccctgctgcatggaatcctggtatgggctccctacagcctggagaatttgatgtctggggtgaaggagcaaagaatgatgatctccaagaagaggctgcactgccagcatttgggtcccatgaaagaaataggcatgtaaaggacaaggtggtgcagactaactgcaagaactgggctgttactaaaacaggtgccaagaaccatggttccagcgtcccaggccataagattcccagtgacagggacctggtttcccaaggagcctcacagctcacatcattggagataaacttttcaaccagcattaagaatgcctgccaaaaatatcaagcccaaagtatgtttttgtgtgacccacgtgaacatttggtgattaaacagaaagatgggactgtagaaatgcgggggaaagacaagaagcagcagcccaggaaggcccacagggcccacagaggcaggctcatagccagcaagcaaaaacaaatcccaatccagacctgtaaattcaattccaaatatcagagtcctcagcctgcaatttctgtccctcaaagccccttcctggggcagcaggaaccccgtgctcagcctctgcatctgcagtgtcccaggagccccagaaaaccagtctgccctattctgggaggaacagtcatgcccaataagacagtaagggcagtgcagggaagactcttgcagctcagcaggtgctcttcccaagacaactggctactttccagcagttcccagggggaccaccagatgagctggttcagtgacctcaatctcggatgttcagagacccctctatgcaaggaggcaggaaagaatttgctctatgacctgggttttgatagcagtgatgatgatggcttctgaccagtccacagttgatttattggtctcagctagaaagagaaattgcaggacatttgggctggccaacagcagaaagtccctgaagcctgccaagtacccagggtcagaggccctgctgaggtggggcaatgagcacgagggcagggaaggtccagcattctgggtaccaggtgctgcccctgacaaggattaagtgcatccttatttattggaatgaaatgtgaaaatggtgctgatgaaaactgaggcagcagcctggttgtggggcatctggagcagggtgcctgtactttggcgaaaggcaggcaggcctccttatggaatactgtgtagcagaagggctctcataaaactgttgcggtggcagcatgactccaaacaacatttttgggtctttaaaatattccctacacatgaccaatacattttcaggcctcagga

SEQ ID NO: 121009 - DNA, 2843 bp, Homo sapiens
  Payload ID: 3720
  Gene Symbol: CCDC36
  Gene Name: coiled-coil domain containing 36
  Uniprot ID: Q8IYA8
  ENST ID: ENST00000438782
  CDS Start-End: 237-2021
caggggcccggttcgatgtccccatctgcccacggcgcctctcgtgccagctgctccgcctgtcctgcccttgctcagaccacccaagtatcatctgtgctctggcccctggccaccagttccaccccacatgctgtcctcacaggtggcgccttgccattcctggggaccagggcctccttgttctggtcatacacagtggagtgtaggtcgagcgacaagtataactataagaaatgaattttaatgtctggaatatcaaagagatgctcagtattccttcaggctctgggaacaagaagtcatccaactggaataataatcaaaatgattattccagtctcagtgattcccagttcctctttggatctcagttctgtccagaaaattcagaaaccctatcagcacccttggactttggtgcccacttgagacattcaaaacagtcacaacagaactatctggagggtgaacctagcattttcacaaagtaccagacaaagccccagctgttcggaggagatataaaagatggaggtttatttcctcctcctttgtcagttggaaaatcaaaaggcctcttggaacagtttgaggagaaaaagaaaagggcaaaagacaaatgtgacagtgagactctatacaactttgtttctaatgttagagaaagcattctcaggttgcagacgtctgtggaaaagtctgaggaccatctcagttcaagaagccaatctattttggattctttggagactgtggccaagacattacaagagactatacaggcccagaatgacctggtgtttgaggcagtccaggacaaaggcaacatggagcaggccatccttgagatgaagaaaagatttgaagctagacaaggagagtttatagaaatgaagtccaacctgaagcaccttgaagttttagttgctcagcagagtcaggaattccagcagctgtgtgagcagctaggccagctgaatgtgcccagtgtcctagcagagctgaagagattgatctcagtgcctccagtgaaagacagtgcttctcagacgtcgccacctttggcccagagcctcaatctcaccaggcaggaaaaatacacctctgagaaaccagttttatggcaggcccaggccctccctgctgcatggaatcctggtatgggctccctacagcctggagaatttgatgtctggggtgaaggagcaaagaatgatgatctccaagaagaggctgcactgccagcatttgggtcccatgaaagaaataggcatgtaaaggacaaggtggtgcagactaactgcaagaactgggctgttactaaaacaggtgccaagaaccatggttccagcgtcccaggccataagattcccagtgacagggacctggtttcccaaggagcctcacagctcacatcattggagataaacttttcaaccagcattaagaatgcctgccaaaaatatcaagcccaaagtatgtttttgtgtgacccacgtgaacatttggtgattaaacagaaagatgggactgtagaaatgcgggggaaagacaagaagcagcagcccaggaaggcccacagggcccacagaggcaggctcatagccagcaagcaaaaacaaatcccaatccagacctgtaaattcaattccaaatatcagagtcctcagcctgcaatttctgtccctcaaagccccttcctggggcagcaggaaccccgtgctcagcctctgcatctgcagtgtcccaggagccccagaaaaccagtctgccctattctgggaggaacagtcatgcccaataagacagtaagggcagtgcagggaagactcttgcagctcagcaggtgctcttcccaagacaactggctactttccagcagttcccagggggaccaccagatgagctggttcagtgacctcaatctcggatgttcagagacccctctatgcaaggaggcaggaaagaatttgctctatgacctgggttttgatagcagtgatgatgatggcttctgaccagtccacagttgatttattggtctcagctagaaagagaaattgcaggacatttgggctggccaacagcagaaagtccctgaagcctgccaagtacccagggtcagaggccctgctgaggtggggcaatgagcacgagggcagggaaggtccagcattctgggtaccaggtgctgcccctgacaaggattaagtgcatccttatttattggaatgaaatgtgaaaatggtgctgatgaaaactgaggcagcagcctggttgtggggcatctggagcagggtgcctgtactttggcgaaaggcaggcaggcctccttatggaatactgtgtagcagaagggctctcataaaactgttgcggtggcagcatgactccaaacaacatttttgggtctttaaaatattccctacacatgaccaatacattttcaggcctcaggatttttttctttcttatttttagccacttatgctaccagaatgtttgcattttttgatcagtagacatattacaggacaccctaaatcttcttgtgaacagagaaaataaaatgataagcctgccagtgaaagaggtgacattcactagcaaatgtccagagcatatcactgctcacaagccatttttcttcctggttgctttttcccttgtcctgtttttcaagcactttcttaaaactaataatattgtagaccttgtatttctgaagagcagtgggcttatatgggactttggctttccatttttatcttgctgaagtttttgagtttttgcaacacaagtattttttgttatcagaaataagataaaacatttaaaag

SEQ ID NO: 121010 - DNA, 1568 bp, Homo sapiens
  Payload ID: 3720
  Gene Symbol: CCDC36
  Gene Name: coiled-coil domain containing 36
  Uniprot ID: Q8IYA8
  ENST ID: ENST00000366429
  CDS Start-End: 80-691
ggacgcggccacctcgaagccacgtcagggcagccccaggtcgggcgcgtgccagcagccagaggtataactataagaaatgaattttaatgtctggaatatcaaagagatgctcagtattccttcaggctctgggaacaagaagtcatccaactggaataataatcaaaatgattattccagtctcagtgattcccagttcctctttggatctcagttctgtccagaaaattcagaaaccctatcagcacccttggactttggtgcccacttgagacattcaaaacagtcacaacagaactatctggagggtgaacctagcattttcacaaagtaccagacaaagccccagctgttcggaggagatataaaagatggaggtttatttcctcctcctttgtcagttggaaaatcaaaaggcctcttggaacagtttgaggagaaaaagaaaagggcaaaagacaaatgtgacagttgcagacgtctgtggaaaagtctgaggaccatctcagttcaagaagccaatctattttggattctttggagactgtggccaagacatgtgagtgcctcatgtttgaggtatcagcagagggcactggtgaatgatgaacatgaactttctgaccccagcctggtttccagtggtgaggttcctcacagggtttcagatgagaggatgggtatatagggttagtcctgaagagatgtggagcacactgagctgggtagtgaggcccacctctatgtgacaatgctctggtcccatgatgccttttgtgaggcactaatcccccacctggtaaccatgttgcctcagggcaggtagctctgctaggtttctcatctcactgcctgaagtgagtcagcaacatccttgagtctcaaattgctgcctgtgctgtctatagacactgactgcccccttaggagttagaaatactgtagtacctgctgctcttcttgctgccttggtttcagtgagagctgtgttgtgaatcacagcatcattctcaattttttttttttttttgagacagagtctcgctctgtcacccaggctggagtgcagtggcgcaatctcggctcactgcaagctccgcctcccgggttcacgccattctcctgcctcagcctcctaagtagctgggactacaggcgtctgccaccacggctggctaatttttaaaatttttagtagagacggggtttcactgtgttagccaggatggtctccatctcctgacctcgtgatctgcccgcctcagcctcccaaagtgctgggattacaggcatgagccaccacgcccagccccattctcaattttacttatagtttgtggtttataaaatcctgtgctccaccaattagtggtttacatttagatgaaaccatggcccttgccctataaacagaagagagtaaatatacagttctccttgggtgaatacttctctagaaccacctgtttcctagcaaaacgatgagctgatgactatgcatctgtacttgtttgcatttgtctgtgtgtttattttataaacaagttgaaatcaacttacacaaa

SEQ ID NO: 121011 - DNA, 2315 bp, Homo sapiens
  Payload ID: 3720
  Gene Symbol: CCDC36
  Gene Name: coiled-coil domain containing 36
  Uniprot ID: Q8IYA8
  ENST ID: ENST00000452691
  CDS Start-End: 90-1874
agaggcagcgggacgcggccacctcgaagccacgtcagggcagccccaggtcgggcgcgtgccagcagccagaggtataactataagaaatgaattttaatgtctggaatatcaaagagatgctcagtattccttcaggctctgggaacaagaagtcatccaactggaataataatcaaaatgattattccagtctcagtgattcccagttcctctttggatctcagttctgtccagaaaattcagaaaccctatcagcacccttggactttggtgcccacttgagacattcaaaacagtcacaacagaactatctggagggtgaacctagcattttcacaaagtaccagacaaagccccagctgttcggaggagatataaaagatggaggtttatttcctcctcctttgtcagttggaaaatcaaaaggcctcttggaacagtttgaggagaaaaagaaaagggcaaaagacaaatgtgacagtgagactctatacaactttgtttctaatgttagagaaagcattctcaggttgcagacgtctgtggaaaagtctgaggaccatctcagttcaagaagccaatctattttggattctttggagactgtggccaagacattacaagagactatacaggcccagaatgacctggtgtttgaggcagtccaggacaaaggcaacatggagcaggccatccttgagatgaagaaaagatttgaagctagacaaggagagtttatagaaatgaagtccaacctgaagcaccttgaagttttagttgctcagcagagtcaggaattccagcagctgtgtgagcagctaggccagctgaatgtgcccagtgtcctagcagagctgaagagattgatctcagtgcctccagtgaaagacagtgcttctcagacgtcgccacctttggcccagagcctcaatctcaccaggcaggaaaaatacacctctgagaaaccagttttatggcaggcccaggccctccctgctgcatggaatcctggtatgggctccctacagcctggagaatttgatgtctggggtgaaggagcaaagaatgatgatctccaagaagaggctgcactgccagcatttgggtcccatgaaagaaataggcatgtaaaggacaaggtggtgcagactaactgcaagaactgggctgttactaaaacaggtgccaagaaccatggttccagcgtcccaggccataagattcccagtgacagggacctggtttcccaaggagcctcacagctcacatcattggagataaacttttcaaccagcattaagaatgcctgccaaaaatatcaagcccaaagtatgtttttgtgtgacccacgtgaacatttggtgattaaacagaaagatgggactgtagaaatgcgggggaaagacaagaagcagcagcccaggaaggcccacagggcccacagaggcaggctcatagccagcaagcaaaaacaaatcccaatccagacctgtaaattcaattccaaatatcagagtcctcagcctgcaatttctgtccctcaaagccccttcctggggcagcaggaaccccgtgctcagcctctgcatctgcagtgtcccaggagccccagaaaaccagtctgccctattctgggaggaacagtcatgcccaataagacagtaagggcagtgcagggaagactcttgcagctcagcaggtgctcttcccaagacaactggctactttccagcagttcccagggggaccaccagatgagctggttcagtgacctcaatctcggatgttcagagacccctctatgcaaggaggcaggaaagaatttgctctatgacctgggttttgatagcagtgatgatgatggcttctgaccagtccacagttgatttattggtctcagctagaaagagaaattgcaggacatttgggctggccaacagcagaaagtccctgaagcctgccaagtacccagggtcagaggccctgctgaggtggggcaatgagcacgagggcagggaaggtccagcattctgggtaccaggtgctgcccctgacaaggattaagtgcatccttatttattggaatgaaatgtgaaaatggtgctgatgaaaactgaggcagcagcctggttgtggggcatctggagcagggtgcctgtactttggcgaaaggcaggcaggcctccttatggaatactgtgtagcagaagggctctcataaaactgttgcggtggcagcatgactccaaacaacatttttgggtctttaaaatattccctacacatgaccaatacattttcaggcctcagga

SEQ ID NO: 121012 - DNA, 2277 bp, Homo sapiens
  Payload ID: 3721
  Gene Symbol: CCDC38
  Gene Name: coiled-coil domain containing 38
  Uniprot ID: Q502W7
  ENST ID: ENST00000344280
  CDS Start-End: 559-2250
agagccccggaaggggggccatgggggaaacctctgcccggggggttggggtgggagcctggagatagcgctcctggagagggcagagtaggggaaagctgtgcccaggggcagggacgggagcttggaggtagagccccgggagaggacagagtgggggaaacctctgcctagggtgctgggacgcgagcctggaggcagagccccgggagggtactgcgtggaggaaacatctgcccacaggttctggggcgggagcccgggacgcggagggccgcgagccgagggaacctgggggtggggaggagggggatgcggtaggggaggtgctcctgggtccgcgcgggtggcgggtgccccgcacttatccgttggccagctgcgttccgggatcagctaccagacggtccctgagatgaccgggaaccgggctgggggaggatagagccgagactggaggatcgattggcacctccgcccacttttcccacaacgccttcccgaacgataggttggaaaggctcctggatccaaactcgctgagggccaggcaagaaaatgtcctcaaatttattgccaacactgaattctggaggtaaagtaaaagatggctcaaccaaagaggacaggccttataagatctttttcagagatctctttcttgtcaaagaaaatgaaatggcagcaaaggaaacggaaaaatttatgaaccgtaacatgaaagtctaccagaaaactactttttcatccagaatgaagagtcattcatacctgagccaactagctttctaccctaaaaggagtggtaggtcatttgaaaagtttgggccaggtcctgctccgattcctagattaatagaaggttccgacacaaaaaggactgtccatgaatttattaatgaccagagagacaggtttctgctcgagtatgctttgtcaaccaaaagaaacacaatcaaaaagtttgaaaaagacatagcaatgagggaacggcaactaaaaaaagcagagaaaaagctccaagatgatgcactggcctttgaagagttccttcgagaaaatgaccagagatctgtagacgctctgaaaatggcagcacaggaaacaataaacaaactccaaatgacagcagagctgaagaaagcaagcatggaggtacaagcagtgaaaagtgaaatagcaaaaacagaattcctcctcagggagtatatgaaatatggtttttttctgctgcaaatgtctccaaaacattggcaaatccagcaagcactaaaaagagcacaggcatcaaaaagtaaagcaaatatcatccttccaaaaatattagcaaaattatcattacattcaagtaacaaggaaggcatccttgaggagtccgggaggacagctgtcctttcagaagatgcttctcagggaagagacagccaaggaaagccaagcagaagcctgactcgcactccagagaaaaagaaatcaaacctggctgaaagtttcggttcagaagacagtttggaattccttttagatgatgaaatggacgttgatttggagccagcactttatttcaaggaaccagaggagttacttcaagtcctcagagagctggaagagcagaatcttactttgtttcaatattcccaagatgtagatgaaaatcttgaagaggtaaacaaaagagaaaaagttatacaggataaaacaaatagcaacatagagtttcttttggagcaagaaaaaatgcttaaagctaactgtgtgagagaagaagagaaagcagcagaattgcaattaaagtccaagctctttagctttggagaatttaattcagatgctcaggaaatactgatagactcacttagtaaaaagattactcaagtatacaaagtctgcattggagatgctgaggatgacggcctcaacccaattcaaaagctggtaaaagtagaatctcgcctggtagaactgtgtgacctcatcgaatccattcccaaagaaaatgtggaggcaattgagaggatgaaacagaaagaatggcggcaaaagtttcgtgatgagaaaatgaaagaaaaacaaagacaccaacaggaaaggctaaaagctgctctggaaaaagcagtagcacaaccaaagaaaaagttgggaagacgacttgtctttcattcaaaacctccatctggtaacaaacagcagctacctttagtcaatgaaacaaaaacaaaatcacaagaggaagaatatttttttacttgaataaaagcagtaagacattttattacc

SEQ ID NO: 121013 - DNA, 499 bp, Homo sapiens
  Payload ID: 3721
  Gene Symbol: CCDC38
  Gene Name: coiled-coil domain containing 38
  ENST ID: ENST00000549876
  CDS Start-End: 1-272
aaagagaaaaagttatacaggataaaacaaatagcaacatagagtttcttttggagcaagaaaaaatgcttaaagctaactgtgtgagagaagaagagaaagcagcagaattgcaattaaagtccaagctctttagctttggagaatttaattcagatgctcaggaaatactgatagactcacttagtaaaaagattactcaagtatacaaagtctgcattggagatgctgaggatgacggcctcaacccaattcaaaagctggtttcgtgatgagaaaatgaaagaaaaacaaagacaccaacaggaaaggctaaaagctgctctggaaaaagcagtagcacaaccaaagaaaaagttgggaagacgacttgtctttcattcaaaacctccatctggtaacaaacagcagctacctttagtcaatgaaacaaaaacaaaatcacaagaggaagaatatttttttacttgaataaaagcagtaagacattttattacca

SEQ ID NO: 121014 - DNA, 511 bp, Homo sapiens
  Payload ID: 3721
  Gene Symbol: CCDC38
  Gene Name: coiled-coil domain containing 38
  ENST ID: ENST00000546803
  CDS Start-End: 193-336
atccgttggccagctgcgttccgggatcagctaccagacggtccctgagatgaccgggaaccgggctgggggaggatagagccgagactggaggatcgattggcacctccgcccacttttcccacaacgccttcccgaacgataggttggaaaggctcctggatccaaactcgctgagggccaggcaagaaaatgtcctcaaatttattgccaacactgaattctggagcagtaagagctatgtcggtgctgtgggaaacagacagaggagctgtgacttctacccaggagatgtggaggcaaggctatctgcattctactgttaaagcaaactaaacatggcctgagaaggactccatactccatacttctatatttgagtccttgtgaacgaactgcaacctaacttaataggtaaagtaaaagatggctcaaccaaagaggacaggccttataagatctttttcagagatctctttcttgtcaaagaaaatgaaatggcagcaaagga

SEQ ID NO: 121015 - DNA, 2599 bp, Homo sapiens
  Payload ID: 3721
  Gene Symbol: CCDC38
  Gene Name: coiled-coil domain containing 38
  ENST ID: ENST00000546386
  CDS Start-End: 220-261
cgcgcgggtggcgggtgccccgcacttatccgttggccagctgcgttccgggatcagctaccagacggtccctgagatgaccgggaaccgggctgggggaggatagagccgagactggaggatcgattggcacctccgcccacttttcccacaacgccttcccgaacgataggttggaaaggctcctggatccaaactcgctgagggccaggcaagaaaatgtcctcaaatttattgccaacactgaattctggaggttaagtctggatacaagcattccatatggaggttcacatcaggggcccaactccttctggcctgttcctgggctatgttcttggtccaagacggctgcttccacaccagtgattacatccatattcctgccagccaggagaaaaggggaaggggggacatgccctgaagttgcattcaccacttccgctgacctgcctccaagggaggctgagaaacatagcctctactctgagtgttcatttagggttctattcctatagaagaaggaagaatggatattgggggttcactagtagtatctgctccactaccattttttttaaaaaagcatttaaaaggagccatgtttggaatttattctacagatatgtatgcacaagtgattaaagatgtgtgtacaggaatatttattgcagcattgtttacaatagcaaaagactggaatcaatcataatgtccattggaaagggttggttatgtaaactataatacaaccagggaatgggataatgggatactagacagacagcttctctgtcacccaagctgaagtgcagtggcaccatctcggctcactgcaacctccgcctcctgggggttcaagcaattctcgtgcctcagccttccgggtagctggaattacaggtgcccaccacgcctggctaatttttgtatttttagtagagacgggttttccccatgctggccaggctagtctccaactcctgacctcaggtgatccgcccgcctcggtctcccaaagtgctgggactacaggtgtgagccaccacacccagcctagttatttagttttttttttttttttgatgtcgtgaatatatatttgctgatataaaaggaactcctaggtatattgctaaccaaaaaaaacaaaatgcagaatattagactagtatggattggatgatgccttttttaattaaaggatttatattactttgtcaagaactgtgacagggctaagattttcctctacttgcaaactcataagttagcttgctacagtttcctggatgttgacaagagatacaaaactcttgggtcagagacaaacgactttattactcacaaaacaacaagcagcatgagttttgacatatttggtaccagttccctaagacccatagccttcttttaagattaatacaattatatattaataacataatatgaacctttgaacccatcagaacccaaagacgaggatcttcacaagaaattacaacctgacaataactacataccctatcccttggctttcaacacctaagccaggcaccatgttgaagtctgtttagaatttttcttcactattttatttgtatgtatagttttatactgtatatatgcagtcttaaagagcatatttttcattttagttttaacttttaaaaaagtatatcttgttgactatcatattttagaaatttttcagttaacattatatatatacatacatatatatttattttaatcttttaaaaacaattgtttttatagacaaggtcttgccatgttgcccaggctggtcttgaattctcgggttcaagcgatccacttcagtgtcccaaactattgggattacaggagtgagccaccatgcccagccaacattatattttaagattcattcatactgttgtatggtttagatcattcattttcactgctgtataatatcacaaaatgcaaatgtaccatagtttacagttgacacttctttgggtatttgggttgttttcagcttattgctactaaatggtgctgctaataaacattcttgttcacatctcctggtatacaagaaagtttctttgcatgtatacctaggaatagaattgctgaatctgacgttagctgagtattcaacttcagataataatgtcaaagtgttttccaaagtagttgtgccaatcataactctacaagaaatgtattagagatcctgtggaattatatcctctccaaacacttggcattgtcaagttttttaatgctttgccaatcaaatgggtgaaattatggtctttatttgcatttccctgataactaatgaagttgaacaactcttcatatgtttattgaccataaatgtttcttcttctgttaaatgcttatttaatacagtcttttttctatttttctttaggttgttagtgctctttatattgatttgcagttttgtagatgtggtatatcccaattatgtcatctctatggagtacaaatattttctcccagttttaatttatctttcaatttgtttatggcgtcttttgatgaacaaagtctttaatcttaatatagctgaatttatcaa

SEQ ID NO: 121016 - DNA, 559 bp, Homo sapiens
  Payload ID: 3721
  Gene Symbol: CCDC38
  Gene Name: coiled-coil domain containing 38
  ENST ID: ENST00000546947
  CDS Start-End: 374-559
ccagctgcgttccgggatcagctaccagacggtccctgagatgaccgggaaccgggctgggggaggatagagccgagactggaggatcgattggcacctccgcccacttttcccacaacgccttcccgaacgataggttggaaaggctcctggatccaaactcgctgagggccaggcaagaaaatgtcctcaaatttattgccaacactgaattctggagcagtaagagctatgtcggtgctgtgggaaacagacagaggagctgtgacttctacccaggagatgtggaggtaaagtaaaagatggctcaaccaaagaggacaggccttataagatctttttcagagatctctttcttgtcaaagaaaatgaaatggcagcaaaggaaacggaaaaatttatgaaccgtaacatgaaagtctaccagaaaactactttttcatccagaatgaagagtcattcatacctgagccaactagctttctaccctaaaaggagtggtaggtcatttgaaaagtttgggccaggtcctgctccgattcctagattaatagaaggt

SEQ ID NO: 121017 - DNA, 3279 bp, Homo sapiens
  Payload ID: 3722
  Gene Symbol: CCDC39
  Gene Name: coiled-coil domain containing 39
  Uniprot ID: Q9UFE4
  ENST ID: ENST00000442201
  CDS Start-End: 121-2946
agggctcccccggcaattgccgcggcactgtgcaggtgcctgggcttgacgcgggtgctgctcacccgctgtacaagaaggcggatctttgctctgtatcttctctatccgtttgcagtcatgagtagcgaattcctggctgagctgcactgggaggatgggttcgccatcccggtggcgaacgaggagaacaagctactggaagatcagttgtcaaagctgaaggatgaaagagcaagcttgcaagatgagttacgtgagtatgaagagcgaattaattctatgacttctcacttcaaaaatgttaagcaagagctctcaattacacagtctctttgcaaagcaagggagcgtgagactgaaagtgaagaacattttaaggccattgctcaaagagaattgggacgagtgaaagatgaaattcaacggctggaaaatgagatggcttcaatactggaaaagaaaagtgataaagaaaatggcatatttaaagccactcaaaaattggatggtttgaaatgtcaaatgaactgggaccagcaagcattggaggcctggttagaagaatcagctcataaagatagtgatgctctcactctccagaagtatgcacaacaagatgataataaaatcagggcactgactctgcaattagaaagactaactttggaatgtaatcagaaaagaaagatacttgacaacgaacttacagagactataagcgcacagttagaattggataaagcagcacaagattttcgtaagattcataatgaaagacaagaactcattaaacaatgggagaacacaatagaacagatgcagaagagggatggagacatagataactgtgctttggaattagcaaggataaagcaggaaacgagagaaaaagaaaatttggttaaagaaaagatcaagtttttggaaagtgagattgggaataacacagagtttgagaaaagaatttctgtggctgatcgtaaacttttaaaatgtagaacggcatatcaggaccatgaaactagtagaattcagctgaagggtgagctggattctttaaaagccactgtgaatagaacttccagtgatttagaagctctgaggaaaaatatttccaagataaagaaggacattcatgaagaaacagcaaggttacaaaaaactaaaaatcataatgagataatacaaacaaaattaaaggagataactgagaaaaccatgtctgtagaagagaaagctactaatttggaagatatgctaaaggaggaggaaaaagatgtgaaggaagtagatgttcaactgaacctcataaaaggtgtgctgtttaagaaagctcaggagttacagactgagacaatgaaagaaaaagctgttttatcagaaattgaaggaactcgttcctctctgaaacatctcaaccatcagttacaaaaactggattttgaaaccttgaagcagcaagaaattatgtacagccaggattttcacattcaacaagtggaacggagaatgtcacggttaaagggagaaattaattcagaagaaaaacaagcgcttgaagcaaaaattgttgaacttaggaagtctttggaagagaaaaaatctacatgtggccttttggaaacacagatcaagaagcttcataatgatctttattttatcaagaaggcacatagtaaaaacagtgatgaaaaacagtcccttatgaccaaaataaatgaactaaaccttttcatcgacagatcagagaaagaacttgataaagccaaaggttttaagcaggatttgatgatagaggacaatcttttaaaacttgaagttaagcgtactcgagaaatgcttcacagtaaggcagaagaagttctttccctagaaaaaagaaaacagcaattatacacagcaatggaagagcgaactgaagaaatcaaggttcataaaacaatgcttgcgtcacaaataagatatgttgatcaagaacgggaaaacataagcactgagtttcgcgagcggctaagtaaaattgagaagctgaagaatagatatgaaattctgactgttgttatgctgcctcctgaaggagaagaggagaaaacacaggcctattatgtaataaaggctgctcaagaaaaagaagaacttcaaagggaaggtgactgtttggatgccaagatcaacaaagctgaaaaagaaatctacgctctagaaaatacccttcaagtgctgaacagctgtaacaacaattataagcaatcttttaaaaaagtgactccatctagtgatgagtatgagctaaaaattcaactagaagaacaaaaaagagctgttgatgaaaaatacagatacaaacaaagacaaatcagagaacttcaagaagacatccagagcatggaaaatacattagatgttatagaacatttggcaaataatgttaaagaaaagttatcagagaagcaggcttattcatttcaactaagtaaagaaacggaggagcagaagccaaaattagaaagagtgaccaaacagtgtgcaaaactcacaaaggaaatccgtcttttgaaagacacaaaagatgaaacaatggaagaacaagacatcaaacttcgtgaaatgaaacagtttcacaaagttattgatgaaatgttagttgatatcatagaagaaaatactgagatccgtattatccttcaaacatactttcaacagagtgggttagaactacctacagctagcacaaaaggcagtcgtcagagctctagatctccttcacatacttcactatcagcaaggtcatctaggagtacaagtacatctacttctcagtcttcaattaaagtactggagcttaaattcccggcctcctcttcactagtaggcagcccttctaggccatctagtgctagtagtagctctagtaatgttaagagcaaaaagagcagcaaataaacattttaatctcttctgaaaaagttgtaaacacaaaaacaaaaatatactttaaaatacaaaacgacccaacacattttatctagtggaaagtgtaaaaacttagtggtaagtgtaaaaactgatagttttaaaaaaaaaggaacgttctcattttctctactgttttcttcatactgaagaaattaatagcagattcttgacaaggctacatgttatacaagcataggaaaaatgctgtatttcactgtaattctgatgttcgtagtgttagaaaatagtttgcttcattatttcacgaaactacactcacttctaatgtaacaatctttc

SEQ ID NO: 121018 - DNA, 4451 bp, Homo sapiens
  Payload ID: 3722
  Gene Symbol: CCDC39
  Gene Name: coiled-coil domain containing 39
  ENST ID: ENST00000476379
  CDS Start-End: 873-2888
tctttatacttttgtattgtttaattttttttaacagttgtcttgttttttcttctgcagtgaaaataatggtgacaagaagcccactgcctgattcacataagcaaggcatgctgcagggaagacagggttcttattaatatttcctttcatgtgcttacatatgagttacagttgctaatcctttcccacagtttagcacctagttaaaagaaagggcttcggaatcaggtaagtgtagattaaagttataacggcaaattgctgaacctttggaagcctcggtttttccacctggaaaatggatttttatcttacaggactgtcgtgaggattgatgagctaacattcctaaatcagggagtttgaagtctggcccagggtattttcctcctttcctgaaataatgtgtagttctgaccaagtgagaagaatcataagaatatgggattttgaaaaacatgaaaacatcctaagaaataccaggaaggagtcccacagtgaagcacaaatgaaactcaagatgactgcctaaaataagaaatcatggatcttaggagaaagggggcaaggaagtaaatcaaaggacaaagctgaagaccaagtggaccgaaaagaagatggaatacattttcccaaacactggtgttctctggagttggcttatcaacatcttgtgcaatcggaggatcgtgtggtttacttccagccagctgccccgtggtcctccagccagctccgggggccacagttttcacacgctccgggagcgatccgagagccgccttttcgtggaaagttacgctgccgcctggcaacccccgggaacgtcgggaggggcaagttgctgctcatccctcagtgctcaagtcatgagtagcgaattcctggctgagctgcactgggaggatgggttcgccatcccggtggcgaacgaggagaacaagctactggaagatcagttgtcaaagctgaaggatgaaagagcaagcttgcaagatgagttacgtgagtatgaagagcgaattaattctatgacttctcacttcaaaaatgttaagcaagagctctcaattacacagtctctttgcaaagcaagggagcgtgagactgaaagtgaagaacattttaaggccattgctcaaagagaattgggacgagtgaaagatgaaattcaacggctggaaaatgagatggcttcaatactggaaaagaaaagtgataaagaaaatggcatatttaaagccactcaaaaattggatggtttgaaatgtcaaatgaactgggaccagcaagcattggaggcctggttagaagaatcagctcataaagatagtgatgctctcactctccagaagtatgcacaacaagatgataataaaatcagggcactgactctgcaattagaaagactaactttggaatgtaatcagaaaagaaagatacttgacaacgaacttacagagactataagcgcacagttagaattggataaagcagcacaagattttcgtaagattcataatgaaagacaagaactcattaaacaatgggagaacacaatagaacagatgcagaagagggatggagacatagataactgtgctttggaattagcaaggataaagcaggaaacgagagaaaaagaaaatttggttaaagaaaagatcaagtttttggaaagtgagattgggaataacacagagtttgagaaaagaatttctgtggctgatcgtaaacttttaaaatgtagaacggcatatcaggaccatgaaactagtagaattcagctgaagggtgagctggattctttaaaagccactgtgaatagaacttccagtgatttagaagctctgaggaaaaatatttccaagataaagaaggacattcatgaagaaacagcaaggttacaaaaaactaaaaatcataatgagataatacaaacaaaattaaaggagataactgagaaaaccatgtctgtagaagagaaagctactaatttggaagatatgctaaaggaggaggaaaaagatgtgaaggaagtagatgttcaactgaacctcataaaaggtgtgctgtttaagaaagctcaggagttacagactgagacaatgaaagaaaaagctgttttatcagaaattgaaggaactcgttcctctctgaaacatctcaaccatcagttacaaaaactggattttgaaaccttgaagcagcaagaaattatgtacagccaggattttcacattcaacaagtggaacggagaatgtcacggttaaagggagaaattaattcagaagaaaaacaagcgcttgaagcaaaaattgttgaacttaggaagtctttggaagagaaaaaatctacatgtggccttttggaaacacagatcaagaagcttcataatgatctttattttatcaagaaggcacatagtaaaaacagtgatgaaaaacagtcccttatgaccaaaataaatgaactaaaccttttcatcgacagatcagagaaagaacttgataaagccaaaggttttaagcaggatttgatgatagaggacaatcttttaaaacttgaagttaagcgtactcgagaaatgcttcacagtaaggcagaagaagttctttccctagaaaaaagaaaacagcaattatacacagcaatggaagagcgaactgaagaaatcaaggttcataaaacaatgcttgcgtcacaaataagatatgttgatcaagaacgggaaaacataagcactgagtttcgcgagcggctaagtaaaattgagaagctgaagaatagatatgaaattctgactgttgttatgctgcctcctgaaggagaagaggagaaaacacaggcctattatgtaataaaggtgatgagtatgagctaaaaattcaactagaagaacaaaaaagagctgttgatgaaaaatacagatacaaacaaagacaaatcagagaacttcaagaagacatccagagcatggaaaatacattagatgttatagaacatttggcaaataatgttaaagaaaagttatcagagaagcaggcttattcatttcaactaagtaaagaaacggaggagcagaagccaaaattagaaagagtgaccaaacagtgtgcaaaactcacaaaggaaatccgtcttttgaaagacacaaaagatgaaacaatggaagaacaagacatcaaacttcgtgaaatgaaacagtttcacaaagttattgatgaaatgttagttgatatcatagaagaaaatactgagatccgtattatccttcaaacatactttcaacagagtgggttagaactacctacagctagcacaaaaggcagtcgtcagagctctagatctccttcacatacttcactatcagcaaggtcatctaggagtacaagtacatctacttctcagtcttcaattaaagtactggagcttaaattcccggcctcctcttcactagtaggcagcccttctaggccatctagtgctagtagtagctctagtaatgttaagagcaaaaagagcagcaaataaacattttaatctcttctgaaaaagttgtaaacacaaaaacaaaaatatactttaaaatacaaaacgacccaacacattttatctagtggaaagtgtaaaaacttagtggtaagtgtaaaaactgatagttttaaaaaaaaaggaacgttctcattttctctactgttttcttcatactgaagaaattaatagcagattcttgacaaggctacatgttatacaagcataggaaaaatgctgtatttcactgtaattctgatgttcgtagtgttagaaaatagtttgcttcattatttcacgaaactacactcacttctaatgtaacaatctttcaagaagaaatttctaaagatttactgtactattatgagcgtattgcaatgtgaaaatctcatttaccctacaagacaccaaaattaggttttctttattcaaagtaactatttctcagacttttggggagaaaaattgttaaaggcagtttcttcttttgctataatttttaaccaaaaaatagcatcaacccctacccaccccacccccccaaaaaaaaaccggtaagagaaacactgtatatcaattttaaaatgcagcataaatttagaaaaatcacttctgaccttgaaataaatcacttctgaccttgaaataaacgcattaaagatttgctttcagatacagccaaccaagtataaacaattttgaaattttcttgatttaataaacgatttaatgaaagctaggtatgacttgatttgcaatagaaatttcatttacagttggaggtagactgccaaatgtagtagtttttccagttaacacttcattataacatgtgcccaacactttgtactcttggaatagagtgtggaatattataaaactggattttaaataaatgtattagaattca

SEQ ID NO: 121019 - DNA, 487 bp, Homo sapiens
  Payload ID: 3722
  Gene Symbol: CCDC39
  Gene Name: coiled-coil domain containing 39
  ENST ID: ENST00000473854
  CDS Start-End: 1-308
aagatgaaacaatggaagaacaagacatcaaacttcgtgaaatgaaacagtttcacaaagttattgatgaaatgttagttgatatcatagaagaaaatactgagatccgtattatccttcaaacatactttcaacagagtgggttagaactacctacagctagcacaaaaggcagtcgtcagagctctagatctccttcacatacttcactatcagcaaggtcatctaggagtacaagtacatctacttctcagtcttcaattaaagtactggagcttaaattcccggcctcctcttcactaaaataggaaaaaggcatagcaaagtcaagaataaggtgggcgaaaaaaaagaagttgcaggtgcatctgatttccaggaaagtgcaaaaagcagatccgcttttttggagatgaatttctgtatctcgatgttgtcaactctcttctcttttcttaaaaagaaaaaaatatatatgaaaattggg

SEQ ID NO: 121020 - DNA, 783 bp, Homo sapiens
  Payload ID: 3722
  Gene Symbol: CCDC39
  Gene Name: coiled-coil domain containing 39
  ENST ID: ENST00000471307
  CDS Start-End: 492-783
ctagtttttgcctccactaccttactgatcatgcatttgcaagattaagtatttccaatatttattattataaaccacatattatatctttgttactatcgctgtagtatatgacctggaacggctagactaagagtatcactccatcacccaggctggagcacagtggtgcaacctcagctcactgcaagctctgcctcctgggttcgagtgattcatgtgcctcagcctcccaagaagctggaattacagagtaatcaaaaagaggagccgactagacacagccaggaagagcttctcccaccggaagaccagaccagcaagaaagttggcaccctccaagcaggttgttgaaaggaaggccttgaatgtggacagaggacgatgcagatgaggaaagactagaaggttctgtacctgttaacagtggctgatcctagaagagtgaaatttagggtagttggaaagaacacagcacagaaaactttaggatgaattttcctagcagccattctgtatcgtcaaagttgtcaaagctgaaggatgaaagagcaagcttgcaagatgagttacgtgagtatgaagagcgaattaattctatgacttctcacttcaaaaatgttaagcaagagctctcaattacacagtctctttgcaaagcaagggagcgtgagactgaaagtgaagaacattttaaggccattgctcaaagagaattgggacgagtgaaagatgaaattcaacggctggaaaatgagatggcttcaatactggaaaagaaaa

SEQ ID NO: 121021 - DNA, 534 bp, Homo sapiens
  Payload ID: 3722
  Gene Symbol: CCDC39
  Gene Name: coiled-coil domain containing 39
  ENST ID: ENST00000489868
  CDS Start-End: 1-204
cgtgaaatgaaacagtttcacaaagttattgatgaaatgttagttgatatcatagaagaaaatactgagatccgtattatccttcaaacatactttcaacagagtgggttagaactacctacagctagcacaaaaggcagtcgtcagagctctagatctccttcacatacttcactatcagcaagaaataggaaaaaggcatagcaaagtcaagaataaggtgggcgaaaaaaaaggatgccctagatgaatgccttctggaactgcgagaagactctgaacggttcctcttatgtttcttatgccttttgtgaccagaagaggaagaggatgatgatgaagacactgattcatcagcagaagaaacacttgaagaagaagttgattttcttcttttcttctttagcctaaaaaaaacagttcatttgtcatatatatacaaaaatgtttctaaattattcataaagatgtgggccctatttgtttcctttaaagattttataaaagctgtggttcagataaatgatacaataa

SEQ ID NO: 121022 - DNA, 1970 bp, Homo sapiens
  Payload ID: 3723
  Gene Symbol: CCDC40
  Gene Name: coiled-coil domain containing 40
  Uniprot ID: Q4G0X9
  ENST ID: ENST00000269318
  CDS Start-End: 12-1751
agcaacgggaaatggcggaaccgggcggcgcggcgggccggtcccatccggaagatggatcggcttctgagggagagaaggaagggaataatgaaagccacatggtgtcaccaccagagaaggatgatggccagaaaggtgaagaagctgtcggtagcacagagcatcctgaggaagtcacaacccaagcggaagctgcaattgaagagggggaggtggagacagaaggggaagcagcagtggaaggggaagaggaggctgtgtcctatggagatgctgaaagcgaagaggaatattactatacagaaacttcatccccggaagggcaaatcagtgctgcagatacgacttacccgtatttcagtcctcctcaggaactgcctggagaggaggcatacgatagtgttagcggggaggctggtctccaaggcttccagcaagaggccaccggtccaccagaatccagagaaaggagggtcacctccccagagccatcccacggagtcttaggcccgtcggagcaaatgggccaggtcacctctgggccagcagtgggcagattgacaggatccacagaggagccccaggggcaggtgctcccaatgggcgtccagcaccgcttccggctgagccacgggagcgacatcgagtcctcagacctggaggagttcgtctcgcaggagccagtgatccccccaggggtgcccgatgcccaccccagggaaggagacctgccagtgttccaggaccagatccagcagcccagcaccgaggagggggccatggcagagagagtggagtccgaggggagtgacgaggaagcagaagacgaagggtcccagctggtggttttggacccagaccaccccctgatggtaagattccaggctgccctgaagaactacctgaaccgacagatcgaaaagttgaagctggacctccaagagctggttgtggctaccaagcagagccgagcccagcggcaggagctgggggtgaatctctatgaggtgcagcagcacctggtacacctgcagaagctgctggagaagagtcacgaccgccacgcaatggcctcgagcgagcgcaggcagaaggaggaggagctgcaggccgcccgcgctctctacaccaagacctgcgcagccgccaacgaggagcgcaaaaagttggcggctctgcagactgagatggagaacttggccctgcatctcttctacatgcagaacatcgaccaggacatgcgtgacgacatccgcgtgatgacacaagtggtaaagaaggccgagacggagaggatccgggcagaaatcgagaagaaaaagcaggacctgtatgtggaccagctcaccactcgagcccagcaactggaagaagacattgccctgtttgaggctcagtacttggcccaagctgaggacacccggattttaaggaaagcagtgagtgaggcctgcaccgagatcgacgccatcagcgtggagaagaggcgcatcatgcagcaatgggccagcagcctggtgggcatgaagcaccgcgacgaggcgcacagggcggtgctggaggcgctcagcgtgtccctagagcgcttcccaagtcaaaatataaacaccgctcgttcccgcctttctaccacatggcattccgctgggatacttctacggggaagcttcctgcccggggcatcgagggcgttcgcgtccgtctgttatggcggtgctgctgtagataaccggatccgcgaatgctaacgctcaccaggatgctatatagccttttttatattgcctatcaagcccggaatgtctgggtctagcgggtattgctaagtaggattgtgacagtcacgcccccggcagcggtgtttcaaagtcccctgacagctcagcatgttgtcacacttcaggactgtgccaatccgattgatgaagaaaatagataatcttgttttataaaacgtgcatgcgcag

SEQ ID NO: 121023 - DNA, 2010 bp, Homo sapiens
  Payload ID: 3723
  Gene Symbol: CCDC40
  Gene Name: coiled-coil domain containing 40
  Uniprot ID: Q4G0X9
  ENST ID: ENST00000374876
  CDS Start-End: 6-1442
gggaaatggcggaaccgggcggcgcggcgggccggtcccatccggaagatggatcggcttctgagggagagaaggaagggaataatgaaagccacatggtgtcaccaccagagaaggatgatggccagaaaggtgaagaagctgtcggtagcacagagcatcctgaggaagtcacaacccaagcggaagctgcaattgaagagggggaggtggagacagaaggggaagcagcagtggaaggggaagaggaggctgtgtcctatggagatgctgaaagcgaagaggaatattactatacagaaacttcatccccggaagggcaaatcagtgctgcagatacgacttacccgtatttcagtcctcctcaggaactgcctggagaggaggcatacgatagtgttagcggggaggctggtctccaaggcttccagcaagaggccaccggtccaccagaatccagagaaaggagggtcacctccccagagccatcccacggagtcttaggcccgtcggagcaaatgggccaggtcacctctgggccagcagtgggcagattgacaggatccacagaggagccccaggggcaggtgctcccaatgggcgtccagcaccgcttccggctgagccacgggagcgacatcgagtcctcagacctggaggagttcgtctcgcaggagccagtgatccccccaggggtgcccgatgcccaccccagggaaggagacctgccagtgttccaggaccagatccagcagcccagcaccgaggagggggccatggcagagagagtggagtccgaggggagtgacgaggaagcagaagacgaagggtcccagctggtggttttggacccagaccaccccctgatggtaagattccaggctgccctgaagaactacctgaaccgacagatcgaaaagttgaagctggacctccaagagctggttgtggctaccaagcagagccgagcccagcggcaggagctgggggtgaatctctatgaggtgcagcagcacctggtacacctgcagaagctgctggagaagagtcacgaccgccacgcaatggcctcgagcgagcgcaggcagaaggaggaggagctgcaggccgcccgcgctctctacaccaagacctgcgcagccgccaacgaggagcgcaaaaagttggcggctctgcagactgagatggagaacttggccctgcatctcttctacatgcagaacatcgaccaggacatgcgtgacgacatccgcgtgatgacacaagtggtaaagaaggccgagacggagaggatccgggcagaaatcgagaagaaaaagcagggcgttggagacacaggtgctgccttcattcctaaaaccacccagggtgaccaggtctcgggacgcggaaagaaaaagccgggcactgtggtggcacgtgtctcacccgctgagctttaacttcccctccacctttcgtagtctccaccccttgtgcccagcacagagcctggcatacagcaagcgctcaagaaaggctggaccaaggaatgagggtctggctggccccacagcacccgcagccaggcagccagcagcagtcacacaaccaggagatgcttttccttttgggtgctgtgattaaagaaacaaaatgaaaccattttgtttttaaaagtttttagaccaaaacattttcaaatgaataatattggattaaccatactcatttctggccaggcgcagtggctcgcacctgtaatcccaacattttgggaggctgagacgggtgggtcacgaggccaggagttcaagaccagcctggccaagatggtgaaaccccgtctctactaaaaatacaaaaattagccaggcatggtgtgggcgcctgtaatccccgctactcgggagggtgagacagagaactgcttgaattgcggaggttgtagtgagccgagatcacgccactgcactctagcctgggagacagagcaagactctgtctcaaaaaaaataaaaataataataa

SEQ ID NO: 121024 - DNA, 3544 bp, Homo sapiens
  Payload ID: 3723
  Gene Symbol: CCDC40
  Gene Name: coiled-coil domain containing 40
  Uniprot ID: Q4G0X9
  ENST ID: ENST00000374877
  CDS Start-End: 32-3124
ggatgttgacagcgtcgcctagcaacgggaaatggcggaaccgggcggcgcggcgggccggtcccatccggaagatggatcggcttctgagggagagaaggaagggaataatgaaagccacatggtgtcaccaccagagaaggatgatggccagaaaggtgaagaagctgtcggtagcacagagcatcctgaggaagtcacaacccaagcggaagctgcaattgaagagggggaggtggagacagaaggggaagcagcagtggaaggggaagaggaggctgtgtcctatggagatgctgaaagcgaagaggaatattactatacagaaacttcatccccggaagggcaaatcagtgctgcagatacgacttacccgtatttcagtcctcctcaggaactgcctggagaggaggcatacgatagtgttagcggggaggctggtctccaaggcttccagcaagaggccaccggtccaccagaatccagagaaaggagggtcacctccccagagccatcccacggagtcttaggcccgtcggagcaaatgggccaggtcacctctgggccagcagtgggcagattgacaggatccacagaggagccccaggggcaggtgctcccaatgggcgtccagcaccgcttccggctgagccacgggagcgacatcgagtcctcagacctggaggagttcgtctcgcaggagccagtgatccccccaggggtgcccgatgcccaccccagggaaggagacctgccagtgttccaggaccagatccagcagcccagcaccgaggagggggccatggcagagagagtggagtccgaggggagtgacgaggaagcagaagacgaagggtcccagctggtggttttggacccagaccaccccctgatggtaagattccaggctgccctgaagaactacctgaaccgacagatcgaaaagttgaagctggacctccaagagctggttgtggctaccaagcagagccgagcccagcggcaggagctgggggtgaatctctatgaggtgcagcagcacctggtacacctgcagaagctgctggagaagagtcacgaccgccacgcaatggcctcgagcgagcgcaggcagaaggaggaggagctgcaggccgcccgcgctctctacaccaagacctgcgcagccgccaacgaggagcgcaaaaagttggcggctctgcagactgagatggagaacttggccctgcatctcttctacatgcagaacatcgaccaggacatgcgtgacgacatccgcgtgatgacacaagtggtaaagaaggccgagacggagaggatccgggcagaaatcgagaagaaaaagcaggacctgtatgtggaccagctcaccactcgagcccagcaactggaagaagacattgccctgtttgaggctcagtacttggcccaagctgaggacacccggattttaaggaaagcagtgagtgaggcctgcaccgagatcgacgccatcagcgtggagaagaggcgcatcatgcagcaatgggccagcagcctggtgggcatgaagcaccgcgacgaggcgcacagggcggtgctggaggcgctcagaggatgccagcatcaagccaaatccaccgacggcgagattgaggcctataagaaatccatcatgaaggaggaagaaaagaacgagaagctggcgagcatcctgaaccggacagagacggaagccacactgctgcagaagctcaccacccagtgcctgaccaagcaggtggccctgcagagccagttcaatacctacaggctcaccctgcaggacacagaggatgccctcagccaggaccagctggaacaaatgatactcacggaggagttgcaggccatccgccaagccatccagggcgagctggagctcaggaggaagacggatgctgccatccgggagaagctgcaggagcacatgacctccaacaagaccaccaaatacttcaaccagctcatcctgaggctgcagaaggagaagaccaacatgatgacacatctttccaaaatcaacggtgacattgcccagaccaccctggacatcacacacaccagcagcaggctggacgcacaccagaagaccctggtggagctggaccaggacgtgaagaaagtcaacgagctcatcaccaacagccagagcgagatctcccggcgcacgatcctgatcgagaggaagcaagggctcatcaacttcctcaacaagcagctggagcggatggtctccgagctggggggggaagaagtggggcccctggagcttgaaatcaaaaggctgagcaagctgatcgacgagcacgatggcaaggcggtccaggcccaggtgacctggctgcgcctgcagcaggagatggtcaaggtgacacaggagcaggaggagcagctggcctccctggacgcatccaagaaggagctccacatcatggagcagaagaaactacgagtagaaagcaagattgagcaggagaagaaggagcagaaggagatcgagcaccacatgaaggacctggacaacgacctgaagaagctcaacatgttgatgaataaaaaccggtgcagctcggaggagctggagcagaacaaccgggtgacagagaatgagttcgtgcgctcgctgaaggcctctgagagggagaccatcaagatgcaggacaagctgaaccagctcagcgaggagaaggcgaccctcctgaatcaactggtggaagcagaacaccagattatgctttgggagaaaaaaatccaactggcaaaagagatgcgttcctcagtggattccgagatcggccagacggagatccgggccatgaagggcgagatccacaggatgaagaaatattgcagaacaacacaggacgcacacaggcacgtgcacgaacaacacgggacgcacgcaggcacgtgcacgaagaacacgggacgcgcgcaggcacgtgcacgaacaacacgggacgcgcgcgggcacgtgcacgaacaacacgggacgcgcgcaggcacgtgcacgaacaacacgggacgcgcgcaggcacgtgcacgaacaagggacgcgcgcaggcacgtgcacgaacacaggacacacacagcacgtgcatgaacaacacaggacacacacagcacgtgcatgaacaacacaggacacacacaagcacgtgcatgaacaacacaggacacacacaagcacgtgcatgtcatctcacaaaacgctgttttattcctactccatgtaatcacagcacgctggtatttttaaatgccggttgtaaccctcaaactttgtgaccctctaacgtatcccactgtgagacagtctcacaccacagaagggctcagagagcacccccatctcatccttcacagccgcgttgtctctccatggtcacaattagatttcattgcctttaaaaggctggtaattaaattgcaagtggtcatcaagctaaaggttcagggccttaaggataacagtaagagcagttcataaaataaatgggcctcactttcaccatgccatgct

SEQ ID NO: 121025 - DNA, 4294 bp, Homo sapiens
  Payload ID: 3723
  Gene Symbol: CCDC40
  Gene Name: coiled-coil domain containing 40
  Uniprot ID: Q4G0X9
  ENST ID: ENST00000397545
  CDS Start-End: 28-3456
gttgacagcgtcgcctagcaacgggaaatggcggaaccgggcggcgcggcgggccggtcccatccggaagatggatcggcttctgagggagagaaggaagggaataatgaaagccacatggtgtcaccaccagagaaggatgatggccagaaaggtgaagaagctgtcggtagcacagagcatcctgaggaagtcacaacccaagcggaagctgcaattgaagagggggaggtggagacagaaggggaagcagcagtggaaggggaagaggaggctgtgtcctatggagatgctgaaagcgaagaggaatattactatacagaaacttcatccccggaagggcaaatcagtgctgcagatacgacttacccgtatttcagtcctcctcaggaactgcctggagaggaggcatacgatagtgttagcggggaggctggtctccaaggcttccagcaagaggccaccggtccaccagaatccagagaaaggagggtcacctccccagagccatcccacggagtcttaggcccgtcggagcaaatgggccaggtcacctctgggccagcagtgggcagattgacaggatccacagaggagccccaggggcaggtgctcccaatgggcgtccagcaccgcttccggctgagccacgggagcgacatcgagtcctcagacctggaggagttcgtctcgcaggagccagtgatccccccaggggtgcccgatgcccaccccagggaaggagacctgccagtgttccaggaccagatccagcagcccagcaccgaggagggggccatggcagagagagtggagtccgaggggagtgacgaggaagcagaagacgaagggtcccagctggtggttttggacccagaccaccccctgatggtaagattccaggctgccctgaagaactacctgaaccgacagatcgaaaagttgaagctggacctccaagagctggttgtggctaccaagcagagccgagcccagcggcaggagctgggggtgaatctctatgaggtgcagcagcacctggtacacctgcagaagctgctggagaagagtcacgaccgccacgcaatggcctcgagcgagcgcaggcagaaggaggaggagctgcaggccgcccgcgctctctacaccaagacctgcgcagccgccaacgaggagcgcaaaaagttggcggctctgcagactgagatggagaacttggccctgcatctcttctacatgcagaacatcgaccaggacatgcgtgacgacatccgcgtgatgacacaagtggtaaagaaggccgagacggagaggatccgggcagaaatcgagaagaaaaagcaggacctgtatgtggaccagctcaccactcgagcccagcaactggaagaagacattgccctgtttgaggctcagtacttggcccaagctgaggacacccggattttaaggaaagcagtgagtgaggcctgcaccgagatcgacgccatcagcgtggagaagaggcgcatcatgcagcaatgggccagcagcctggtgggcatgaagcaccgcgacgaggcgcacagggcggtgctggaggcgctcagaggatgccagcatcaagccaaatccaccgacggcgagattgaggcctataagaaatccatcatgaaggaggaagaaaagaacgagaagctggcgagcatcctgaaccggacagagacggaagccacactgctgcagaagctcaccacccagtgcctgaccaagcaggtggccctgcagagccagttcaatacctacaggctcaccctgcaggacacagaggatgccctcagccaggaccagctggaacaaatgatactcacggaggagttgcaggccatccgccaagccatccagggcgagctggagctcaggaggaagacggatgctgccatccgggagaagctgcaggagcacatgacctccaacaagaccaccaaatacttcaaccagctcatcctgaggctgcagaaggagaagaccaacatgatgacacatctttccaaaatcaacggtgacattgcccagaccaccctggacatcacacacaccagcagcaggctggacgcacaccagaagaccctggtggagctggaccaggacgtgaagaaagtcaacgagctcatcaccaacagccagagcgagatctcccggcgcacgatcctgatcgagaggaagcaagggctcatcaacttcctcaacaagcagctggagcggatggtctccgagctggggggggaagaagtggggcccctggagcttgaaatcaaaaggctgagcaagctgatcgacgagcacgatggcaaggcggtccaggcccaggtgacctggctgcgcctgcagcaggagatggtcaaggtgacacaggagcaggaggagcagctggcctccctggacgcatccaagaaggagctccacatcatggagcagaagaaactacgagtagaaagcaagattgagcaggagaagaaggagcagaaggagatcgagcaccacatgaaggacctggacaacgacctgaagaagctcaacatgttgatgaataaaaaccggtgcagctcggaggagctggagcagaacaaccgggtgacagagaatgagttcgtgcgctcgctgaaggcctctgagagggagaccatcaagatgcaggacaagctgaaccagctcagcgaggagaaggcgaccctcctgaatcaactggtggaagcagaacaccagattatgctttgggagaaaaaaatccaactggcaaaagagatgcgttcctcagtggattccgagatcggccagacggagatccgggccatgaagggcgagatccacaggatgaaggtcaggctcgggcagctgctgaagcagcaggagaagatgatccgtgccatggagttggcggttgcccgcagagagaccgtcaccacccaggccgaggggcagcgcaagatggacaggaaggcgctcacccgcaccgacttccaccacaagcagcttgagctgcgccggaaaatcagggacgttcgcaaggccaccgatgagtgcaccaaaaccgtcctggaactggaagaaacacaaagaaatgtgagcagctccctcctagagaagcaggaaaagctgtcggtgattcaggcagacttcgacacactcgaggccgacctcacccggcttggggccctcaaacgacagaacctttcagagatcgtggccctgcagacacgccttaagcacctgcaggctgtgaaggaggggcgctacgtgttcctgttccgctccaagcagtccctagtgctggagcgccagcgcctggacaagcgactggctctcatcgccaccatcctggaccgcgtgcgggacgagtacccccagttccaggaggccctgcacaaggtcagccagatgatcgccaacaagctcgagtcaccagggccctcctagggagcagcctggactccgccttgcaaggcctccaggaagagatccggaattgtgtttgtcatgagggacttggaatcttttgtgttcctaaaaaccacatgtaccctcagaagggcatcgtttaagagaaataagccagccccacccataggaatctttttagccactcagcaatttaataaaccaggtaaaatcctagcgtttcccatggcatcccatcgcaaagacagagcctgtgactgcagacccacacacccacactcccacactgggcttactcgtccaggtaacactttggtttgcagcactcccaaatctgcacgtgcctctcacaacacaacgctgccacaggtccacaagctggtgggctgagcagaggtgggaaagttaaggcagctccagccagcctggcccgggaggctggtccccccagcacttccctctactaggtgcatctgaaaacccacaaaccaccttctttaccagttttcccatccccaccccttagaactctcaggtcccttttcctgcccccatgtccccatttgagttaaattcagatccacagcttgcaggagaaagtcagtggccccagacacacgtaacagggtgagcactgaaataagagcacgctggggcgtccacaccaagggactacgccccagtctgcccacctatcttttctccatcattaacccagcgctctttctccctggacttccaagtaccaatgaccttggggcttctttgcagtttaaagggaaaatgctctacaaaataatttcactttcaaacatttcagcagaagaataaaatcttttttctgaatatctagtaa

SEQ ID NO: 121026 - DNA, 466 bp, Homo sapiens
  Payload ID: 3723
  Gene Symbol: CCDC40
  Gene Name: coiled-coil domain containing 40
  ENST ID: ENST00000576033
  CDS Start-End: 170-466
aaatggcggaaccgggcggcgcggcgggccggcatgatatagtgctatggttcctgacaaacaggacaaagacgtgacaacagcctgggggtggcagagaagtaacaagtcccatccggaagatggatcggcttctgagggagagaaggaagggaataatgaaagccacatggtgtcaccaccagagaaggatgatggccagaaaggtgaagaagctgtcggtagcacagagcatcctgaggaagtcacaacccaagcggaagctgcaattgaagagggggaggtggagacagaaggggaagcagcagtggaaggggaagaggaggctgtgtcctatggagatgctgaaagcgaagaggaatattactatacagaaacttcatccccggaagggcaaatcagtgctgcagatacgacttacccgtatttcagtcctcctcaggaactgcctggagaggaggcatac

SEQ ID NO: 121027 - DNA, 537 bp, Homo sapiens
  Payload ID: 3723
  Gene Symbol: CCDC40
  Gene Name: coiled-coil domain containing 40
  ENST ID: ENST00000574099
  CDS Start-End: 159-537
aaatggcggaaccgggcggcgcggcgggccggtaagccgggccgaggggcagcgggtcttggagtcgccaggccgcgctctccgttcaccgctccaggtcccatccggaagatggatcggcttctgagggagagaaggaagggaataatgaaagccacatggtgtcaccaccagagaaggatgatggccagaaaggtgaagaagctgtcggtagcacagagcatcctgaggaagtcacaacccaagcggaagctgcaattgaagagggggaggtggagacagaaggggaagcagcagtggaaggggaagaggaggctgtgtcctatggagatgctgaaagcgaagaggaatattactatacagaaacttcatccccggaagggcaaatcagtgctgcagatacgacttacccgtatttcagtcctcctcaggaactgcctggagaggaggcatacgatagtgttagcggggaggctggtctccaaggcttccagcaagaggccaccggtccaccagaatccagagaaaggagggtca

SEQ ID NO: 121028 - DNA, 554 bp, Homo sapiens
  Payload ID: 3723
  Gene Symbol: CCDC40
  Gene Name: coiled-coil domain containing 40
  ENST ID: ENST00000573474
  CDS Start-End: 1-257
actatacagaaacttcatccccggaagggcaaatcagtgctcccaatgggcgtccagcaccgcttccggctgagccacgggagcgacatcgagtcctcagacctggaggagttcgtctcgcaggagccagtgatccccccaggggtgcccgatgcccaccccagggaaggagacctgccagtgttccaggaccagatccagcagcccagcaccgaggagggggccatggcagagagagtggagtccgaggggagtgacgaggaagcagaagacgaagggtcccagctggtggttttggacccagaccaccccctgatggtaagattccaggctgccctgaagaactacctgaaccgacagatcgaaaagttgaagctggacctccaagagctggttgtggctaccaagcagagccgagcccagcggcaggagctgggggtgaatctctatgaggtgcagcagcacctggtacacctgcagaagctgctggagaagagtcacgaccgccacgcaatggcctcgagcgagcgcaggcagaaggaggaggagctgca

SEQ ID NO: 121029 - DNA, 593 bp, Homo sapiens
  Payload ID: 3723
  Gene Symbol: CCDC40
  Gene Name: coiled-coil domain containing 40
  ENST ID: ENST00000571028
  CDS Start-End: 1-251
ctcagtacttggcccaagctgaggacacccggattttaaggaaagcagtgagtgaggcctgcaccgagatcgacgccatcagcgtggagaagaggcgcatcatgcagcaatgggccagcagcctggtgggcatgaagcaccgcgacgaggcgcacagggcggtgctggaggcgctcagatgcaggtcgaggaaccagagccagctgtggccgggcaagggctcctctccctgtgtcaccagggttgcctgaacaccaggacgagaggacttggccatctgcccacttgggtgtctttttcctcctgccccaatgctaggacttgatacctgactgtttaattacacggctcagctgccacgggccttaagaaaagtcaaggccaggttctctctgagggtccagcacctggcctggctctccgaggctcatggcctgtgaaccctgcagcgtccccaagggaagacgtcacctccgagatggtcctgttgtccagctctcccctgcatcccagactaaccagtgtcctctctgcaaaccgtcctcattgccctcagagacatggcttccttttggttgcaaacattgtaaaaa

SEQ ID NO: 121030 - DNA, 1374 bp, Homo sapiens
  Payload ID: 3724
  Gene Symbol: CCDC42
  Gene Name: coiled-coil domain containing 42
  Uniprot ID: Q96M95
  ENST ID: ENST00000293845
  CDS Start-End: 228-1178
gttgctaggtaaccacatctcccataactgccccagcacatcgtcctgagccgcccaacctgtctccagccaccttctgtggagtctcaaactccatcatctgtgggaccctgtaggccgaagggagaaacaagagtgcagccaccacccctgagccacctgtggctctgctacccacaatttcactgtgaagagtcagctgcctgggccgtgaggtcactgccaccatgagtctgggcatcatggaagaggaagacctggccgagtacttccggctgcagtatggggagcggctgctgcagatgctccagaaactccccaatgttgagggggcgtcggagtccccatccatctggctactggagaagaaaaaggagacagaaatcatgcatcaaactatggtgcagaagaagaagatgtttcagcgcagaatggaaaccctgaacctgcgctgggaggaactgggcgttaaggaagcccaactgaaggctcacatccagaagtctgagcagttcatccaggagaacgaccagaaacggatccgcgccatgaagaaagccaacaaggagcgagaactcaagtgccagcacatgcaggagctgaccaagcgcaagcaggagatggtggcgctgcggctggagcaccagcggctgagcgccaagctgaaggactactacatcttcaacaagtacctagagaaggtggtggagaactccgagttcgaggagatccatgaggtgattgcacgctacaagacgctggtgagcatgcgccacgacctcatgcagtctgcgcaggaaggccaggagaagattgagcgcgccaaggcccggctggcgcgctacatggaggaaaaggatgatgagatcctgcagcaaaacaatgagctggcaaggctgcagatgcgctttgaccgtgcccgcagcaatgtcatcttctgggaatctcgctgggcgcacatccagaacaccgcagccaagaagaccctcctgcttggcaccattaagatggccacgctgaacctcttccagatcgtgagcaagcacctgaaggaggtgactgaggtggcactggaggacacccacaagcagctggacatgatccagcaatttatccaagaccggtcggacatctgggcagaggtgaaaaagaaggaacaacagcgagtccggatttaaggaggcagccttgttccagaatgtcctgagacagagatcgtgaaagaagaagtcgtgagcctgcggtccagtcagtccagctcgggaccgatgcctgctgtgccttcctgctgagggacacctgcttattttcccccgtgggcctcactctatccctgaaaacagtgaatgttatatgaagtttgttctcaagttc

SEQ ID NO: 121031 - DNA, 1087 bp, Homo sapiens
  Payload ID: 3724
  Gene Symbol: CCDC42
  Gene Name: coiled-coil domain containing 42
  Uniprot ID: Q96M95
  ENST ID: ENST00000539522
  CDS Start-End: 179-907
gccgcccaacctgtctccagccaccttctgtggagtctcaaactccatcatctgtgggaccctgtaggccgaagggagaaacaagagtgcagccaccacccctgagccacctgtggctctgctacccacaatttcactgtgaagagtcagctgcctgggccgtgaggtcactgccaccatgagtctgggcatcatggaagaggaagacctggccgagtacttccggctgcagtatggggagcggctgctgcagatgctccagaaactccccaatgttgagggggcgtcggagtccccatccatctggctactggagaagaaaaaggagacagaaatcatgcatcaaactatggtgcagaagaagaagatgtttcagcgcagaatggaaaccctgaacctgcgctgggaggaactgggcgttaaggaagcccaactgaaggctcacatccagaagtctgagcagttcatccaggagaacgaccagaaacggatccgcgccatgaagaaagccaacaaggagcgagaactcaagtgccagcacatgcaggagctgaccaagcgcaagcaggagatggtggcgctgcggctggagcaccagcggctgagcgccaagctgaaggactactacatcttcaacaagtacctagagaaggtggtggagaactccgaggaatctcgctgggcgcacatccagaacaccgcagccaagaagaccctcctgcttggcaccattaagatggccacgctgaacctcttccagatcgtgagcaagcacctgaaggaggtgactgaggtggcactggaggacacccacaagcagctggacatgatccagcaatttatccaagaccggtcggacatctgggcagaggtgaaaaagaaggaacaacagcgagtccggatttaaggaggcagccttgttccagaatgtcctgagacagagatcgtgaaagaagaagtcgtgagcctgcggtccagtcagtccagctcgggaccgatgcctgctgtgccttcctgctgagggacacctgcttattttcccccgtgggcctcactctatccctgaaaacagtgaatgttatatgaa

SEQ ID NO: 121032 - DNA, 538 bp, Homo sapiens
  Payload ID: 3724
  Gene Symbol: CCDC42
  Gene Name: coiled-coil domain containing 42
  ENST ID: ENST00000581598
  CDS Start-End: 503-538
aacctcgcgcctcctcgcgactccacccctgccgccgctaagcacctcctttctttctctgctcttcttcaccaaggcccggcccctccctcaccctcacccacacctgaaccccagggaggccctaagagcagggcgcccgcacaaggccgctcctccacccgatgccccttctcagccacactcaccagaaactgcctctggccctgggctccatggcaaccagcatctaaccaggcctaatgccttcccagaagttcctgagggcaaagggcaggagcagagagcaggaccccagcaaggggaggaccaatgggggcagggggcagggggcagagggcagcgcctggactccacgtgccggccacagaaccaggcagcctgttgctaggccgaagggagaaacaagagtgcagccaccacccctgagccacctgtggctctgctacccacaatttcactgtgaagagtcagctgcctgggccgtgaggtcactgccaccatgagtctgggcatcatggaagaggaagacctggcc

SEQ ID NO: 121033 - DNA, 2082 bp, Homo sapiens
  Payload ID: 3725
  Gene Symbol: CCDC43
  Gene Name: coiled-coil domain containing 43
  Uniprot ID: Q96MW1
  ENST ID: ENST00000315286
  CDS Start-End: 10-684
gaccccaagatggcggcgcccagcgaagtggccgcgatagcccctggcgaaggcgatggcggaggcggcggctttggctcctggctggacggacggttggaggcactgggagtggaccgagccgtttatggagcctacatcttgggtatcctgcaggaggaggaggaagaagagaagctggacgctctgcaggggatcctctctgctttcctggaagaagattccctccttaatatctgcaaggagattgtggaacgatggtcagaaactcagaatgttgtcaccaaagtgaaaaaagaagatgaagtacaggccattgccaccctaattgagaagcaggcacaaatcgtagtaaagccaaggatggtgtcagaagaggagaagcagagaaaagctgccctcctggcccagtatgctgatgtgacagatgaagaggatgaagcagatgagaaggatgattcaggtgctaccacaatgaacattggttctgacaaacttctgttccgaaacaccaatgtggaagatgtccttaatgcccgaaaactggagcgagactcacttcgggatgaatcccaaaggaagaaggaacaggacaagctgcagagggagagagacaaactagccaagcaggagcgcaaggaaaaggaaaaaaaaaggacacagagaggggagcgaaagcgataaccttggcctactctattctttccccccatgaacttatcaaagggagaactggttgtgtatttaagagaaatgagagtgcattgcaaagtagtttcccaaggcatttcccctattgtttacatggtcaaaaggaaaatcaaaatcacttctaattacaaaatgtgctgttttggtggggtgggcaatcagattattatagttgatgactgtaccaaagatctggaatgggggccacctttatattttaatactcaagtcctgtgctccttttggccactttaaaaagtcttccctcaccttggataaataggattcagaaagctaacagttttcattctgaaggagcagaaacataatcaatccctccctgagataaaatgtgggcatgcacattgctttggagtcagtattcagctgtaagtgtagtattgttttatggctgaaatagaaagctaatgaagaggcctacctggatccagattttatgttaacatggcagcaaaactaggaaaatgggaagaaattacttgcggggtgttctagatctgattttttttttttttttgaaagtttcagcctgtgggaggaaaagaggtatcttttaaaatagagatagttacatattttcctcatctaggctgtgtcactattgggtgcaaggatatcattgttggctagattcattttgtataatcatgtatcctcttgtgtgctggtagagattttaatcctgatttttccataaaacatgagtattaagaaataattcctggtttggagaaactggagaaatcacccttttaaggaagaaacactggaaatttctgctaacaccaagatatttaagagtgtacatagtaggtgctcaacaaatttattgaatgaatgagtgaatggaaaaactgggagagtcaaaagtgagcagaagctctccatttctacttctgtcacaaaccacattaaattgtaaataaggcccttctccacttgacttcaggcagcagattgtctagaagcctaaggacagcaatttctctgacaagacaaagtagatattttataccaggggttggcaaactactgcccacgggccgaatttggcccagtctgtttttgtatggtgcaaactaaaaatgatttttacatttttaaagagttataaaagaaaaaaatatgtggtctgtgaaatctaaaatatttactacctggcctgttggaggaaaggtttgccaatctctgttttataccattaactatgagattaacaaaaacttttacctttgtgcagaaggttaaaaaaaaaaaaacatggttaaggaaaaggagacatgttacctcttcatacactcctataactgtggcattgcaaaaaataaaaataaccacctttaaaaaaat

SEQ ID NO: 121034 - DNA, 2058 bp, Homo sapiens
  Payload ID: 3725
  Gene Symbol: CCDC43
  Gene Name: coiled-coil domain containing 43
  Uniprot ID: Q96MW1
  ENST ID: ENST00000457422
  CDS Start-End: 27-491
ggggcttgcaggaccctgaccccaagatggcggcgcccagcgaagtggccgcgatagcccctggcgaaggcgatggcggaggcggcggctttggctcctggctggacggacggttggaggcactgggagtggaccgagccgtttatggagcctacatcttgggtatcctgcaggaggaggaggaagaagagaagctggacgctctgcaggggatcctctctgctttcctggaagaagattccctccttaatatctgcaaggagattgtggaacgatggtcagaaactcagaatgttgtcaccaaagtgaaaaaagaagatgaagtacaggccattgccaccctaattgagaagcaggcacaaatcgtagtaaagccaaggatggtgtcagaagaggagaagcagagaaaagctgccctcctggcccagtatgctgatgtgacagatgaagaggattctgttccgaaacaccaatgtggaagatgtccttaatgcccgaaaactggagcgagactcacttcgggatgaatcccaaaggaagaaggaacaggacaagctgcagagggagagagacaaactagccaagcaggagcgcaaggaaaaggaaaaaaaaaggacacagagaggggagcgaaagcgataaccttggcctactctattctttccccccatgaacttatcaaagggagaactggttgtgtatttaagagaaatgagagtgcattgcaaagtagtttcccaaggcatttcccctattgtttacatggtcaaaaggaaaatcaaaatcacttctaattacaaaatgtgctgttttggtggggtgggcaatcagattattatagttgatgactgtaccaaagatctggaatgggggccacctttatattttaatactcaagtcctgtgctccttttggccactttaaaaagtcttccctcaccttggataaataggattcagaaagctaacagttttcattctgaaggagcagaaacataatcaatccctccctgagataaaatgtgggcatgcacattgctttggagtcagtattcagctgtaagtgtagtattgttttatggctgaaatagaaagctaatgaagaggcctacctggatccagattttatgttaacatggcagcaaaactaggaaaatgggaagaaattacttgcggggtgttctagatctgattttttttttttttttgaaagtttcagcctgtgggaggaaaagaggtatcttttaaaatagagatagttacatattttcctcatctaggctgtgtcactattgggtgcaaggatatcattgttggctagattcattttgtataatcatgtatcctcttgtgtgctggtagagattttaatcctgatttttccataaaacatgagtattaagaaataattcctggtttggagaaactggagaaatcacccttttaaggaagaaacactggaaatttctgctaacaccaagatatttaagagtgtacatagtaggtgctcaacaaatttattgaatgaatgagtgaatggaaaaactgggagagtcaaaagtgagcagaagctctccatttctacttctgtcacaaaccacattaaattgtaaataaggcccttctccacttgacttcaggcagcagattgtctagaagcctaaggacagcaatttctctgacaagacaaagtagatattttataccaggggttggcaaactactgcccacgggccgaatttggcccagtctgtttttgtatggtgcaaactaaaaatgatttttacatttttaaagagttataaaagaaaaaaatatgtggtctgtgaaatctaaaatatttactacctggcctgttggaggaaaggtttgccaatctctgttttataccattaactatgagattaacaaaaacttttacctttgtgcagaaggttaaaaaaaaaaaaacatggttaaggaaaaggagacatgttacctcttcatacactcctataactgtggcattgcaaaaaataaaaataaccacctttaaaaaaataaatcttatttaaattgc

SEQ ID NO: 121035 - DNA, 2067 bp, Homo sapiens
  Payload ID: 3725
  Gene Symbol: CCDC43
  Gene Name: coiled-coil domain containing 43
  ENST ID: ENST00000588210
  CDS Start-End: 11-694
tgaccccaagatggcggcgcccagcgaagtggccgcgatagcccctggcgaaggcgatggcggaggcggcggctttggctcctggctggacggacggttggaggcactgggagtggaccgagccgtttatggagcctacatcttgggtatcctgcaggaggaggaggaagaagagaagctggacgctctgcaggggatcctctctgctttcctggaagaagattccctccttaatatctgcaaggagattgtggaacgatggtcagaaactcagaatgttgtcaccaaagtgaaaaaagaagatgaagtacaggccattgccaccctaattgagaagcaggcacaaatcgtagtaaagccaaggatggtgtcagaagaggagaagcagagaaaagctgccctcctggcccagtatgctgatgtgacagatgaagaggaatcacttactgaagcagatgagaaggatgattcaggtgctaccacaatgaacattggttctgacaaacttctgttccgaaacaccaatgtggaagatgtccttaatgcccgaaaactggagcgagactcacttcgggatgaatcccaaaggaagaaggaacaggacaagctgcagagggagagagacaaactagccaagcaggagcgcaaggaaaaggaaaaaaaaaggacacagagaggggagcgaaagcgataaccttggcctactctattctttccccccatgaacttatcaaagggagaactggttgtgtatttaagagaaatgagagtgcattgcaaagtagtttcccaaggcatttcccctattgtttacatggtcaaaaggaaaatcaaaatcacttctaattacaaaatgtgctgttttggtggggtgggcaatcagattattatagttgatgactgtaccaaagatctggaatgggggccacctttatattttaatactcaagtcctgtgctccttttggccactttaaaaagtcttccctcaccttggataaataggattcagaaagctaacagttttcattctgaaggagcagaaacataatcaatccctccctgagataaaatgtgggcatgcacattgctttggagtcagtattcagctgtaagtgtagtattgttttatggctgaaatagaaagctaatgaagaggcctacctggatccagattttatgttaacatggcagcaaaactaggaaaatgggaagaaattacttgcggggtgttctagatctgattttttttttttttttgaaagtttcagcctgtgggaggaaaagaggtatcttttaaaatagagatagttacatattttcctcatctaggctgtgtcactattgggtgcaaggatatcattgttggctagattcattttgtataatcatgtatcctcttgtgtgctggtagagattttaatcctgatttttccataaaacatgagtattaagaaataattcctggtttggagaaactggagaaatcacccttttaaggaagaaacactggaaatttctgctaacaccaagatatttaagagtgtacatagtaggtgctcaacaaatttattgaatgaatgagtgaatggaaaaactgggagagtcaaaagtgagcagaagctctccatttctacttctgtcacaaaccacattaaattgtaaataaggcccttctccacttgacttcaggcagcagattgtctagaagcctaaggacagcaatttctctgacaagacaaagtagatattttataccaggggttggcaaactactgcccacgggccgaatttggcccagtctgtttttgtatggtgcaaactaaaaatgatttttacatttttaaagagttataaaagaaaaaaatatgtggtctgtgaaatctaaaatatttactacctggcctgttggaggaaaggtttgccaatctctgttttataccattaactatgagattaacaaaaacttttacctttgtgcagaaggttaaaaaaaaaaaaacatggttaaggaaaaggagacatgttacctcttcatacactcctataactgtggcattgcaaaaaa

SEQ ID NO: 121036 - DNA, 721 bp, Homo sapiens
  Payload ID: 3725
  Gene Symbol: CCDC43
  Gene Name: coiled-coil domain containing 43
  ENST ID: ENST00000588687
  CDS Start-End: 1-332
tagcccctggcgaaggcgatggcggaggcggcggctttggctcctggctggacggacggttggaggcactgggagtggaccgagccgtttatggagcctacatcttgggtatcctgcaggaggaggaggaagaagagaagctggacgctctgcaggggatcctctctgctttcctggaagaagattccctccttaatatctgcaaggagattgtggaacgatggtcagaaactcagaatgttgtcaccaaagtgaaaaaagaaggaactccttgcctttgccgattggaagcattaacaatttcatcctttctacgtgactgtacaatgtgaatagactccaagtgtctatcaagagcagtagagatactggcatgaagaagagaactccgaagacgttccattttgcctagtaaagtcacaacctgagggaagcattttaaattttgataagacatgtcctgccattaacttaagtaaaaacaaatcttcagtgaagcagaatagagatgacagcaataatattcattcaataaatcaaagaatgcttactgtgtcctgacaccatgctgggggaaacaaaaatggaaagtgttttctatctacttgtctatgttaattctaaaaatatgtggtagttgattactgaaaataagcatcaatgaaaatgttaaatattcaaacattaccatgtcattaactgcaaatacaagatctgatac

SEQ ID NO: 121037 - DNA, 3466 bp, Homo sapiens
  Payload ID: 3726
  Gene Symbol: CCDC47
  Gene Name: coiled-coil domain containing 47
  Uniprot ID: Q96A33
  ENST ID: ENST00000225726
  CDS Start-End: 384-1835
gtaggaggattgggataggcgagggcagttccggcccaggggcggggattatgtaattttcccaaaagccccacctcgcctcagccgggcgggagagagggaggtctcgcgctttccccggggttgcgtcccgccccgcaggctgcgcgcaggcgctgacgagccgctcgcattctacgtaacggacggcggaggctacgtgaagagaggcgcggcgtgactgagctacggttctggctgcgtcctagaggcatccggggcagtaaaaccgctgcgatcgcggaggcggcggccaggccgagaggcaggccgggcaggggtgtcggacgcagggcgctgggccgggtttcggcttcggccacagctttttttctcaaggtgcaatgaaagccttccacactttctgtgttgtccttctggtgtttgggagtgtctctgaagccaagtttgatgattttgaggatgaggaggacatagtagagtatgatgataatgacttcgctgaatttgaggatgtcatggaagactctgttactgaatctcctcaacgggtcataatcactgaagatgatgaagatgagaccactgtggagttggaagggcaggatgaaaaccaagaaggagattttgaagatgcagatacccaggagggagatactgagagtgaaccatatgatgatgaagaatttgaaggttatgaagacaaaccagatacttcttctagcaaaaataaagacccaataacgattgttgatgttcctgcacacctccagaacagctgggagagttattatctagaaattttgatggtgactggtctgcttgcttatatcatgaattacatcattgggaagaataaaaacagtcgccttgcacaggcctggtttaacactcatagggagcttttggagagcaactttactttagtgggggatgatggaactaacaaagaagccacaagcacaggaaagttgaaccaggagaatgagcacatctataacctgtggtgttctggtcgagtgtgctgtgagggcatgcttatccagctgaggttcctcaagagacaagacttactgaatgtcctggcccggatgatgaggccagtgagtgatcaagtgcaaataaaagtaaccatgaatgatgaagacatggatacctacgtatttgctgttggcacacggaaagccttggtgcgactacagaaagagatgcaggatttgagtgagttttgtagtgataaacctaagtctggagcaaagtatggactgccggactctttggccatcctgtcagagatgggagaagtcacagacggaatgatggatacaaagatggttcactttcttacacactatgctgacaagattgaatctgttcatttttcagaccagttctctggtccaaaaattatgcaagaggaaggtcagcctttaaagctacctgacactaagaggacactgttgtttacatttaatgtgcctggctcaggtaacacttacccaaaggatatggaggcactgctacccctgatgaacatggtgatttattctattgataaagccaaaaagttccgactcaacagagaaggcaaacaaaaagcagataagaaccgtgcccgagtagaagagaacttcttgaaactgacacatgtgcaaagacaggaagcagcacagtctcggcgggaggagaaaaaaagagcagagaaggagcgaatcatgaatgaggaagatcctgagaaacagcgcaggctggaggaggctgcattgaggcgtgagcaaaagaagttggaaaagaagcaaatgaaaatgaaacaaatcaaagtgaaagccatgtaaagccatcccagagatttgagttctgatgccacctgtaagctctgaattcacaggaaacatgaaaaacgccagtccatttctcaaccttaaatttcagacagtcttgggcaactgagaaatccttatttcatcatctactctgtttggggtttggggttttacagagattgaagatacctggaaagggctctgtttcaagaatttttttttccagataatcaaattattttgattattttataaaaggaatgatctatgaaatctgtgtaggttttaaatattttaaaaattataatacaaatcatcagtgcttttagtacttcagtgtttaaagaaataccgtgaaatttataggtagataaccagattgttgctttttgtttaaaccaagcagttgaaatggctataaagactgactctaaaccaagattctgcaaataatgattggaattgcacaataaacattgcttgatgttttcttgtatgtctacattaaacttgagaaaaagtaaaaattagaacactgtatgtagtaatgaaatttcagggacccagaacataatgtagtatatgtttttaggtgggagatgctgataacaaaattaataggaagtctgtaggcattaggatactgacatgtacatggaaaattctagggacaggagcatcattttttccttacctgataccacgaaccagtgacaacgtgaatgctgtattttaagtggttgtatgtttattttcttgagtaacaaatgcatgaaaaattaatgcttcacctaggtaagatcattggtctgtgtgaaatcacaaatgttttttccttcttggttgctgcagcctggtggatgttcatggagaagctctgttctctatattatggctgtgtgccgttgcttctccctctgcttttatcttttccacagttgaggctgggtatgttctttcaaagaaatggccatgaatatgtgtaagtatacttttgaaaatgagctttcctaaactattgagagttctttccacctcttgcggaaccaactcttggaggagaggcccatgtatctgcacgagcacttagcttgttcagatctctgcattttataaatgcttcttaccaagaaagcatttttaggtcattgcttgtaccaggtaatttttgccggggatgggtaagggttgggttttctggtgggagtggggtggtgggtattttttgttgatgctttagtgcaggcctgttctgaggcaataacaagttgctgtgaaaacagcatgtgctgctgcctttgtaactgcatggaaacttttcacatgggtttttctccaagttaatacagaaatatgtaaactgagagatgcaaatgtaatatttttaacagttcatgaagttgttattaaaataactaacataaaacttaattactttaatattatataattatagtagtggccttgttttacaaacctttaaattacattttagaaatcaaagttgatagtcttagttatcttttgagtaagaaaagctttcctaaagtcccatacatttggaccatggcagctaattttgtaacttaagcattcatatgaactacctatggacatctattaaagtgattgacaaaatctca

SEQ ID NO: 121038 - DNA, 2195 bp, Homo sapiens
  Payload ID: 3726
  Gene Symbol: CCDC47
  Gene Name: coiled-coil domain containing 47
  Uniprot ID: Q96A33
  ENST ID: ENST00000403162
  CDS Start-End: 266-1717
agaggcgcggcgtgactgagctacggttctggctgcgtcctagaggcatccggggcagtaaaaccgctgcgatcgcggaggcggcggccaggccgagaggcaggccgggcaggggtgtcggacgcagggcgctgggccgggtttcggcttcggccacaggagtcatagaggctgggtggtctggcaaggacttgtgcatttgagaactgacaggtgcagcggagacttctaagagggaaaaccaagctttttttctcaaggtgcaatgaaagccttccacactttctgtgttgtccttctggtgtttgggagtgtctctgaagccaagtttgatgattttgaggatgaggaggacatagtagagtatgatgataatgacttcgctgaatttgaggatgtcatggaagactctgttactgaatctcctcaacgggtcataatcactgaagatgatgaagatgagaccactgtggagttggaagggcaggatgaaaaccaagaaggagattttgaagatgcagatacccaggagggagatactgagagtgaaccatatgatgatgaagaatttgaaggttatgaagacaaaccagatacttcttctagcaaaaataaagacccaataacgattgttgatgttcctgcacacctccagaacagctgggagagttattatctagaaattttgatggtgactggtctgcttgcttatatcatgaattacatcattgggaagaataaaaacagtcgccttgcacaggcctggtttaacactcatagggagcttttggagagcaactttactttagtgggggatgatggaactaacaaagaagccacaagcacaggaaagttgaaccaggagaatgagcacatctataacctgtggtgttctggtcgagtgtgctgtgagggcatgcttatccagctgaggttcctcaagagacaagacttactgaatgtcctggcccggatgatgaggccagtgagtgatcaagtgcaaataaaagtaaccatgaatgatgaagacatggatacctacgtatttgctgttggcacacggaaagccttggtgcgactacagaaagagatgcaggatttgagtgagttttgtagtgataaacctaagtctggagcaaagtatggactgccggactctttggccatcctgtcagagatgggagaagtcacagacggaatgatggatacaaagatggttcactttcttacacactatgctgacaagattgaatctgttcatttttcagaccagttctctggtccaaaaattatgcaagaggaaggtcagcctttaaagctacctgacactaagaggacactgttgtttacatttaatgtgcctggctcaggtaacacttacccaaaggatatggaggcactgctacccctgatgaacatggtgatttattctattgataaagccaaaaagttccgactcaacagagaaggcaaacaaaaagcagataagaaccgtgcccgagtagaagagaacttcttgaaactgacacatgtgcaaagacaggaagcagcacagtctcggcgggaggagaaaaaaagagcagagaaggagcgaatcatgaatgaggaagatcctgagaaacagcgcaggctggaggaggctgcattgaggcgtgagcaaaagaagttggaaaagaagcaaatgaaaatgaaacaaatcaaagtgaaagccatgtaaagccatcccagagatttgagttctgatgccacctgtaagctctgaattcacaggaaacatgaaaaacgccagtccatttctcaaccttaaatttcagacagtcttgggcaactgagaaatccttatttcatcatctactctgtttggggtttggggttttacagagattgaagatacctggaaagggctctgtttcaagaatttttttttccagataatcaaattattttgattattttataaaaggaatgatctatgaaatctgtgtaggttttaaatattttaaaaattataatacaaatcatcagtgcttttagtacttcagtgtttaaagaaataccgtgaaatttataggtagataaccagattgttgctttttgtttaaaccaagcagttgaaatggctataaagactgactctaaaccaagattctgcaaataatgattggaattgcacaataaacattgcttgatgtttt

SEQ ID NO: 121039 - DNA, 552 bp, Homo sapiens
  Payload ID: 3726
  Gene Symbol: CCDC47
  Gene Name: coiled-coil domain containing 47
  ENST ID: ENST00000580986
  CDS Start-End: 496-552
gaaagctgggtagagacgtgcagacgaagacattccagggagaaagactgaactagcaaaggctaggaagtgagaataaatgtggaacacacttataaaggaagacaatttagctagtttgtgttttcggcaatggcggaaaataagatatgatctaaatgactttaaatatagtggactaaaaacaactgattatataagccacattactttatcacttgtatttttggaggtggaaggaagagttctagtgacagtgattagcatctactctacatatactttgagagtacctcacacactatatacagcttttgcctctcaggaccccaaattcggaggcctgcatctcccaagcgctgcctccttgggtcagaattctccccgcgctattcctgccctggagccgggcaccctgcaaatccttttcctaggcgagggggcgccgcctccggaaagccgccaactgggcctcgctttttttctcaaggtgcaatgaaagccttccacactttctgtgttgtccttctggtgtttgggagtgtctctgaa

SEQ ID NO: 121040 - DNA, 1719 bp, Homo sapiens
  Payload ID: 3726
  Gene Symbol: CCDC47
  Gene Name: coiled-coil domain containing 47
  Uniprot ID: Q96A33
  ENST ID: ENST00000582252
  CDS Start-End: 179-1621
agaggcgcggcgtgactgagctacggttctggctgcgtcctagaggcatccggggcagtaaaaccgctgcgatcgcggaggcggcggccaggccgagaggcaggccgggcaggggtgtcggacgcagggcgctgggccgggtttcggcttcggccacagctttttttctcaaggtgcaatgaaagccttccacactttctgtgttgtccttctggtgtttgggagtgtctctgaagccaagtttgatgattttgaggatgaggaggacatagtagagtatgatgataatgacttcgctgaatttgaggatgtcatggaagactctgttactgaatctcctcaacgggtcataatcactgaagatgatgaagatgagaccactgtggagttggaagggcaggatgaaaaccaagaaggagattttgaagatgcagatacccaggagggagatactgagagtgaaccatatgatgatgaagaatttgaaggttatgaagacaaaccagatacttcttctagcaaaaataaagacccaataacgattgttgatgttcctgcacacctccagaacagctgggagagttattatctagaaattttgatggtgactggtctgcttgcttatatcatgaattacatcattgggaagaataaaaacagtcgccttgcacaggcctggtttaacactcatagggagcttttggagagcaactttactttagtgggggatgatggaactaacaaagaagccacaagcacaggaaagttgaaccaggagaatgagcacatctataacctgtggtgttctggtcgagtgtgctgtgagggcatgcttatccagctgaggttcctcaagagacaagacttactgaatgtcctggcccggatgatgaggccagtgagtgatcaagtgcaaataaaagtaaccatgaatgatgaagacatggatacctacgtatttgctgttggcacacggaaagccttggtgcgactacagaaagagatgcaggatttgagtgagttttgtagtgataaacctaagtctggagcaaagtatggactgccggactctttggccatcctgtcagagatgggagaagtcacagacggaatgatggatacaaagatggttcactttcttacacactatgctgacaagattgaatctgttcatttttcagaccagttctctggtccaaaaattatgcaagaggaaggtcagcctttaaagctacctgacactaagaggacactgttgtttacatttaatgtgcctggctcaggtaacacttacccaaaggatatggaggcactgctacccctgatgaacatggtgatttattctattgataaagccaaaaagttccgactcaacagagaaggcaaacaaaaagcagataagaaccgtgcccgagtagaagagaacttcttgaaactgacacatgtgcaaagacaggaagcagcacagtctcggcgggaggagaaaaaaagagcagagaaggagcgaatcatgaatgaggaagatcctgagaaacagcgcaggctggaggttagacaaacttatcactggggtaaaactacgatttgtaaggatgactgcttgtgttctgttggttgttaaggtaatctttgtaggctaaaagtttagcattttctcaacatttgggacattgtatcaattgataacactataaagaagaataaataatccttcctgtt

SEQ ID NO: 121041 - DNA, 1586 bp, Homo sapiens
  Payload ID: 3726
  Gene Symbol: CCDC47
  Gene Name: coiled-coil domain containing 47
  ENST ID: ENST00000612558
  CDS Start-End: 560-1132
gacaaaccagatacttcttctagcaaaaataaagacccaataacgattgttgatgttcctgcacacctccagaacagctgggagagttattatctagaaattttgatggtgactggtctgcttgcttatatcatgaattacatcattgggaagaataaaaacagtcgccttgcacaggcctggtttaacactcatagggagcttttggagagcaactttactttagtgggggatgatggaactaacaaagaagccacaagcacaggaaagttgaaccaggagaatgagcacatctataacctgtggtgttctggtcgagtgtgctgtgagggcatgcttatccagctgaggttcctcaagagacaagacttactgaatgtcctggcccggatgatgaggccagtgagtgatcaagtgcaaataaaagtaaccatgaatgatgaagacatggatacctacgtatttgctgttggcacacggaaagccttggtgcgactacagaaagagatgcaggatttgagtgagttttgtagtgataaacctaagtctggagcaaagtatggactgccggactctttggccatcctgtcagagatgggaggtcacagacggaatgatggatacaaagatggttcactttcttacacactatgctgacaagattgaatctgttcatttttcagaccagttctctggtccaaaaattatgcaagaggaaggtcagcctttaaagctacctgacactaagaggacactgttgtttacatttaatgtgcctggctcaggtaacacttacccaaaggatatggaggcactgctacccctgatgaacatggtgatttattctattgataaagccaaaaagttccgactcaacagagaaggcaaacaaaaagcagataagaaccgtgcccgagtagaagagaacttcttgaaactgacacatgtgcaaagacaggaagcagcacagtctcggcgggaggagaaaaaaagagcagagaaggagcgaatcatgaatgaggaagatcctgagaaacagcgcaggctggaggaggctgcattgaggcgtgagcaaaagaagttggaaaagaagcaaatgaaaatgaaacaaatcaaagtgaaagccatgtaaagccatcccagagatttgagttctgatgccacctgtaagctctgaattcacaggaaacatgaaaaacgccagtccatttctcaaccttaaatttcagacagtcttgggcaactgagaaatccttatttcatcatctactctgtttggggtttggggttttacagagattgaagatacctggaaagggctctgtttcaagaatttttttttccagataatcaaattattttgattattttataaaaggaatgatctatgaaatctgtgtaggttttaaatattttaaaaattataatacaaatcatcagtgcttttagtacttcagtgtttaaagaaataccgtgaaatttataggtagataaccagattgttgctttttgtttaaaccaagcagttgaaatggctataaagactgactctaaaccaagattctgcaaataatgattggaattgc

SEQ ID NO: 121042 - DNA, 8429 bp, Homo sapiens
  Payload ID: 3727
  Gene Symbol: CCDC50
  Gene Name: coiled-coil domain containing 50
  Uniprot ID: Q8IVM0
  ENST ID: ENST00000392455
  CDS Start-End: 599-1519
cgctcacgggaaagactatgttttaggtgacccgtgtggcctttttgttgaggcctttaggatacaaggcccccacctaaagacgcgaccctcccgtaggaggggggcagggcccgggggcgggagcacagcggggccccagcctcaggcggcgcgtcactgagcacaaaggagacaacagcgaggcggcagcgggcgctgatcttcgctcgccagccactcgcaattgcggttacagacctgcagctccccctcccccagccggcccgcccgcctttctgtctcctctctccctccgtactggacggccccggtccatttccgggctccggatatttggtatcgattggggccggggacgcggagcaggtggccgcggcggggcagctgggccgccagcttggtgcctcggggaccgtctcccgctgctttggtcaccagcccctgcccgcccgacccgctccgttctccggcctgcgagccctgccggccggactttgcgccgcgtccggcgctgctgctgcgctcggggccccgctcggcgccggcggtgaccgggaagcccgcgttaaaggggcaaccgggaccctggcccggtatggctgaagtcagcatcgaccagtccaagctgcctggagtcaaggaagtatgccgagattttgctgtcctggaggaccacaccctggctcacagcctgcaggaacaagagattgagcatcatttggcatcgaacgttcagcggaaccgtttggtccagcatgatctccaggtggctaagcagctccaagaggaagatctgaaagcgcaggcccagctccagaagcgctacaaagaccttgaacaacaagactgtgaaattgctcaggaaattcaggagaagctggctattgaggcagagagacgacgcattcaggagaagaaggatgaggacatagctcgccttttgcaagaaaaggagttacaggaagagaaaaagagaaagaaacactttccagagttccctgcaacccgtgcttatgcagatagttactattatgaagatggaggaatgaagccaagagtgatgaaagaagctgtatctactccatcacgaatggcccacagggatcaggaatggtatgatgctgaaattgccagaaaactgcaagaagaagaacttttggctacccaggtggacatgagagccgctcaagtagctcaagatgaagaaatcgctcgacttctaatggctgaagaaaagaaagcttacaaaaaagccaaggagcgggagaaatcatctttggacaaaagaaagcaagaccccgagtggaagccaaaaacagctaaagcagcaaattccaagtcaaaagagagtgatgaacctcaccattctaagaatgaaaggccagcacggccaccaccacctatcatgacagatggtgaagatgcggattacactcattttacaaaccagcagagttccacacggcatttctcaaaatcagagtcctctcataaaggttttcattacaaacattaaaaacctaggaatctgccttgaaaatggactcactatagcaaatattactgggtgatacagaatgaattctacacttactttttttctcctgtgtttgcattcctgggatttatcctcaagtgcatttctgaccataagtaattttaattcatttcaaatgttttggttattcatgatcacttgggcagtataagaaaatgtagcttctgaatattggccacctctatgctgcatatacttcttgggatatagtatctaagacctttgtaaactgccattttgttaggtatggagtttggtatctagggagtaggccttatttagcaattcaaattttatggagatgaatgatcaaagtgaaacaatgtttggatgcaacgcagaataaaagaatataagaaatagctttttgttgcattaatgtatgatattttgaaggacagagcctttgctttttgtattctttaagaaaagcacaaccataaagtattttaaaaaaagaaacacttggagcaattgaaatatgttattctgactagatggactgtagaggttttgcatttctcagccctcctggggagattggcctagatagcattctttaacacttcctctgcttttgcctcagtagcaaggctttcctaagctcctgggcaatggaacatttattagtatttattgacaaaaatttagttctctgaaattttaactcatatatatgaaaaactttgtattccatctcttctttttcatttacttgtagagccaaggaaatggaattgaaagatgattgcataagtaatgatgccatccttctctctggctgtagactgaggcttttctcttgcttcaagtcagagcagtatttgttgataacctctcaataatgtttggtttacatgccagtaattaaattaattcaacatgaagttgaatttgatgaagtggtcatctatccaagtatttggtttttgttttgttttgttttgttttttgagttggagtctcgccctgtcacacaggctggagtgcagtggtgcaatcttggctcactgcaacctccgccacctgggctggagcaattcccctgcctcagcctcccaagtagctggaattacaggcatgtgtcaccacacccggctaatttttgtatttttagtaaagagcgggtttcaccatgttggccaggctggtctcgaacccctgacctcaagtgatccacctgccttggcctcccaaggtgctgggattacaggcttaagccaccatgtccagccagccaagtatttggttttaaacatttgtattcctttgtgcaagggattgtattcctctgtacaagacctttaagcacctcttcaagaaatttagtctttgtgtagctgctaaccttactgcaatatttattttcccttattttcccatactacttagttgacaaatggcaatcaagctcacttgttctccctctctctgtctcccccccatgtacacatatatatatcccttcagcttgacttgctattatttttcattgtataaatatgaaattcttggcatttcaatatggcatttgtttagggaaaaaatatgtaggtcactagagaaaaatgttaatttttttcccactgtgaattgccttctgtttgccttatcttttcagatagtctttaaagttgggcaatattcaggcagctatttagaacagtttctcagagtggatttgggtctctcatttgagaaagatttgtagtttcaatgaagtttgtatattataggaatttaagtaaaatcatctgagttaagttttgggcaaatgttaatcagaaagataatctacatccctactttatgtagtcattttggagaaatggaggaaaaggaaaataacaggactttttatagctgtgataaaatgggtaaagaaaaacctccatttaaataaggaaggggagacaaaatggaaggtcctggccttaagtcaaattccagatagtgctttcaatatccaaagcttaggccttgtttacttatagtaatgctatatttttctttatctgccctgtgatttcgcttcgtgtccttcaaagtttttttattgtaattttaaaggaaaaaaacaatgtatttttatttgataactaggcaaaatcatttgccattttttatttcataaatatttatttttctatctcatacaatgatcagttttactttaaaaattctgcatttctcttgcctctcatgtacttcatccagttatttattattgtaaaatgttaactggagatactgcattcaaaaaaaagtcggaccacttaacacttaccaggaatgttagtgtttcagctgttttagtaagtgaccaagtaagctatcaccttgtgatagctaattcaacatctttattgaaaatttgttactttttttaaaggtttttaaaagattacaattttaaaatattttatgtttattttatttttgtgtaaagcaaacacttttaaaataatatcagagtaattattaccctatgaataaggagatagaaatgaaattcagccagttaaatcctcatactctttctcattcaaataatataataatgtttgagactatagaagcaactcaactgtattttaatgaactgccagacacttttcactgtgttctctgctttttactttgtcatttttatataaatgtgaaagcattttgttgttgttgttgttgttcctgctgctagaacacatgcagtttaatttttaggcccacagtgtattatgctttaatgttgtgatgtaaactaatacttctggcctgggaaaacctttctgtttctgtatctttgtcctttggaggccaggcctcattaacaccagtattgttgaataagcacaatatatgacggagccttatcataaggctgcttgacatagacacccactctcctccacattttataaatcattgtttggaagtaaagttagataagagtcaaattaaatgttttgacttgaaaaatatttgacttttgcgttcaaaccactgttagacgtaagtattttattagacataagtattttattttgggactagacagttgctttacatgtatttaagggaacattgtgattttcagaaagtggctttacatactattgaattgctatttcccaagttactttacaaccagcagcagcataccaataaattacaaaagcagaaaatgaaaattaaccctaggtgttctgatgatagagaaatagctaaattagaaaagaaagatatggatagatgcttttaggaggaaaacctttttagaatggcaatgaccacttggatctaggtcaacatattccaaaatgtgtgaccttgggctttgtgtttactgaactcactctagaaaattctggacctgattcattaaccccgcttttcttctctaatgtgtcctgaagctgagctagatgatgagtaaattctttgctgactgttgctcatcactttctctcaaagttagaacttttcagtataaaaataattagcttttaactgattattaattttctttaatagtttctgtcaaaacttgtctaaaatttgtgttgtgccaaattggaaatacccactataatatggtgcattcagtttactccacaagtggttaacattttaagtcctagattttttatgtcttgcctttgtataagcatcgctttggggaataccaagatgattcattattcagtgattattttcttgaaagataactatgatgattggctgtaaaatcttcaccctaataaaggagtgagatctctgtgtaaacagctttctgaaggactgataatagaatagaacttgcagccaaaggctttttcccttttgagaagacggtatttgtgtaaggagtgctaaggtagacttcattgtacatagagtgccatattctgttgaaacgatcataacaaaatcaaaacctcatgcttcagcaaaaaggaaaaaagatttttaaattactttgtctattacttactgctcatagagaagtgactatataaaatggtccaattttctcatttctggtggtgcctgtgagtcttaaagccatatctgcttatcttactgttgatagaatactttttttctttttagcccatgataagtaatatgggcaggtagaagcaaactggagactgtcctgttaatgctgcatggggcacaatgtctttcaaattattggtggaagaatctcttttatccatggcgagaggtaagaatattaaagagtcaggatattgttgctcctggtatttaacaactgtcattagaaatgctgaaatttaattgtagagaagtcaagaaagaaagagtaaactgagaaaatcttactactacagagtcacttttacaatgagacctgcactttatgccagcactgtttgtgaggagcagtactgccttaaattagtttgactctgactgatgtcagtgtacgttacttcctttatgtgactgacagtcagctttccattgagatataacattcacagatgatccccaagtatccttgtcatcagaagctttggaccttttctgccactgacttgtggctgatctgtaacacaataaatacataattttatttcatgttgtctgtccacctctgaataagcagtggcatgaccaaaaagactggtagaaggagagaatttcttggccaaatccttcataccaggtaccacttcttgagtaactgagagttgactgtcttctatggtgactacatagaagatatttccaaaggttctgttatgcagtgaagacattcagattatttgtaagaatttcaccaacacccttgtgtattgaaatgcttaaccattaacagggaaaaaaaaggagaaaaccgaacaaaacagagacatttacttgaaatgggaggtttgctaatgtgaagagtgtttctgttttattacttataagagaaaagcaggaaaacttttgctttgataagaaagacaccagagtggtgattctgtttgatgccacaggctaacacaatcgtgtaatcatgttgagttgtagaaatatatggccctaaaaaccattctctttcccttatatatataaatatgtgaacactgcctagtaacattttaatagatttaagatgcatttgtacattctcagcaaactagaagaaaatgttttttctctttttgagttaacttcatagcatagagaaccagcactgtgcaggtttcagcatttcagataagggcataattaattgtgtaacttaatgccctgttattcattgctgaggttcatataaagaatagaaaaattgaaagatgggtttgggcgacattttcttcccaaaagatcaagtaaggagtaagaacaagtaagggaagacagctaagagaacatactatgacatatcatagaattgggatacatttttgttgcactggatttcaggctatactgctaaaataatttctacctgttaaattttgtgagagggtttttgacatcagaatttttgtatttctggtcaaattggtcttggaaatccctatggtctctaatttcagctcttgctgtaaactgcaagccaaatgctctttctcagaaagagctatatttttctcttcttacaggcaacccaatatttatttcataaagtgttataaatattgagaagatacactggggagatagcatataaaaatgatgctccaaaatgagaattctatatggggctttccctaagaagaatccatcccagcacatattttgaaaaggtgctgaattaaaaagtacaagagtttgctcatataaatcaagttgcccaggaaacctgaggtgatgctatcatttgtctcataatttagaaacgtgatctcttgagagagagactacgcattgcctgggcactttcagattccttaggaagtgcccctttgatatttggaatgtggatatatttataaaacaaatggattgttattccaaatccacatggatttataaccaagccccagaagaataggcagctttgaaatagctagttcgtggaattgaacagaaccttgatggaatgcagttgcctgtgtgaggacagaaaacaaagaggctgcctcagaccacatgcctatctagagattaagtgaatttgtgagggacattttgtggatgccttaaagatgaccagtggtgggttctgatgggaatatatacactcatctggactaggccaatggaagcagtctctttcagttcacctccgtacagcacaagttgttcctgctcatgacctcattgaggaaaatgagaattgtggtgctggtgactttcatgtgtcttgggaggttgaggtgttcaacatcgttaaggcactcccaaaacgcaaacctccttttttaaatgccaattgtacatctacattaattcatctatgcaaacttgtgttttcatggtttgttttttacactatatttctcattaggttctttaaacatcaggtttaatattgatattatgaataatttttaaaccaaagtattctataagtctgtgtgctttgttttcctggatggtttgaccaaggtaaacatcagtcttgtccttctctcttaataaagtcatccatttgttaagtcagtggtctctgtctcatgtttttgttttgtttctttacagcattcaaggacagggaaacttacgagagtcttattataattattattatttacaaaatgaccctaataggtctgtttagtaacagtgaaattttttcttactccatttccatacactttctgtaaatatgtataacatgataatgatgcctggtgtattgaaatcctcaataaatactgccaagtgtggatcagttgga

SEQ ID NO: 121043 - DNA, 2454 bp, Homo sapiens
  Payload ID: 3727
  Gene Symbol: CCDC50
  Gene Name: coiled-coil domain containing 50
  Uniprot ID: Q8IVM0
  ENST ID: ENST00000392456
  CDS Start-End: 591-2039
ggaaagactatgttttaggtgacccgtgtggcctttttgttgaggcctttaggatacaaggcccccacctaaagacgcgaccctcccgtaggaggggggcagggcccgggggcgggagcacagcggggccccagcctcaggcggcgcgtcactgagcacaaaggagacaacagcgaggcggcagcgggcgctgatcttcgctcgccagccactcgcaattgcggttacagacctgcagctccccctcccccagccggcccgcccgcctttctgtctcctctctccctccgtactggacggccccggtccatttccgggctccggatatttggtatcgattggggccggggacgcggagcaggtggccgcggcggggcagctgggccgccagcttggtgcctcggggaccgtctcccgctgctttggtcaccagcccctgcccgcccgacccgctccgttctccggcctgcgagccctgccggccggactttgcgccgcgtccggcgctgctgctgcgctcggggccccgctcggcgccggcggtgaccgggaagcccgcgttaaaggggcaaccgggaccctggcccggtatggctgaagtcagcatcgaccagtccaagctgcctggagtcaaggaagtatgccgagattttgctgtcctggaggaccacaccctggctcacagcctgcaggaacaagagattgagcatcatttggcatcgaacgttcagcggaaccgtttggtccagcatgatctccaggtggctaagcagctccaagaggaagatctgaaagcgcaggcccagctccagaagcgctacaaagaccttgaacaacaagactgtgaaattgctcaggaaattcaggagaagctggctattgaggcagagagacgacgcattcaggagaagaaggatgaggacatagctcgccttttgcaagaaaaggagttacaggaagagaaaaagagaaagaaacactttccagagttccctgcaacccgtgcttatgcagatagttactattatgaagatggagaccaaccagggtcaaggagggccagggaattgggttctggattctcaagaccttgtagactccaaagagatggaaagactgtgaagcacaagaaagagaaaccagaacatccactggagaacttggaagagccagaacaacattgttcatcgaagagatccctgtcatcctctagctcgggcaaagggagggacaatccccatattaacaatgagcagcatgaaaggaaacggtccactcaggagaggcctcggagacctctgcttcccacgatcagtggtgaagtgtttctgagcactgaatgtgatgactgggagactaagattaaccatcagactcgaaattgggaaaaacagtctcgacaccaagatcgactttcacccaagtcctcacaaaaagcagggcttcactgcaaggaagttgtatatgggagggaccatgggcaaggtgagcacagaaaaaggagacacaggcccaggactcctccattctcagagagtgaggagcagctccacctccatgacgcaggaatgaagccaagagtgatgaaagaagctgtatctactccatcacgaatggcccacagggatcaggaatggtatgatgctgaaattgccagaaaactgcaagaagaagaacttttggctacccaggtggacatgagagccgctcaagtagctcaagatgaagaaatcgctcgacttctaatggctgaagaaaagaaagcttacaaaaaagccaaggagcgggagaaatcatctttggacaaaagaaagcaagaccccgagtggaagccaaaaacagctaaagcagcaaattccaagtcaaaagagagtgatgaacctcaccattctaagaatgaaaggccagcacggccaccaccacctatcatgacagatggtgaagatgcggattacactcattttacaaaccagcagagttccacacggcatttctcaaaatcagagtcctctcataaaggttttcattacaaacattaaaaacctaggaatctgccttgaaaatggactcactatagcaaatattactgggtgatacagaatgaattctacacttactttttttctcctgtgtttgcattcctgggatttatcctcaagtgcatttctgaccataagtaattttaattcatttcaaatgttttggttattcatgatcacttgggcagtataagaaaatgtagcttctgaatattggccacctctatgctgcatatacttcttgggatatagtatctaagacctttgtaaactgccattttgttaggtatggagtttggtatctagggagtaggccttatttagcaattcaaattttatggagatgaatgatcaaagtgaaacaatgtttggatgcaacgcagaataaaagaatataagaaatagctttttgttg

SEQ ID NO: 121044 - DNA, 1560 bp, Homo sapiens
  Payload ID: 3728
  Gene Symbol: CCDC51
  Gene Name: coiled-coil domain containing 51
  Uniprot ID: Q96ER9
  ENST ID: ENST00000395694
  CDS Start-End: 87-1322
tagaatcggaaccgtaggaggggtacttaaccggacggcctaccaggcctgtggccgtgcgcgggaagagcactgcagatctcaggatgatggggcgcagccctgggtttgccatgcagcacatcgtgggtgtgccccacgtactggttcggaggggcctccttggaagggacctcttcatgaccaggactctctgcagcccaggcccaagccagcccggagagaaaagacctgaggaggtggccctggggctgcaccaccgcctcccagcactgggaagagccctggggcacagcattcagcaacgagcgacctccacagccaagacttggtgggacagatatgaagagtttgttggactcaacgaggttcgagaggcccagggaaaggtgacagaggctgagaaagtgttcatggtggctcgagggcttgtccgagaggctcgggaggacttggaagttcaccaggccaagctgaaggaggtgagggaccgcttggaccgtgtctccagggaggacagtcagtacttggaactggctactctcgagcacaggatgctgcaggaggagaagaggcttcgcacagcctatctgcgtgcagaagactctgagcgagagaagttctccctcttctctgcagctgtgcgggaaagtcatgagaaggagcgcacaagggctgagaggaccaagaactggtccctcattggctcagtcctgggggccctgattggtgtggctggctccacctatgtgaaccgtgtgcgactacaggagctgaaggctttactcctggaggcgcagaaggggcctgtgagtctccaagaggccattcgagaacaggcgtctagctactcccgccagcagagggacctccacaatctcatggtggacctgaggggcctggtacatgctgctgggccagggcaggactctgggtcacaggcaggtagtcccccgaccagagacagagatgtagatgtcctttcagctgccttgaaagagcagcttagtcattccaggcaagtccattcatgtctagaaggcttacgagagcagcttgatggcctagaaaagacttgtagccaaatggctggggtggttcagcttgtaaagtctgcagcacacccaggcctggtggaaccagcagacggggctatgcccagcttcttgctggagcaggggagcatgatcttggcactgtcagacacggagcagagactagaagcccaagtcaacaggaacaccatctatagcaccctggtcacctgtgtgacatttgtggccacactgcctgtgctctacatgctattcaaagccagctaacccctggcccctcctccagagggtctgaggcaatagctgtgaatgtggatttaagtagagaatcgtagcaatgaagcgagcctttgggggcatgtacaacctcaatctgaaggagcagtatctgtgtggctcaccagcaggcatgcttcgctttgtagacaaggttcatttacattaattatcaaaactttgtgctaatgtccaattaaaatatcctgagttttattatttaaaacaa

SEQ ID NO: 121045 - DNA, 1554 bp, Homo sapiens
  Payload ID: 3728
  Gene Symbol: CCDC51
  Gene Name: coiled-coil domain containing 51
  Uniprot ID: Q96ER9
  ENST ID: ENST00000442740
  CDS Start-End: 433-1341
gccaggtacgaggagctagggttgtcctgccagggtagaatcggaaccgtaggaggggtacttaaccggacggcctaccaggcctgtggccgtgcgcgggaagagcactgcagcccaggcccaagccagcccggagagaaaagacctgaggaggtggccctggggctgcaccaccgcctcccagcactgggaagagccctggggcacagcattcagcaacgagcgacctccacagccaagacttggtgggacagatatgaagagtttgttggactcaacgaggttcgagaggcccagggaaaggtgacagagctcacaccccagtgacctcttctgggaatgccttgctgggaatgcagctgagcctgtgtgggtgtggagagaaggtgcagatggcctccggttttctctttgcaggctgagaaagtgttcatggtggctcgagggcttgtccgagaggctcgggaggacttggaagttcaccaggccaagctgaaggaggtgagggaccgcttggaccgtgtctccagggaggacagtcagtacttggaactggctactctcgagcacaggatgctgcaggaggagaagaggcttcgcacagcctatctgcgtgcagaagactctgagcgagagaagttctccctcttctctgcagctgtgcgggaaagtcatgagaaggagcgcacaagggctgagaggaccaagaactggtccctcattggctcagtcctgggggccctgattggtgtggctggctccacctatgtgaaccgtgtgcgactacaggagctgaaggctttactcctggaggcgcagaaggggcctgtgagtctccaagaggccattcgagaacaggcgtctagctactcccgccagcagagggacctccacaatctcatggtggacctgaggggcctggtacatgctgctgggccagggcaggactctgggtcacaggcaggtagtcccccgaccagagacagagatgtagatgtcctttcagctgccttgaaagagcagcttagtcattccaggcaagtccattcatgtctagaaggcttacgagagcagcttgatggcctagaaaagacttgtagccaaatggctggggtggttcagcttgtaaagtctgcagcacacccaggcctggtggaaccagcagacggggctatgcccagcttcttgctggagcaggggagcatgatcttggcactgtcagacacggagcagagactagaagcccaagtcaacaggaacaccatctatagcaccctggtcacctgtgtgacatttgtggccacactgcctgtgctctacatgctattcaaagccagctaacccctggcccctcctccagagggtctgaggcaatagctgtgaatgtggatttaagtagagaatcgtagcaatgaagcgagcctttgggggcatgtacaacctcaatctgaaggagcagtatctgtgtggctcaccagcaggcatgcttcgctttgtagacaaggttcatttacattaattatcaaaactttgtgctaatgtccaattaaaata

SEQ ID NO: 121046 - DNA, 1385 bp, Homo sapiens
  Payload ID: 3728
  Gene Symbol: CCDC51
  Gene Name: coiled-coil domain containing 51
  Uniprot ID: Q96ER9
  ENST ID: ENST00000412398
  CDS Start-End: 239-1147
agacgattggtcgggccacgccagcccaggcccaagccagcccggagagaaaagacctgaggaggtggccctggggctgcaccaccgcctcccagcactgggaagagccctggggcacagcattcagcaacgagcgacctccacagccaagacttggtgggacagatatgaagagtttgttggactcaacgaggttcgagaggcccagggaaaggtgacagaggctgagaaagtgttcatggtggctcgagggcttgtccgagaggctcgggaggacttggaagttcaccaggccaagctgaaggaggtgagggaccgcttggaccgtgtctccagggaggacagtcagtacttggaactggctactctcgagcacaggatgctgcaggaggagaagaggcttcgcacagcctatctgcgtgcagaagactctgagcgagagaagttctccctcttctctgcagctgtgcgggaaagtcatgagaaggagcgcacaagggctgagaggaccaagaactggtccctcattggctcagtcctgggggccctgattggtgtggctggctccacctatgtgaaccgtgtgcgactacaggagctgaaggctttactcctggaggcgcagaaggggcctgtgagtctccaagaggccattcgagaacaggcgtctagctactcccgccagcagagggacctccacaatctcatggtggacctgaggggcctggtacatgctgctgggccagggcaggactctgggtcacaggcaggtagtcccccgaccagagacagagatgtagatgtcctttcagctgccttgaaagagcagcttagtcattccaggcaagtccattcatgtctagaaggcttacgagagcagcttgatggcctagaaaagacttgtagccaaatggctggggtggttcagcttgtaaagtctgcagcacacccaggcctggtggaaccagcagacggggctatgcccagcttcttgctggagcaggggagcatgatcttggcactgtcagacacggagcagagactagaagcccaagtcaacaggaacaccatctatagcaccctggtcacctgtgtgacatttgtggccacactgcctgtgctctacatgctattcaaagccagctaacccctggcccctcctccagagggtctgaggcaatagctgtgaatgtggatttaagtagagaatcgtagcaatgaagcgagcctttgggggcatgtacaacctcaatctgaaggagcagtatctgtgtggctcaccagcaggcatgcttcgctttgtagacaaggttcatttacattaattatcaaaactttgtgctaatgtccaattaaaatatcctgagttttattatttaaaacaa

SEQ ID NO: 121047 - DNA, 556 bp, Homo sapiens
  Payload ID: 3728
  Gene Symbol: CCDC51
  Gene Name: coiled-coil domain containing 51
  ENST ID: ENST00000438370
  CDS Start-End: 370-556
cgtccatctccttggcctgcttcttgggctgtttcagtggcttcttcttgccacctgtgggcgacacgagcacgttcggcctgcccctgccgcccggtccccaccccgccgtccccgcagtcctcacggttccggaacacttaccttcgcggccggacatggcgcctgccgccgcttccccagaccctgccaccggaaacggagcgtctgccccaccctttgtcgtagacagcgaggcggccccgctgattggctcctagtcaggaagttgaactctcgctaccggatgcggcgctccaggggcgggtactaacaggtcagaggtcaactgagtggcagacgattggtcgggccacgccagatctcaggatgatggggcgcagccctgggtttgccatgcagcacatcgtgggtgtgccccacgtactggttcggaggggcctccttggaagggacctcttcatgaccaggactctctgcagcccaggcccaagccagcccggagagaaaagacctgaggaggtggccctggggctgcaccaccgcctcccagcac

SEQ ID NO: 121048 - DNA, 833 bp, Homo sapiens
  Payload ID: 3728
  Gene Symbol: CCDC51
  Gene Name: coiled-coil domain containing 51
  ENST ID: ENST00000446140
  CDS Start-End: 357-833
aatttttttgaccattttcatagatgatttttaaaaccacaggactggataagagaggagtctgagtgccgagtgccggggtgctacagtttccagaggttaggcagatgagtggggactggaaaccgagtgaaaaatggcatgtgaaggaggagcaggtgaaggccagatcagagggagctggacggaatcagagaagaggaacagaaacagtgaattcaggcagtctgtcaaggagtttggttataaaggaaaccaaagaaatggggcagttgctggtgggggggtgtcagatcaattactgagtaatgtctcaggaggagagaggatttgggacctggggcacagatctcaggatgatggggcgcagccctgggtttgccatgcagcacatcgtgggtgtgccccacgtactggttcggaggggcctccttggaagggacctcttcatgaccaggactctctgcagcccaggcccaagccagcccggagagaaaagacctgaggaggtggccctggggctgcaccaccgcctcccagcactgggaagagccctggggcacagcattcagcaacgagcgacctccacagccaagacttggtgggacagatatgaagagtttgttggactcaacgaggttcgagaggcccagggaaaggtgacagaggctgagaaagtgttcatggtggctcgagggcttgtccgagaggctcgggaggacttggaagttcaccaggccaagctgaaggaggtgagggaccgcttggaccgtgtctccagggaggacagtcagtacttggaactggctactctcgagcacaggatgctgcag

SEQ ID NO: 121049 - DNA, 1461 bp, Homo sapiens
  Payload ID: 3728
  Gene Symbol: CCDC51
  Gene Name: coiled-coil domain containing 51
  Uniprot ID: Q96ER9
  ENST ID: ENST00000447018
  CDS Start-End: 309-1217
ggttgtcctgccagggtagaatcggaaccgtaggaggggtacttaaccggacggcctaccaggcctgtggccgtgcgcgggaagagcactgcagcccaggcccaagccagcccggagagaaaagacctgaggaggtggccctggggctgcaccaccgcctcccagcactgggaagagccctggggcacagcattcagcaacgagcgacctccacagccaagacttggtgggacagatatgaagagtttgttggactcaacgaggttcgagaggcccagggaaaggtgacagaggctgagaaagtgttcatggtggctcgagggcttgtccgagaggctcgggaggacttggaagttcaccaggccaagctgaaggaggtgagggaccgcttggaccgtgtctccagggaggacagtcagtacttggaactggctactctcgagcacaggatgctgcaggaggagaagaggcttcgcacagcctatctgcgtgcagaagactctgagcgagagaagttctccctcttctctgcagctgtgcgggaaagtcatgagaaggagcgcacaagggctgagaggaccaagaactggtccctcattggctcagtcctgggggccctgattggtgtggctggctccacctatgtgaaccgtgtgcgactacaggagctgaaggctttactcctggaggcgcagaaggggcctgtgagtctccaagaggccattcgagaacaggcgtctagctactcccgccagcagagggacctccacaatctcatggtggacctgaggggcctggtacatgctgctgggccagggcaggactctgggtcacaggcaggtagtcccccgaccagagacagagatgtagatgtcctttcagctgccttgaaagagcagcttagtcattccaggcaagtccattcatgtctagaaggcttacgagagcagcttgatggcctagaaaagacttgtagccaaatggctggggtggttcagcttgtaaagtctgcagcacacccaggcctggtggaaccagcagacggggctatgcccagcttcttgctggagcaggggagcatgatcttggcactgtcagacacggagcagagactagaagcccaagtcaacaggaacaccatctatagcaccctggtcacctgtgtgacatttgtggccacactgcctgtgctctacatgctattcaaagccagctaacccctggcccctcctccagagggtctgaggcaatagctgtgaatgtggatttaagtagagaatcgtagcaatgaagcgagcctttgggggcatgtacaacctcaatctgaaggagcagtatctgtgtggctcaccagcaggcatgcttcgctttgtagacaaggttcatttacattaattatcaaaactttgtgctaatgtccaattaaaatatcctgagttttattatttaaaacaatcagac

SEQ ID NO: 121050 - DNA, 916 bp, Homo sapiens
  Payload ID: 3729
  Gene Symbol: CCDC53
  Gene Name: coiled-coil domain containing 53
  Uniprot ID: Q9Y3C0
  ENST ID: ENST00000240079
  CDS Start-End: 163-747
ggaagccgccgagtgattagtgagcggagaagctttcttccggcgggaagggccccggaggcgggcacttggggggaaagttgagacgtgattaccgggttgggcgggccccatctgggaggggtttgtgggtgaactcggggtccaccgcccgctgaggagatggatgaggacgggcttcctctcatggggtcaggcatagacctgaccaaggtgccagctattcaacagaaaagaacggtggcttttctaaaccaatttgtggtgcacactgtacagttcctcaaccgcttttctacagtttgtgaggagaaactggcagacctttcacttcgtatccaacaaattgaaacaactctcaatattttagatgcaaagttgtcatctatcccaggcctagatgatgtcacagttgaagtatctcctttaaatgtcaccagtgtcacaaatggagcacatcctgaagccacttcagagcaaccacagcagaacagtacacaagactctggactacaggaaagtgaagtatcagcagaaaatatcttaactgtagccaaggatccaagatatgccagatatctcaaaatggttcaagtgggtgtaccagtgatggcaataagaaacaaaatgatatcagaaggactagacccagatcttcttgagaggccagatgctccagtgcctgatggcgaaagtgagaaaactgtagaagaaagttcagatagcgaatcttcttttagtgattaagcttaattttgataagaattacatatgcatgcataggggtacatttacattctgtaagagattgagcctgaactctcttagtcataaaaacatcaaatggccacatgtccactaccaagcttcttctatgttaaaaaaataataataaagcagttttaacctgccagta

SEQ ID NO: 121051 - DNA, 886 bp, Homo sapiens
  Payload ID: 3729
  Gene Symbol: CCDC53
  Gene Name: coiled-coil domain containing 53
  ENST ID: ENST00000538761
  CDS Start-End: 13-165
cccgctgaggagatggatgaggacgggcttcctctcatggggtcaggcatagacctgaccaaggtgccagctattcaacagaaaagaacggtggcttttctaaaccaatttgtggtgcacactgtacagttcctcaaccgcttttctacagtttgtgaggagtagagttggggtttcaccatgttgaccatcctgacctcagatgatacacctgcctcggcctcccaaagtgctgggattacaggcatgagccattgtgcccagcctatgaaactggcagacctttcacttcgtatccaacaaattgaaacaactctcaatattttagatgcaaagttgtcatctatcccaggcctagatgatgtcacagttgaagtatctcctttaaatgtcaccagtgtcacaaatggagcacatcctgaagccacttcagagcaaccacagcagaacagtacacaagactctggactacaggaaagtgaagtatcagcagaaaatatcttaactgtagccaaggatccaagatatgccagatatctcaaaatggttcaagtgggtgtaccagtgatggcaataagaaacaaaatgatatcagaaggactagacccagatcttcttgagaggccagatgctccagtgcctgatggcgaaagtgagaaaactgtagaagaaagttcagatagcgaatcttcttttagtgattaagcttaattttgataagaattacatatgcatgcataggggtacatttacattctgtaagagattgagcctgaactctcttagtcataaaaacatcaaatggccacatgtccactaccaagcttcttctatgttaaaaaaataataataaagcagttttaacctgccagtatgtcttgttgct

SEQ ID NO: 121052 - DNA, 945 bp, Homo sapiens
  Payload ID: 3729
  Gene Symbol: CCDC53
  Gene Name: coiled-coil domain containing 53
  ENST ID: ENST00000544341
  CDS Start-End: 112-633
gccccggaggcgggcacttggggggaaagttgagacgtgattaccgggttgggcgggccccatctgggaggggtttgtgggtgaactcggggtccaccgcccgctgaggagatggatgaggacgggcttcctctcatggggtcaggcatagacctgaccaaggtgccagctattcaacagaaaagaacggtggcttttctaaaccaatttgtggtgcacactgtacagttcctcaaccgcttttctacagtttgtgaggagaaactggcagacctttcacttcgtatccaacaaattgaaacaactctcaatattttagatgcaaagttgtcatctatcccaggcctagatgatgtcacagttgaagtatctcctttaaatgtcaccagtgtcacaaatggagcacatcctgaagccacttcagagcaaccacagaacagtacacaagactctggactacaggaaagtgaagtatcagcagaaaatatcttaactgtagccaaggatccaagatatgccagatatctcaaaatggttcaagtgggtgtaccagtgatggcaataagaaacaaaatgatatcagaaggactagacccagatcttcttgaaaaaattaaaaaaagaaaaaaatgaagacagacaataacaagtgttgctgacggtgtggagaaattggaaccctcatacattgcaggaggccagatgctccagtgcctgatggcgaaagtgagaaaactgtagaagaaagttcagatagcgaatcttcttttagtgattaagcttaattttgataagaattacatatgcatgcataggggtacatttacattctgtaagagattgagcctgaactctcttagtcataaaaacatcaaatggccacatgtccactaccaagcttcttctatgttaaaaaaataataataaagcagttttaacctgcca

SEQ ID NO: 121053 - DNA, 921 bp, Homo sapiens
  Payload ID: 3729
  Gene Symbol: CCDC53
  Gene Name: coiled-coil domain containing 53
  ENST ID: ENST00000535501
  CDS Start-End: 73-258
attaccgggttgggcgggccccatctgggaggggtttgtgggtgaactcggggtccaccgcccgctgaggagatggatgaggacgggcttcctctcatggggtcaggcatagacctgaccaaggtgccagctattcaacagaaaagaacggtggcttttctaaaccaatttgtggtgcacactgtacagttcctcaaccgcttttctacagtttgtgaggagacagggtctcactttgtcacccatgctggagtgtagtggagtgaacttagctcactgcagcctagacctcctgcctcagcgccccaagtagctggaactacagaaactggcagacctttcacttcgtatccaacaaattgaaacaactctcaatattttagatgcaaagttgtcatctatcccaggcctagatgatgtcacagttgaagtatctcctttaaatgtcaccagtgtcacaaatggagcacatcctgaagccacttcagagcaaccacagaacagtacacaagactctggactacaggaaagtgaagtatcagcagaaaatatcttaactgtagccaaggatccaagatatgccagatatctcaaaatggttcaagtgggtgtaccagtgatggcaataagaaacaaaatgatatcagaaggactagacccagatcttcttgagaggccagatgctccagtgcctgatggcgaaagtgagaaaactgtagaagaaagttcagatagcgaatcttcttttagtgattaagcttaattttgataagaattacatatgcatgcataggggtacatttacattctgtaagagattgagcctgaactctcttagtcataaaaacatcaaatggccacatgtccactaccaagcttcttctatgttaaaaaaataataataaagcagttttaacctgc

SEQ ID NO: 121054 - DNA, 883 bp, Homo sapiens
  Payload ID: 3729
  Gene Symbol: CCDC53
  Gene Name: coiled-coil domain containing 53
  ENST ID: ENST00000540536
  CDS Start-End: 39-548
tttgtgggtgaactcggggtccaccgcccgctgaggagatggatgaggacgggcttcctctcatggggtcaggcatagacctgaccaaggtgccagctattcaacagaaaagaacggtggcttttctaaaccaatttgtggtgcacactgtacagttcctcaaccgcttttctacagtttgtgaggagaaactggcagacctttcacttcgtatccaacaaattgaaacaactctcaatattttagatgcaaagttgtcatctatcccaggcctagatgatgtcacagttgaagtatctcctttaaatgtcaccagtgtcacaaatggagcacatcctgaagccacttcagagcaaccacagcagaacagtacacaagactctggactacaggaaagtgaagtatcagcagaaaatatcttaactgtagccaaggatccaagatatgccagatatctcaaaatggttcaagtgggtgtaccagtgatggcaataagaaacaaaatgatatcagaaggactagacccagatcttcttgaggtgaagtaagaacatttatgatcataatatgcagagccaaatttctgttccccttgaaaatatgaatatcccgcctggaaatgatggtattgctgaggccagatgctccagtgcctgatggcgaaagtgagaaaactgtagaagaaagttcagatagcgaatcttcttttagtgattaagcttaattttgataagaattacatatgcatgcataggggtacatttacattctgtaagagattgagcctgaactctcttagtcataaaaacatcaaatggccacatgtccactaccaagcttcttctatgttaaaaaaataataataaagcagttttaacctgcc

SEQ ID NO: 121055 - DNA, 865 bp, Homo sapiens
  Payload ID: 3729
  Gene Symbol: CCDC53
  Gene Name: coiled-coil domain containing 53
  ENST ID: ENST00000545679
  CDS Start-End: 118-699
ggaagggccccggaggcgggcacttggggggaaagttgagacgtgattaccgggttgggcgggccccatctgggaggggtttgtgggtgaactcggggtccaccgcccgctgaggagatggatgaggacgggcttcctctcatggggtcaggcatagacctgaccaaggtgccagctattcaacagaaaagaacggtggcttttctaaaccaatttgtggtgcacactgtacagttcctcaaccgcttttctacagtttgtgaggagaaactggcagacctttcacttcgtatccaacaaattgaaacaactctcaatattttagatgcaaagttgtcatctatcccaggcctagatgatgtcacagttgaagtatctcctttaaatgtcaccagtgtcacaaatggagcacatcctgaagccacttcagagcaaccacagaacagtacacaagactctggactacaggaaagtgaagtatcagcagaaaatatcttaactgtagccaaggatccaagatatgccagatatctcaaaatggttcaagtgggtgtaccagtgatggcaataagaaacaaaatgatatcagaaggactagacccagatcttcttgagaggccagatgctccagtgcctgatggcgaaagtgagaaaactgtagaagaaagttcagatagcgaatcttcttttagtgattaagcttaattttgataagaattacatatgcatgcataggggtacatttacattctgtaagagattgagcctgaactctcttagtcataaaaacatcaaatggccacatgtccactaccaagcttcttctatgttaaaaaaataataataaagcagttttaacctgcca

SEQ ID NO: 121056 - DNA, 477 bp, Homo sapiens
  Payload ID: 3729
  Gene Symbol: CCDC53
  Gene Name: coiled-coil domain containing 53
  ENST ID: ENST00000542923
  CDS Start-End: 1-324
aaactggcagacctttcacttcgtatccaacaaattgaaacaactctcaatattttagatgcaaagttgtcatctatcccaggcctagatgatgtcacagttgaagtatctcctttaaatgtcaccagtgtcacaaatggagcacatcctgaagccacttcagagcaaccacagggtgtaccagtgatggcaataagaaacaaaatgatatcagaaggactagacccagatcttcttgagaggccagatgctccagtgcctgatggcgaaagtgagaaaactgtagaagaaagttcagatagcgaatcttcttttagtgattaagcttaattttgataagaattacatatgcatgcataggggtacatttacattctgtaagagattgagcctgaactctcttagtcataaaaacatcaaatggccacatgtccactaccaagcttcttctatgttaaaaaaataataataaagcag

SEQ ID NO: 121057 - DNA, 588 bp, Homo sapiens
  Payload ID: 3729
  Gene Symbol: CCDC53
  Gene Name: coiled-coil domain containing 53
  ENST ID: ENST00000500685
  CDS Start-End: 51-284
atctgggaggggtttgtgggtgaactcggggtccaccgcccgctgaggagatggatgaggacgggcttcctctcatggggtcaggcatagacctgaccaaggtgccagctattcaacagaaaagaacggtggcttttctaaaccaatttgtggtgcacactgtacagttcctcaaccgcttttctacagtttgtgaggagacggggtcttgctgtatcaccgaggctggagtgcagtggcgtgatcacagctcagggcaacctcaacttcctgggctcaagtgatcctcccacctcagcctccctagaagcttggactatagaaactggcagacctttcacttcgtatccaacaaattgaaacaactctcaatattttagatgcaaagttgtcatctatcccaggcctagatgatgtcacagttgaagtatctcctttaaatgtcaccagtgtcacaaatggagcacatcctgaagccacttcagagcaaccacagaacagtacacaagactctggactacaggaaagtgaagtatcagcagaaaatatcttaactgtagccaaggatccaagatatgccagatatct

SEQ ID NO: 121058 - DNA, 1444 bp, Homo sapiens
  Payload ID: 3730
  Gene Symbol: CCDC54
  Gene Name: coiled-coil domain containing 54
  Uniprot ID: Q8NEL0
  ENST ID: ENST00000261058
  CDS Start-End: 395-1381
gtagcaacaggtgtttttctgtgttcctcaggctgctcaacaatttctatgattcaaaaagagccctatgaccaaaacttttgagaactgctgtagttaaatatgtttgttctaagccagcagtcattgtgacatcagcagcaggtcaatgattaccatatgaaagattccatgcagttgactattatttcacagagctctctggttgggctgctctataagaagctaatcacctaacagtgtctattgctgtggctgatgatttccagagtgttctaagatgttatcaggaaaggcatccaacaaatagtaagagaaggaccatttcatttgtacattatttcttcctgtgattctgttttccaacaccttgcctcttgtttcaccatgaaagatgtacacacttcacaccaaaagggtaaaagctgctgctaggcagatgtggacttcaaatctctccaaggtcagacagtctcttaaaaatgtttaccacaaatgtaagattcggcaccaagattcaactggatatcccactgtgacatctgatgattgtaatcaagatgatgatagttatgacggaaaaatgaatcttccagtagtgctccaagatgttaaaactgctcaagttgaacttttcagccaaatgactgacattgtccatatgataccaaaagtccaggaaaagactgacttgtatcaaaaacagatggaggtcctggaaaccagaatgaatgttaatgaagacaaacaatgcacaacgactaaagatatcctctctatgaaagaagacatcaaggcattaaagaagaaggtgacagaactggaaattcagaattcctgctccacgatacattgtctagagattctggagggagaaaggggtaaagaaatcacagaactgctttacaaactcatacaaccagcaactctgaagaacactttggcctctacagacatggaaatctcttcagcagaaccagagaaagtgcccagttatccaaagtccactgaccatcttgagaaaaaaacaatttctccccaaatgaaaactctgaagaaacgtaaccatcaaaatgcatcaaggagctttgaaaaagcaaagccaaatatttacatttacccagacttcagtacatggatcaagctaacttttgttcatggaggaaaatggacatttttcctcagtgctaccaagttagaagaattcatccagtggcttctttctaggccaaccattcttcctgaggaaccccaggtcataacccagagatactgtccattcactgggcccattttgagcttgaccacaatctgtctctccatcttcaacaatatttacggctttatttgttccttaaaagaagaagtaactcgactatagagttatgttctgctttgcttggcacaaaataaatgtaacctggaggctccaagtattcacaca

SEQ ID NO: 121059 - DNA, 3000 bp, Homo sapiens
  Payload ID: 3731
  Gene Symbol: CCDC57
  Gene Name: coiled-coil domain containing 57
  Uniprot ID: Q2TAC2
  ENST ID: ENST00000389641
  CDS Start-End: 38-2788
cctggccagcgctgctggcgggcgttaggcggccaccatgctgccactgggctcagagcccgccctgaatgagctgctgcttcgcaaggaggaggagtggagggcgctgcaggcacaccgcacccagctgcaggaggcggctctgcaggacacacggagccagctggaggaggcgcaggggaaactgcggtgcctgcaggaggactttgtctacaaccttcaggtgctggaggagcgggacctcgagctggagcgctatgacgccgccttcgcccaggccagggagtgggaagaggccaggcgggcagaggtgagcgagctcaagatagaggcagctaagctgaggcaggcgctagccagagaggccaggaaggtggaggagctgcagcagcagcagcagctggcattccaggagcatcgcctggagctggagcgcgtccacagtgacaagaatggtgagattgaccaccaccgggaacagtatgaaaatctaaaatggacactggagagaaaacttgaggagctcgacggtgagcttgctctgcagagacaggaactgctgctggagtttgaatcgaaaatgcggaagagggagcacgaattccgtctgcaggctgacaacatgagcaacacagccttgtcccgggagcttaaggttaaactactgcacaaagagctggaggctctgaaggaagccggggcaaaggctgcagagagtctgcagagggcagaggccaccaacgccgagctggagaggaagctccagagccgagccggggagctccaggacctggaggccatgagccgcgcccgggtaaaggatttagaggataaacttcactctgtgcagctaaccaggaagaaggaagaggaaacatttaagaggaagcatgaggagctcgaccgtctggccagggagaaggatgcagtgctggtggcggtgaagggagcccacgtggagcagctgcaggagctgcagaccagggttctggagctgcaggcccactgcgagaccctcgaggcgcagctccgcagggcagagtggagacaggctgacaccgccaaggagaaggacgctgccattgaccaacttcgtgaagatgcatcaactgtaaaatctgcctgggatgctcaaattgctcaactatctaaggagatggtctccagagaccttcagattcagacgctgcaggaagaagaggtgaagctcaaggcacaggtggcccgatcccagcaggacattgaaaggtacaagcaacagctgtccctggcagtggaaagggagcggagcctggagcgtgatcaggtgcagctgggcctggactggcagcgccgctgtgatgacattgaaagggaccagatccaaaagtcagaggccctgattcagggtctgagcatggcaaaaagtcaggttgctgccaagctgcaggagacagagcaggcgctacaggagcaggaggtggtgctgaaggccgtgaccctggaacgagaccaggccgtgcaggccctgaggatgcatgggctccccagaccaggggcacagatgcttctcaggcagcatgaagaagaaataagtaaagactttccatccagtgagatccagcggctccgagagcagaacacgagcttgcgaaacgcgattgcccagatgaggaaagaaatggaggctctaagccatcagattcctcctcccatccagacagcggcagagagcacagatgcaaaccagcctgacccagaggctgggggagatgccgccactcctgattatgttctggcccttgaagcagaaatacgaactctaaagcataagtttaaaactctggaaaagcatctagaagatgtgttggatcctttaaagatgtcctcacctcatgctgagtctcagcccagcgtccgcacctcgacagagacgactggagggtctgcccaagctggtcaagccggagggtctgtccaagctggtcaagcaggaggatctgtccaagctggcccagtatcctctggactggcactcaggaagctcggggacagagtgcagctcctaaacctgctggtgacacgactcagacagaaggtgctgcgggaacccctggagccggccgctctccagcgtgagcttccccgtgaggtggaccaggtacacctggaggttttggagctgcggaagcaggtggctgagctggggaagcatctcaggatagcccagcacgggggagcggagccttcaggcaggaagcagcccccagcctcggacgccgtggcccttgggagagagcaggacgccaagagtgccgaggatgaggctccttccagacacttgggaaagcaccagccccgctcagcacaggtgggcagcagacttgacgccctgcaaggcccgaagacacaacacagcatccacacggtgacctgtaaatcacctcggcagaaagaagacaggtccccaaagccaccccaggctccccagcaccctgaggagcatggtcgccaatcccacagctcctcctcctttgccagtggcaccctccaggacatgtggaggttgctagacctgggatccagcccttctggtgtcacctcccagggtgactcaactccagagctcccagctcctccagcagccgacaggaggcccgtcaagatgcaggcaggcattgccaccccagggatgaagacagcagcccaggcaaaggccaagaccacaggagcctcccggtctcatcctgcaaaagctaaaggctgccagaggccccccaagatccgtaactacaacattatggactgacttcctccccccaccccgccccactaaggggtgctcggggcctccgcatggtgcctgtgctttcacctacgtgttgtgggggggtgtgggcacagcgtgcagggtggaggcagggagctgcagggcaggctcccaaatgctgctgaggcgaccctgctgactgaaggcctccctgagcacagggcccattaaaaccaggttcctccctgggg

SEQ ID NO: 121060 - DNA, 2896 bp, Homo sapiens
  Payload ID: 3731
  Gene Symbol: CCDC57
  Gene Name: coiled-coil domain containing 57
  Uniprot ID: Q2TAC2
  ENST ID: ENST00000392343
  CDS Start-End: 356-2611
cctggccagcgctgctggcgggcgttagggtatttctggaaaactcaaactgtttttcctctactctgataccacaagaatcatcagcacagaggaagacttctgtgatcaaatgtggtgggagagggaggttttcaccagcacatgagcagtcagttctgccgcagactcggcgggtgtccttcggttcagttccaacaccgcctgcctggagagaggtcagaccacagggtgagggctcagtccccaagacataaacacccaagacataaacacccaacaggtccaccccgcctgctgcccaggcagagccgattcaccaagacgggaattaggatagagaaagacggccaccatgctgccactgggctcagagcccgccctgaatgagctgctgcttcgcaaggaggaggagtggagggcgctgcaggcacaccgcacccagctgcaggaggcggctctgcaggacacacggagccagctggaggaggcgcaggggaaactgcggtgcctgcaggaggactttgtctacaaccttcaggtgctggaggagcgggacctcgagctggagcgctatgacgccgccttcgcccaggccagggagtgggaagaggccaggcgggcagaggtgagcgagctcaagatagaggcagctaagctgaggcaggcgctagccagagaggccaggaaggtggaggagctgcagcagcagcagcagctggcattccaggagcatcgcctggagctggagcgcgtccacagtgacaagaatggtgagattgaccaccaccgggaacagtatgaaaatctaaaatggacactggagagaaaacttgaggagctcgacggtgagcttgctctgcagagacaggaactgctgctggagtttgaatcgaaaatgcggaagagggagcacgaattccgtctgcaggctgacaacatgagcaacacagccttgtcccgggagcttaaggttaaactactgcacaaagagctggaggctctgaaggaagccggggcaaaggctgcagagagtctgcagagggcagaggccaccaacgccgagctggagaggaagctccagagccgagccggggagctccaggacctggaggccatgagccgcgcccgggtaaaggatttagaggataaacttcactctgtgcagctaaccaggaagaaggaagaggaaacatttaagaggaagcatgaggagctcgaccgtctggccagggagaaggatgcagtgctggtggcggtgaagggagcccacgtggagcagctgcaggagctgcagaccagggttctggagctgcaggcccactgcgagaccctcgaggcgcagctccgcagggcagagtggagacaggctgacaccgccaaggagaaggacgctgccattgaccaacttcgtgaagatgcatcaactgtaaaatctgcctgggatgctcaaattgctcaactatctaaggagatggtctccagagaccttcagattcagacgctgcaggaagaagaggtgaagctcaaggcacaggtggcccgatcccagcaggacattgaaaggtacaagcaacagctgtccctggcagtggaaagggagcggagcctggagcgtgatcaggtgcagctgggcctggactggcagcgccgctgtgatgacattgaaagggaccagatccaaaagtcagaggccctgattcagggtctgagcatggcaaaaagtcaggttgctgccaagctgcaggagacagagcaggcgctacaggagcaggaggtggtgctgaaggccgtgaccctggaacgagaccaggccgtgcaggccctgaggatgcatgggctccccagaccaggggcacagatgcttctcaggcagcatgaagaagaaataagtaaagactttccatccagtgagatccagcggctccgagagcagaacacgagcttgcgaaacgcgattgcccagatgaggaaagaaatggaggctctaagccatcagattcctcctcccatccagacagcggcagagagcacagatgcaaaccagcctgacccagaggctgggggagatgccgccactcctgattatgttctggcccttgaagcagaaatacgaactctaaagcataagtttaaaactctggaaaagcatctagaagatgtgttggatcctttaaagatgtcctcacctcatgctgagtctcagcccagcgtccgcacctcgacagagacgactggagggtctgcccaagctggtcaagccggagggtctgtccaagctggtcaagcaggaggatctgtccaagctggcccagtatcctctggactggcactcaggaagctcggggacagagtgcagctcctaaacctgctggtgacacgactcagacagaaggtgctgcgggaacccctggagccggccgctctccagcgtgagcttccccgtgaggtggaccaggtacacctggaggttttggagctgcggaagcaggtggctgagctggggaagcatctcaggatagcccagcacgggggagcggagccttcaggcaggaagcagcccccagcctcggacgccgtggcccttgggagagaggtgggtgcccgctagctcctcctgccacccgccgaggttcctgccacagaaaccgtccttgcctgtgctctgccagcgttgctgtctgtatgccctgggagctcaggtgggacgagggctgcagtgaaggccgtgcctggaagtgggccctgctccaccccctctccccattcctccgccttcttcctccacacgcctcctcttctcctggtccttcaccttgatgccccgttggtggggggcgggacgggcccatcccagtcctcccttcagctaacagcatcttgtgttggaaacgca

SEQ ID NO: 121061 - DNA, 678 bp, Homo sapiens
  Payload ID: 3731
  Gene Symbol: CCDC57
  Gene Name: coiled-coil domain containing 57
  ENST ID: ENST00000392345
  CDS Start-End: 1-637
gggaaagcaccagccccgctcagcacaggtgggcagcagacttgacgccctgcaaggcccgaagacacaacacagcatccacacggtgacctgtaaatcacctcggcagaaagaagacaggtccccaaagccaccccaggctccccagcaccctgaggagcatggtcgccaatcccacagctcctcctcctttgccagtggcaccctccaggacatgtggaggttgctagacctgggatccagcccttctggtgtcacctcccagggtgactcaactccagggccccattcattctggaacctgcagaccaactccatccgcccatcctcacagtgtgccgagcgccaggtccagaagcacgcacctacctgggggcctcttcctcctttctggcgggggtccgctttggcccctgatgctaacctcgccccgtgtgccgtgcagctggagtcaaacggaggcgcagagacgccatggagggtgacaagccacacagcaggagctcccagctcctccagcagccgacaggaggcccgtcaagatgcaggcaggcattgccaccccagggatgaagacagcagcccaggcaaaggccaagaccacaggagcctcccggtctcatcctgcaaaagctaaaggctgccagaggccccccaagatccgtaactacaacatta

SEQ ID NO: 121062 - DNA, 2964 bp, Homo sapiens
  Payload ID: 3731
  Gene Symbol: CCDC57
  Gene Name: coiled-coil domain containing 57
  ENST ID: ENST00000392346
  CDS Start-End: 548-1606
cccaaggagtggaggagggccaagccacgctggcgggagctgtcctcctgggtcctgggcactgctagaggccacagccttctctctgctctccctgggccgccttcctgggtcctgggcactgctggaggccacagccttctctctgctctccctggggagctgctgtgctggttgggtgtcctcagattctccttgtgttcacttgaaagacacaaaggcatagatgaccagaaggcagggatggcggggaggaggcggagggctgtgagggcctgggagatctgggggccaccctggcctgggagatctgtgggcctttattctatttgtggaagagaaggaacccactgaagcactgggagcagcgactctttttgtctttcttttggaaggatgtcacccagtgacagccagcagtgcccaccctggaagagcaggtgaagaggctccttgggtgggcacccctggcgtcctcccatgagggcagcctcacaggggtgtctgcctgtgagttttgttacagggcctcaccaagagagggcctatggaggccgaggaccagggggagcttttcctgcacctccggtcagtggcacgtgccccccagaccttatctatgcaccgactccagagaaagctgaaggaggcagccagaaaaatcatcagcctccgcctggagaaagagcagctcatcgagatggggaacaggctccgtgcagagctgggccgacccgaaaggtggctgttgcaccacgccctccctcctgcccctgaggcccggaagccaggcgaggagcccaggaggcctttggatcgcagcccacctttgggacaggtgcagccccattttacatctcaggacgccaagagtgccgaggatgaggctccttccagacacttgggaaagcaccagccccgctcagcacaggtgggcagcagacttgacgccctgcaaggcccgaagacacaacacagcatccacacggtgacctgtaaatcacctcggcagaaagaagacaggtccccaaagccaccccaggctccccagcaccctgaggagcatggtcgccaatcccacagctcctcctcctttgccagtggcaccctccaggacatgtggaggttgctagacctgggatccagcccttctggtgtcacctcccagggtgactcaactccagaaatggggtctcactatgtcacccaggctggtctcgaactcctgggctcaagcagtcctgccgccttggcctcccaaagtgctgagatgacaggtgtgggccccacgcccagcctggcgtggagtggagcccttcacccaaacatgaaccaggaggcgagcttggtaaggagcacgtgggctccaggaatgcgagggggaatgaatggaggcagctcctcagtgtgcaaaaacatgcagcgcgggcctcactggtcaccatcacagcagccttgcagtgggatcaggacagtcctgctgtccaggaaggagaggaccctgctctcttgtttctcactacctgctcctgtcgttctagtcccattgctgctctcaggacaagctgtgactgagagagcaggtcacgctggtgacattttatgaggctggatgcacagccccacagcaccttgtcactgaagctacaggaatccaagaaccagtgctctggccaagaagggagcactggggtgccctgaatggcacggacaaccccagccccccgccttcactgattatcatgacctgtggcttctgaaaggacagggcagtcttggaactttctgagaaacagatggtcaagtagatgtctgttagctcttttcttgaaattgtagtgacgaaaccatgactgccacttaggaaagtaacttgtgttgaaataacttttagaacaaagtaaatacattaagaaataaccaaatcggcttactttctgataatatttattctatgcccacacaacggctggcactcacttctgcttctggccaggccgtagttacaaggaccagactttaatgttcctccatgaacaactagaaaactggacaaagtatatgaaacaactgtttgcagacattggacaactggtcaaacaagaccgagatccccaacaagaccgagaccctggacgagtccgagatcccggacaagaccgccacccttgttggaagggagacaggcaaggtgaaccctggggccctggccttctgcctgaaggccgtttctgggctgccggcacagggagggaagcagggcctgagcaaagctgagcacccttacggagctgagactgcactagggtctggggacacagaaggagccggcatttcagggcagaatcccgcaaggaggaaactgcagaaaagagctccagaaatctgcacagggttctcttgagtctgtactgaggaccagcctgtacatgtatagaagaaaactccacaaagccaggcaaagaggagaaaggagcatgtaaggtgaacaacttccagacctcgcacacggtcatgacatactgaagctccagccagggggatgggtccccagtgatcactgtggacattcagtggagactcaggaggagccacaccgtgggaacagggctgatgctgtctgcagtgaaggctcgtctagaacctgcctgagaaactgcagctacagaaatccaaggcctggcatggcggctcacgcctgtaatcccagaactttgggaagccgaggtgggcagatcacctgaggccaggagttcacaaccagcctggtcaacttggtaaaaccccgtctctactaaaaatacaaaaattagtcaggtgtggtggtgcatgcctgtaatcccaactactcaggaggctgaggcatgagaatcacttgaacctgggaagcagaggttgcagtgagccgagatcgcgccactgcactctagcctgagtgacagagcagactcctgtctcaaaaaa

SEQ ID NO: 121063 - DNA, 3000 bp, Homo sapiens; identical to SEQ ID NO: 121059
  Payload ID: 3731
  Gene Symbol: CCDC57
  Gene Name: coiled-coil domain containing 57
  Uniprot ID: Q2TAC2
  ENST ID: ENST00000392347
  CDS Start-End: 38-2788

SEQ ID NO: 121064 - DNA, 2829 bp, Homo sapiens
  Payload ID: 3731
  Gene Symbol: CCDC57
  Gene Name: coiled-coil domain containing 57
  ENST ID: ENST00000419322
  CDS Start-End: 1-1471
gcccagcgtccgcacctcgacagagacgactggagggtctgcccaagctggtcaagccggagggtctgtccaagctggtcaagcaggaggatctgtccaagctggcccagtatcctctggactggcactcaggaagctcggggacagagtgcagctcctaaacctgctggtgacacgactcagacagaaggtgctgcgggaacccctggagccggccgctctccagcgtgagcttccccgtgaggtggaccaggtacacctggaggttttggagctgcggaagcaggtggctgagctggggaagcatctcaggatagcccagcacgggggagcggagccttcaggcaggaagcagcccccagcctcggacgccgtggcccttgggagagagggcctcaccaagagagggcctatggaggccgaggaccagggggagcttttcctgcacctccggtcagtggcacgtgccccccagaccttatctatgcaccgactccagagaaagctgaaggaggcagccagaaaaatcatcagcctccgcctggagaaagagcagctcatcgagatggggaacaggctccgtgcagagctgggccgacccgaaaggtggctgttgcaccacgccctccctcctgcccctgaggcccggaagccaggcgaggagcccaggaggcctttggatcgcagcccacctttgggacaggtgcagccccattttacatctcaggacgccaagagtgccgaggatgaggctccttccagacacttgggaaagcaccagccccgctcagcacaggtgggcagcagacttgacgccctgcaaggcccgaagacacaacacagcatccacacggtgacctgtaaatcacctcggcagaaagaagacaggtccccaaagccaccccaggctccccagcaccctgaggagcatggtcgccaatcccacagctcctcctcctttgccagtggcaccctccaggacatgtggaggttgctagacctgggatccagcccttctggtgtcacctcccagggtgactcaactccagaaatggggtctcactatgtcacccaggctggtctcgaactcctgggctcaagcagtcctgccgccttggcctcccaaagtgctgagatgacaggtgtgggccccacgcccagcctggcgtggagtggagcccttcacccaaacatgaaccaggaggcgagcttggtaaggagcacgtgggctccaggaatgcgagggggaatgaatggaggcagctcctcagtgtgcaaaaacatgcagcgcgggcctcactggtcaccatcacagcagccttgcagtgggatcaggacagtcctgctgtccaggaaggagaggaccctgctctcttgtttctcactacctgctcctgtcgttctagtcccattgctgctctcaggacaagctgtgactgagagagcaggtcacgctggtgacattttatgaggctggatgcacagccccacagcaccttgtcactgaagctacaggaatccaagaaccagtgctctggccaagaagggagcactggggtgccctgaatggcacggacaaccccagccccccgccttcactgattatcatgacctgtggcttctgaaaggacagggcagtcttggaactttctgagaaacagatggtcaagtagatgtctgttagctcttttcttgaaattgtagtgacgaaaccatgactgccacttaggaaagtaacttgtgttgaaataacttttagaacaaagtaaatacattaagaaataaccaaatcggcttactttctgataatatttattctatgcccacacaacggctggcactcacttctgcttctggccaggccgtagttacaaggaccagactttaatgttcctccatgaacaactagaaaactggacaaagtatatgaaacaactgtttgcagacattggacaactggtcaaacaagaccgagatccccaacaagaccgagaccctggacgagtccgagatcccggacaagaccgccacccttgttggaagggagacaggcaaggtgaaccctggggccctggccttctgcctgaaggccgtttctgggctgccggcacagggagggaagcagggcctgagcaaagctgagcacccttacggagctgagactgcactagggtctggggacacagaaggagccggcatttcagggcagaatcccgcaaggaggaaactgcagaaaagagctccagaaatctgcacagggttctcttgagtctgtactgaggaccagcctgtacatgtatagaagaaaactccacaaagccaggcaaagaggagaaaggagcatgtaaggtgaacaacttccagacctcgcacacggtcatgacatactgaagctccagccagggggatgggtccccagtgatcactgtggacattcagtggagactcaggaggagccacaccgtgggaacagggctgatgctgtctgcagtgaaggctcgtctagaacctgcctgagaaactgcagctacagaaatccaaggcctggcatggcggctcacgcctgtaatcccagaactttgggaagccgaggtgggcagatcacctgaggccaggagttcacaaccagcctggtcaacttggtaaaaccccgtctctactaaaaatacaaaaattagtcaggtgtggtggtgcatgcctgtaatcccaactactcaggaggctgaggcatgagaatcacttgaacctgggaagcagaggttgcagtgagccgagatcgcgccactgcactctagcctgagtgacagagcagactcctgtctcaaaaaa

SEQ ID NO: 121065 - DNA, 491 bp, Homo sapiens
  Payload ID: 3731
  Gene Symbol: CCDC57
  Gene Name: coiled-coil domain containing 57
  ENST ID: ENST00000581625
  CDS Start-End: 1-106
tgacaagaatggtgagattgaccaccaccgggaacagtatgaaaatctaaaatggacactggagagaaaacttgaggagctcgacggaactgctgctggagtttgaatcgaaaatgcggaagagggagcacgaattccgtctgcaggctgacaacatgagcaacacagccttgtcccgggagcttaaggttaaactactgcacaaagagctggaggctctgaaggaagccggggcaaaggctgcagagagtctgcagagggcagaggccaccaacgccgagctggagaggaagctccagagccgagccggggagctccaggacctggaggccatgagccgcgcccgggtaaaggatttagaggataaacttcactctgtgcagctaaccaggaagaaggaagaggaaacatttaagaggaagcatgaggagctcgaccgtctggccagggagaaggatgcagtgctggtggcggtgaagggagcccacgtg

SEQ ID NO: 121066 - DNA, 188 bp, Homo sapiens
  Payload ID: 3731
  Gene Symbol: CCDC57
  Gene Name: coiled-coil domain containing 57
  ENST ID: ENST00000583053
  CDS Start-End: 1-136
agcagccgacaggaggcccgtcaagatgcaggcaggcattgccaccccagggatgaagacagcagcccaggcaaaggccaagaccacaggagcctcccgggcaggctcccaaatgctgctgaggcgaccctgctgactgaaggcctccctgagcacagggcccattaaaaccaggttcctccctgggg

SEQ ID NO: 121067 - DNA, 429 bp, Homo sapiens
  Payload ID: 3731
  Gene Symbol: CCDC57
  Gene Name: coiled-coil domain containing 57
  ENST ID: ENST00000583593
  CDS Start-End: 1-165
gaggagcatggtcgccaatcccacagctcctcctcctttgccagtggcaccctccaggacatgtggaggttgctagacctgggatccagcccttctggtgtcacctcccagggtgactcaactccagaacttcattctgtcctaaaggaagcagtcgcagcttaaagagtgtgagcacgcgcccactccccacagacacacccggcctgccccgccccacgctgcccctgccctggagaaagcgaggctccttcctttcctggagacgccggccacagttcttcagtgaaacgcttcactctctggtcatagagagctcccagctcctccagcagccgacaggaggcccgtcaagatgcaggcaggcattgccaccccagggatgaagacagcagcccaggcaaaggccaagaccacaggagcctcccg

SEQ ID NO: 121068 - DNA, 720 bp, Homo sapiens
  Payload ID: 3732
  Gene Symbol: CCDC58
  Gene Name: coiled-coil domain containing 58
  Uniprot ID: Q4VC31
  ENST ID: ENST00000291458
  CDS Start-End: 8-442
gtccaatatggcggcgcccagtggcggtgtgaactgtgaggagttcgccgagttccaggaattactcaaggtgatgaggacaattgatgacagaatagtacatgaattaaacactacggttccaacagcttcctttgcagggaaaattgatgccagccaaacctgtaaacaactttatgagtctttgatggcagctcatgccagtagagacagagtcataaaaaactgtatagcccagacttcagcagtagtaaaaaacctccgagaagagagagaaaagaatttggacgatttaacgttattaaaacaacttagaaaagagcagacaaagttgaaatggatgcagtcagaactgaatgttgaagaagtggtaaatgacaggagctggaaggtgtttaatgaacgctgccgaattcacttcaagcctccaaagaatgaataaagagagattcttttttttttttttttttttttttttttaaggactgggtcatctcataagagctaagcatgacagatatcaacagggcgggctttctaggatgatttctgagccaacagtccaagaccttttgttgatttcagccccacttagccaagacctcaagtataaataattctgataattatggagaaatcaactgctattttatactgattctgtaaaaaaaaaaaaaaaaaatttttgtaactattaaaataattttctgactcagtgta

SEQ ID NO: 121069 - DNA, 431 bp, Homo sapiens
  Payload ID: 3732
  Gene Symbol: CCDC58
  Gene Name: coiled-coil domain containing 58
  ENST ID: ENST00000479414
  CDS Start-End: 1-424
aaaggagttggtttcagtcatggatttaagtttggcaaaggaattactcaaggtgatgaggacaattgatgacagaatagtacatgaattaaacactacggttccaacagcttcctttgcagggaaaattgatgccagccaaacctgtaaacaactttatgagtctttgatggcagctcatgccagtagagacagagtcataaaaaactgtatagcccagacttcagcagtagtaaaaaacctccgagaagagagagaaaagaatttggacgatttaacgttattaaaacaacttagaaaagagcagacaaagttgaaatggatgcagtcagaactgaatgttgaagaagtggtaaatgacaggagctggaaggtgtttaatgaacgctgccgaattcacttcaagcctccaaagaatgaataaagagaga

SEQ ID NO: 121070 - DNA, 545 bp, Homo sapiens
  Payload ID: 3732
  Gene Symbol: CCDC58
  Gene Name: coiled-coil domain containing 58
  ENST ID: ENST00000479899
  CDS Start-End: 72-464
aatatggcggcgcccagtggcggtgtgaactgtgaggagttcgccgagttccaggtgatggggttttcctcatgtggcaggaattactcaaggtgatgaggacaattgatgacagaatagtacatgaattaaacactacggttccaacagcttcctttgcagggaaaattgatgccagccaaacctgtaaacaactttatgagtctttgatggcagctcatgccagtagagacagagtcataaaaaactgtatagcccagacttcagcagtagtaaaaaacctccgagaagagagagaaaagaatttggacgatttaacgttattaaaacaacttagaaaagagcagacaaagttgaaatggatgcagtcagaactgaatgttgaagaagtggtaaatgacaggagctggaaggtgtttaatgaacgctgccgaattcacttcaagcctccaaagaatgaataaagagagattcttttttttttttttttttttttttttttaaggactgggtcatctcataagagctaagcatgacagatatca

SEQ ID NO: 121071 - DNA, 438 bp, Homo sapiens
  Payload ID: 3732
  Gene Symbol: CCDC58
  Gene Name: coiled-coil domain containing 58
  ENST ID: ENST00000497726
  CDS Start-End: 8-169
gtccaatatggcggcgcccagtggcggtgtgaactgtgaggagttcgccgagttccagttgaaatggatgcagtcagaactgaatgttgaagaagtggtaaatgacaggagctggaaggtgtttaatgaacgctgccgaattcacttcaagcctccaaagaatgaataaagagagattcttttttttttttttttttttttttttttaaggactgggtcatctcataagagctaagcatgacagatatcaacagggcgggctttctaggatgatttctgagccaacagtccaagaccttttgttgatttcagccccacttagccaagacctcaagtataaataattctgataattatggagaaatcaactgctattttatactgattctgtaaaaaaaaaaaaaaaaaatttttgtaactattaaaataattttctga

SEQ ID NO: 121072 - DNA, 1983 bp, Homo sapiens
  Payload ID: 3733
  Gene Symbol: CCDC59
  Gene Name: coiled-coil domain containing 59
  Uniprot ID: Q9P031
  ENST ID: ENST00000256151
  CDS Start-End: 413-1138
ctgagggcagggcctccgtctccgacgctgacttcctcagcgcagccagcactgtctccggtggcaagtcgaccagctcctcccacacggattctgtgtagaaatccacggtatgtgcattggaaatggacagggcatccctcaggaactgcagcagtccctgcaacttggcacgcagcgtgggcaggtccggggtcaccgggagagggcaagaagccgccatgacgctcaccctccgaggctgtaggtggcgcaaacatggccgtgaggcgccagctcggcccaaattagcacaggcaggctcagtagagctccgagccggattccttctgagcgattgattgcttcggcttggtgacgtattttgtgggcgtccgtcgtggtcttctgatgacgcagttagtcggctgcaatggcgccggtgaggcggtccgcgaagtggcggcctggtggtattgaggcgcgtggtgaaggggtttccactgtcgggtacaggaataagaatgtgagacagaagacatggcggcctaaccacccgcaagccttcgtggggagcgttcgcgagggacaaggctttgcttttcgaagaaaactgaaaatacagcaaagttacaagaaattgctacggaaggaaaagaaggctcaaacgtcactggaatctcaattcacagatcgatacccagataatctgaaacatctctatttagctgaagaggaaagacataggaagcaagcaagaaaagtcgaccatcctttgtcagaacaagttcaccagccgttgcttgaagaacagtgtagcattgacgagcctttatttgaagatcagtgtagctttgaccagcctcagccagaagaacaatgtattaaaacagtaaactcctttacaattccaaagaaaaataaaaagaaaacatcaaatcaaaaagcacaagaagaatatgaacagatacaagccaaacgtgctgctaagaaacaagaattcgagaggagaaaacaggagagagaagaagcccaaaggcagtacaaaaagaagaaaatggaagtgtttaaaatactgaacaaaaagactaaaaagggccaaccaaacttgaatgtacaaatggagtaccttcttcaaaaaatacaagaaaaatgttaaacattttgttcctacaggttaaaatatctgctgcctattaggttcttctgtgacatgtgcctcccagcagtgaactaaatttgtcgacataaactggattgctaaactatgctaaatataagatgttcacatatttttattatggtaaaaaattttctaaatatgttctacatgtttcttatttatttgcctctgaaggaaggttggcctgaagaactgaaagaacctcttattttgcaagacaggcccaagcatgtaatacttttgtaccatatgagatttatatgaaataaattttttaaaaataaggaatcagagctatcaatgaagcatttcaatgaaatatttcaatttagtaaacagttacgttgttttaaaatttattttaatgatgagggaggcaaagactcctcttggactttttatttattttaagtacatgttacagggtgatgggtgctgaaataaactgccctcaccatataacaaagcgaccttcacaaagcagtgaactcaaagtctgatatttataaacattcccttaaatggatgtacatggcttgttagtctaaggtcttttaaataatgatggaaaccccacagtgtcacagcaagaattaagctttccagttcctatggaccctatactttaagaacattatctctgtctcccttgttggtacccttgtgagctgagataagccactgggataactgcttctcatgctttgcaaattgcagaagaatgagaaaggcttgaaatatatatatagtcattgtaagcaaaaagggctgaccaataatacttgccaaatattgaataataaaattttataaatgatagc

SEQ ID NO: 121073 - DNA, 563 bp, Homo sapiens
  Payload ID: 3733
  Gene Symbol: CCDC59
  Gene Name: coiled-coil domain containing 59
  ENST ID: ENST00000552377
  CDS Start-End: 21-563
gacgcagttagtcggctgcaatggcgccggtgaggcggtccgcgaagtggcggcctggtggtattgaggcgcgtggtgaaggggtttccactgtcgggtacaggaataagaatgtgagacagaagacatggcggcctaaccacccgcaagccttcgtggggagcgttcgcgagggacaaggctttgcttttcgaagaaaactgaaaatacagcaaagttacaagaaattgctacggaaggaaaagaaggctcaaacgtcactggaatctcaattcacagatcgatacccagataatctgaaacatctctatttagctgaagaggaaagacataggaagcaagcaagaaaagtcgaccatcctttgtcagaacaagttcaccagccgttgcttgaagaacagtgtagcattgacgagcctttatttgaagatcagtgtagctttgaccagcctcagccagaagaacaatgtattaaaacagtaaaatctgagtttctgacctgtacattttcattctctctgaggaatgtctttcaacatttcttgcaagtctttgggaaccag

SEQ ID NO: 121074 - DNA, 5811 bp, Homo sapiens
  Payload ID: 3734
  Gene Symbol: CCDC6
  Gene Name: coiled-coil domain containing 6
  Uniprot ID: Q16204
  ENST ID: ENST00000263102
  CDS Start-End: 233-1657
agtgcaatactgcccaagcccgggcggggtctctgttctctggcagaggaggtcccttggcagcgggaagcgccctctctttctctcgccgccgctccgagtctgcgccctggtgccaggcgctcagctcggcgctcccctgtgctcgcccggcgcccactcattcgcagcccggccttcgtcgccgccgcctccctgctgctcctcctcctttccccagcccgccgcggccatggcggacagcgccagcgagagcgacacggacggggcggggggcaacagcagcagctcggccgccatgcagtcgtcctgctcgtcgacctcgggcggcggcggtggcggcgggggaggcggcggcggtgggaagtcggggggcattgtcatctcgccgttccgcctggaggagctcaccaaccgcctggcctcgctgcagcaagagaacaaggtgctgaagatagagctggagacctacaaactgaagtgcaaggcactgcaggaggagaaccgcgacctgcgcaaagccagcgtgaccatccaagccagggctgagcaggaagaagaattcattagtaacactttattcaagaaaattcaggctttgcagaaggagaaagaaacccttgctgtaaattatgagaaagaagaagaattcctcactaatgagctctccagaaaattgatgcagttgcagcatgagaaagccgaactagaacagcatcttgaacaagagcaggaatttcaggtcaacaaactgatgaagaaaattaaaaaactggagaatgacaccatttctaagcaacttacattagaacagttgagacgggagaagattgaccttgaaaatacattggaacaagaacaagaagcactagttaatcgcctctggaaaaggatggataagcttgaagctgaaaagcgaatcctgcaggaaaaattagaccagcccgtctctgctccaccatcgcctagagatatctccatggagattgattctccagaaaatatgatgcgtcacatcaggtttttaaagaatgaagtggaacggctgaagaagcaactgagagctgctcagttacagcattcagagaaaatggcacagtatctggaggaggaacgtcacatgagagaagagaacttgaggctccagaggaagctgcagagggagatggagagaagagaagccctctgtcgacagctctccgagagtgagtccagcttagaaatggacgacgaaaggtattttaatgagatgtctgcacaaggattaagacctcgcactgtgtccagcccgatcccttacacaccttctccgagttcaagcaggcctatatcacctggtctatcatatgcaagtcacacggttggtttcacgccaccaacttcactgactagagctggaatgtcttattacaattccccgggtcttcacgtgcagcacatgggaacatcccatggtatcacaaggccttcaccacggagaagcaacagtcctgacaaattcaaacggcccacgccgcctccatctcccaacacacagaccccagtccagccacctccgcctccacctccgccacccatgcagcccacggtcccctcagcagccacctcgcagcctactccttcgcaacattcggcgcacccctcctcccagccttaatgcatgagcttagtctgaatttcaagttgggactcatccaatggagccgtctactcaacgccaaaggcttccttctctggcatatttggatatgacttatttgcactgaggttatctaggcttcactatccattgtgttgtaaatgtttgtcagaaatgcagccagtgttgtgggtctacaacactaaccagacgactttttccatcagtgttttacttgaatcttcatgtacgtccattccctggctggaaccttcgctgtttggtatttggtatttcagcagcagtgtgcaatttttgcttggcccagagcttcattctcctggcttttaggtttgtaaaagaaaaagggatatcttttttatatttttttccatgaatctgcagaaaattactgagctgttgttaccctcctctcattataatagtgtttaccaaacataccaataattcagcactacaattcagacctttgaaaatctggctttcagtgtagaacagaaagttagatgaatcagtgcccaagacatattttctgtttaacagaactttctacagatacattttttacaggttattttcattgtgttattgacatccatgtctctcgtaaaacagatggcccaaagtaatgaatcatgtggctgtaccttctccacataaatgggatggataattatcgtatattaagatgtgattctcttttttatccttaatgttaatctacttaacctggccccctctaacatgagtcgataaatgttgtcctactcaccggtggtttcaatggctaattagaatgtgttatttgatttctgctgcagaaggcagtgtgattgtaacaaaaacaatgcggcttccccctttcgtacttcatttgtgttctcttaaaatagagtttgaacaaatattttaaaggtgcaaaataccattagaaaatactatttgaaatggacattatcgcattatcttggcataatggccagaaaatattgtattgcttggcagaaaagaaaataaggtctaaaggaaagtagcacattagcattgatggctgttcatttcacccagtataagcaagtgcagtgtacaaagaagtatattctgaatacattatttccattcatttagcacaaataaatcatttggtttcactttgcagtggaacactgagtcactcttttcttaacacgtgcaacatcttaatttttgtttttcagcagttgctgttttgtactttggtagtaaagtgatttttaccacctgtgtttgcatatttatatatgctgtggatgaaaataacttactagagaatgtatattttatgacaagaatgtgtatctgttggatataatcagagaactgaaaagtaatttatcagtaatttttaagagtccatgttttgtgacaaccatctctaatagccaactctttattaaacacactcctaaaaataaggaaccatgacattgtagatatttaatattgtacagtatagaaacctccatttttgccttcgaatgcatatttaagagttaacagaatgaaaaaaaaaagtcttgttggataatagtgtttgactagcgttttaagaacttgagagtaaaagcaacaataagattttttcacctcttcctgcttccacccccaaactgagaacatcactcaattgtttggaagaaactgtaggtctatataaattttatttataatgtatgtgtaatatacataatcataatacagttctcagatgcagggaagaagtttggcatttaatcattgaggctttaggtttttgatgtgatcagactgggccatgtcaaacccggaattttcaccaacagttcactcaccctcctggtacattgccattccaaggaattctgagagtaggcaaacaaattttgccttcatggtacagttctcagtttttcttataggagaaatatggtatatgtttataagaatcttttatgagattatagatttcaatgctgtggatagtgtcttgcacccaaacaagaaagtccataatggaatgatcttccctcagcttcctatcgatttagttacctcttgaaagcacaaaaattaaaacattgccatatgttgaatttttaaaaagcacttggagtgagcgaacatttcctgataaatgccttttagagataggttcttgatattcagacatctgcagaaatgttctggttcccaaagtcatttcacttcgaaataaaacacagctccttcaaacagcactttttccacataaatctagttgcctctccctgtggacattcagaactgatagaacaaacactactcttttgaatttgatggttcgtgtcctttaaagtgtttgaggacctatgcagagcctgtaacacttgggtagtacctgctaggacaatttcttggcaattgtcttactactagggatcagtaagatttagattctgagcccataatggcaacagccccctcacctatgggaagctgacttccctcagtcgggcacttctcatgggggctgaacatggttcctgccattctgttacccactctcccaggtgagccctggattggctcccagaaggcctttgtaaaatcagtagccgtcctgcaggcaggtgggagcaacaggggcttcagtagcttcattttcctgtcttgcagacagagacccttggctaccactgtgctgctaataggataagtactctgttgccagattaccatgccttttatacaaaaccaaattaacttacctaatacctgacacctctttgggctctgaactgctttctctcatcaagcatgctagcactctagacagaattctagaaatttggcagatagtggaagcctttaattgaacttactccttcgttgactgaaaggagttttaaattctgagctcctgagatactgactagcaaccatggaatgaatgtgtgaccagaaagtggctttgacaccaagtgctactgtccctttgtaattggcttctaacagaattcaaccagaaataattgataatgtgaatttttgttaattgttcacttgtaggaaaatagaacatgtatcaccctttgttaggtagacatgaacttttcctgcacaaagccttgcttttagagaatgcccaataaggcaagaaaaagcatagtaacttgtgctttgagagctcaatatttgtatcttatcagtacagaagaaatatttctgtgtaacttgatcttctgtctagtacttgtcttataggtaaccaacactgaaaactttgtagtgatgactaccaaagaaatacatagtaaaacaaccttttatttccaaattgttaaagagccagccattgatgctgctacatgagttccatgctcaagagccattgtaagagattaaggggtttctaggtttttggtgattttttgtttgtttttttctttgttttttagggtttttttttcttctttaattttttgattaaaacatacacacagctgttagcataaagtcgtggggggcattttctggaatgctcagcagttctgattaactgccaagcccaggttgcctctcatgaggcaactgaaaaaatcctgtgtcttgatagcatgggtgctgtgtgtgtgcatgtgtgtgtctgcattcatgccttaactcgggttactgcacaactttagttcttgacttagtctgcaccgtcatctagattgtattgtacatctcggtctgaacttcatcctggcaaaaacaaagttgcaggcacaacagtttaagaatgcattcctccagaagagtatctggtcaggttgacccctgagccttctttggacttgatttggaacttagcctggaaagcgaaagtggactgtccaacagaaagatgtcaacaaggaaaagaggagagccaagcgctagcatgccttttgcctctgcatatctgtgcacactgtatgttgttcatgatagcttgtctacaacttgactaggttggagttctggtaatagtggcaatcttgacattcttggtcagagtttagagagatgtaagactttcaattaatgtcttatttactcctttatgttgattagtctttgatacatgtgctgaatcagaaacctaaataaagataattttttaaaatgta

SEQ ID NO: 121075 - DNA, 2450 bp, Homo sapiens
  Payload ID: 3735
  Gene Symbol: CCDC60
  Gene Name: coiled-coil domain containing 60
  Uniprot ID: Q8IWA6
  ENST ID: ENST00000327554
  CDS Start-End: 466-2118
agttgcctactttccccgcagtgcgataaacccctcgttggggccgccttagttctcggccgctctcggaggatggcgatctgggagcccctccatgggacccctctcacactttgtcactggaattttatttattttttagttcatattttattttgcttatagaagagaaagatatcccttccgaagaggaggaagcttacagaagtttataacctttcaaaaagtaaataagtccaggcttgcctgattctgccctacccggacttccttatcccgtctgtgggagacccaggtgctttctcattactcttcagaaggaaaccgctttggagttcgtgtaattgggacttggggatcagggagaagttgccgaaacttctcataccagtaactactgaagtagaagattctggaaaaatccttgtcttgggggcacaggctaaaacctgaaggatttttaagatgaccaaggttccagccaccaagaagcttcagagttcccccaactcgggggctgtccggcccttttatgcctcggagaacctaaggcaggtcccagacaagccaatgaagagcatcaagtatatggacaaggaaataataaacctcaaaaaggaccttatacgaagccgctttttgatccagtctgtgaagataggccgtggatattttgctattctgagggaagagactgcaaagaaaaagaagcaacaacaacttcagaaactgaaagaggaggaaagaaataaattccagccagccgaaaagatctcagaaatccactatggggacaccttattgagcacatatgatgatgagaagttgaagacactgggagctagagtcacacgtcgcccattcactcccatccacagctgcatcatttctccctcgctaaccgaggctcacgtcgagcccctcttccgccagctctgtgctctccactggcttctggaggccctgactattgaccacacccaccacaccatgaagcctgtgatcacctgctggaacccaaaggacccgggtggaagcaagagcaccattaaaaaaatcaataaggacaagtccatgggacagaaatgggagcatttcatcacagcgccaaagaccaagaaattcaaaattcccacaatgcgagtcaccaaccgcaaaccaagccggcgaggctccacactcagtctgagtcgggccagtggggggtcctctccccagagcagcatgatctctgtgaaccctggctcggatgagcccccaagtgtgaacacccaggtgaccagcagcaaggacattgaggacaatgagtcatcttcaaccaagccagatgaagaacctctgtatatgaatctgcagaagctcctggagatggttcgggaagatgcccggaggacagtcacaatagaaaatgggatgcaaagaaaagcacccagcatcttgtcagtgctgaaacaaaacaagagtaattctgcttataaggaaatgcagaccactctcaaatcaagtgagagatccagcagtacaagtgcagaaagccacatccaaccagtccagaagaagtctaaaaaccgcactaattgtgacatcaacatccactacaagagtggggtgtgtaacaccatgagggccaagttttacagcgtagcccaggaggctggcttctgcctgcaggacaagatggaaatcctcatgaagcgccaagaagagagaggtatccagaagttccgtgcttttgtccttgtctcaaattttcaaaaggacatagcaaaaatgagacatcacatatctgtagtaaaaggagatgcagaagaaattgcagaccactggtactttgatctgttgtccaaactgccagaggatctaaagaacttccgccccgccaaaaagatcctggtgaaactgcagaagtttggagaaaacctggacttgcggattcgaccccatgtcctcctgaaggtgctgcaggatctgaggatttgggaactgtgctcccctgacatcgctgtggctattgagtttgtgcgagaacacatcatccatatgcctcaagaggattacatcagctggctgcagagccggatcaacatacccattgggccctacagcgccctgaggtaggctgggcctgggttgaccagctgtctcagtggaggagtgtttgcctatatcatgttcctgtatcctgcctgtgttcctgcctcctgactaccctcatggatgctctttatggatgaccctttacagtagggtcatctggagactgacttccagcaacatttttagagggggatggccccggtggccctcccctcaattccacaccccagacccaacctaccagtctctgttcttcaatgatccagcctgactctacctacttcctcttcagattccttcaccctatttaccttcctcaagtactggagaataaaattgaactgaatgtttga

SEQ ID NO: 121076 - DNA, 581 bp, Homo sapiens
  Payload ID: 3735
  Gene Symbol: CCDC60
  Gene Name: coiled-coil domain containing 60
  ENST ID: ENST00000539847
  CDS Start-End: 249-422
tttcaaaaagtaaataagtccaggcttgcctgattctgccctacccggacttccttatcccgtctgtgggagacccaggtgctttctcattactcttcagaaggaaaccgctttggagttcgtgtaattgggacttggggatcagggagaagttgccgaaacttctcataccagtaactactgaagtagaagattctggaaaaatccttgtcttgggggcacaggctaaaacctgaaggatttttaagatgaccaaggttccagccaccaagaagcttcagagttcccccaactcgggggctgtccggcccttttatgcctcggagaacctaaggcaggtcccagacaagccaatgaagagcatcaagtatatggacaaggaaataataaacctcaaaaaggaccttatacgaagccggtgagtgagcccagcagggaatgatccatagacaacccaacaggcatgagcaggctatggggtgttgcctacaagtccttgcccagtcccagcatcccccaattctgaacactaagcagaagacttacaggagggtaaccctgggaggagcagagggcaggat

SEQ ID NO: 121077 - DNA, 886 bp, Homo sapiens
  Payload ID: 3735
  Gene Symbol: CCDC60
  Gene Name: coiled-coil domain containing 60
  ENST ID: ENST00000536742
  CDS Start-End: 466-867
agttgcctactttccccgcagtgcgataaacccctcgttggggccgccttagttctcggccgctctcggaggatggcgatctgggagcccctccatgggacccctctcacactttgtcactggaattttatttattttttagttcatattttattttgcttatagaagagaaagatatcccttccgaagaggaggaagcttacagaagtttataacctttcaaaaagtaaataagtccaggcttgcctgattctgccctacccggacttccttatcccgtctgtgggagacccaggtgctttctcattactcttcagaaggaaaccgctttggagttcgtgtaattgggacttggggatcagggagaagttgccgaaacttctcataccagtaactactgaagtagaagattctggaaaaatccttgtcttgggggcacaggctaaaacctgaaggatttttaagatgaccaaggttccagccaccaagaagcttcagagttcccccaactcgggggctgtccggcccttttatgcctcggagaacctaaggcaggtcccagacaagccaatgaagagcatcaagtatatggacaaggaaataataaacctcaaaaaggaccttatacgaagccgcctctcccactgccggacacaaaggagaatggggaaaaggccaaacagagaagccacaagcaagcaagaaagaaacgacaatgagatgttccatctggccacacttctggatcccaccaacattaaggaaggaatcaggattccccttcagaaggaaacaccatgttttccaagggaagtcatctctccaagtggcacaaactccctgaccccatatcccagtattaaatgaggcgaattgttaacaaaga

SEQ ID NO: 121078 - DNA, 1282 bp, Homo sapiens
  Payload ID: 3736
  Gene Symbol: CCDC61
  Gene Name: coiled-coil domain containing 61
  Uniprot ID: Q9Y6R9
  ENST ID: ENST00000536603
  CDS Start-End: 56-1054
ttcgtcagttgaaccgctcgcgaggagggttgctagtggagaagcaaccttggccatggaccagccggctggcctgcaggtggactacgtcttccggggtgtggagcatgccgtgcgggtgatggtttctgggcaggtgctggagctggaggtggaggaccggatgacggctgaccagtggcggggcgagttcgatgctggcttcattgaagatttgactcacaagacagggaacttcaaacagttcaacatcttctgtcatatgctggagtcagccctcactcagagtagtgagtcagtcaccctggacctgctgacctacacagacctggagtccctgcggaaccgcaagatggggggccgcccaggctccttggcccccaggtcggcccagctcaactccaagcgctacctgatcctcatctactccgtggagtttgacaggattcactacccgctgcccctcccgtaccagggcaagccagaccccgtggttctgcagggcatcatccggtcactgaaggaggaactgggccgcctgcaagggctggatggccagaacactcgggacacccgggagaatgagatctggcatctgcgggagcagcagcagcagcggaaccgcttaggcagtgggggaagcggggacggtccgtccgtctcctggtctcgccagacccagccccctgctgccttgactggccgaggggacgcccctaaccgctcccgaaaccgcagctcctcagtggacagtttccgcagccgctgctcgtctgccagctcctgcagcgatttggaggatttctctgagtcgctctccagagggggtcaccgccgccgtgggaagcctcccagcccaacgccctggagtgggtccaatatgaagtctccccccgtggaacgcagccaccatcagaaatctctggccaactccgggggctgggtccccatcaaagagtacagctcggagcaccaggcggctgacatggccgaaatagacgcacgcctgaaggccttgcaggagtacatgaaccgactggacatgcggtcataacgtggagaaggggtactacccctccatcccccacccacttgctgggtatggtgtggggggtggggccagggtggcctccagccctgcccagtccctgccctggccccgtccctcctgctgcccctggggtctcaggtgtgtgaggccctgaccctgccctctccccaggcagtgcatgctgggagggaggatgtgtgcattttgtaaataaacatatttgccctgggg

SEQ ID NO: 121079 - DNA, 1017 bp, Homo sapiens
  Payload ID: 3736
  Gene Symbol: CCDC61
  Gene Name: coiled-coil domain containing 61
  Uniprot ID: Q9Y6R9
  ENST ID: ENST00000594087
  CDS Start-End: 14-1012
agcaaccttggccatggaccagccggctggcctgcaggtggactacgtcttccggggtgtggagcatgccgtgcgggtgatggtttctgggcaggtgctggagctggaggtggaggaccggatgacggctgaccagtggcggggcgagttcgatgctggcttcattgaagatttgactcacaagacagggaacttcaaacagttcaacatcttctgtcatatgctggagtcagccctcactcagagtagtgagtcagtcaccctggacctgctgacctacacagacctggagtccctgcggaaccgcaagatggggggccgcccaggctccttggcccccaggtcggcccagctcaactccaagcgctacctgatcctcatctactccgtggagtttgacaggattcactacccgctgcccctcccgtaccagggcaagccagaccccgtggttctgcagggcatcatccggtcactgaaggaggaactgggccgcctgcaagggctggatggccagaacactcgggacacccgggagaatgagatctggcatctgcgggagcagcagcagcagcggaaccgcttaggcagtgggggaagcggggacggtccgtccgtctcctggtctcgccagacccagccccctgctgccttgactggccgaggggacgcccctaaccgctcccgaaaccgcagctcctcagtggacagtttccgcagccgctgctcgtctgccagctcctgcagcgatttggaggatttctctgagtcgctctccagagggggtcaccgccgccgtgggaagcctcccagcccaacgccctggagtgggtccaatatgaagtctccccccgtggaacgcagccaccatcagaaatctctggccaactccgggggctgggtccccatcaaagagtacagctcggagcaccaggcggctgacatggccgaaatagacgcacgcctgaaggccttgcaggagtacatgaaccgactggacatgcggtcataacgtgg

SEQ ID NO: 121080 - DNA, 800 bp, Homo sapiens
  Payload ID: 3736
  Gene Symbol: CCDC61
  Gene Name: coiled-coil domain containing 61
  ENST ID: ENST00000596687
  CDS Start-End: 38-187
cgcgaggagggttgctagtggagaagcaaccttggccatggaccagccggctggcctgcaggtggactacgtcttccggggtgtggagcatgccgtgcgggtgatggtttctgggcaggtgctggagctggaggtggaggaccggatgacggctgaccagtggcggggcgagttcgatgctggctagtagtgagtcagtcaccctggacctgctgacctacacagacctggagtccctgcggaaccgcaagatggggggccgcccaggctccttggcccccaggtcggcccagctcaactccaagcgctacctgatcctcatctactccgtggagtttgacaggattcactacccgctgcccctcccgtaccagggcaagccagaccccgtggttctgcagggcatcatccggtcactgaaggaggaactgggccgcctgcaagggctggatggccagaacactcgggacacccgggagaatgagatctggcatctgcgggagcaggtgtcgcgcctggcgtccgagaagcgggagctggaggcgcagctgggccgatcgcgcgaggaggcgctggccgggcgcgcggcacgccaggaggccgaggcgctgcgcgggctggtgcgcgggctggagctggagctgcggcaggagcgcggcctcgggcacagggtggccggccgtcgcggccaggactgccgccgtctggccaaggagctcgaggaggcgaaggcatcggagcggagcctgcgcgcccggctgaagacgctgaccagcgagctggcattgtacaagaggggg

SEQ ID NO: 121081 - DNA, 433 bp, Homo sapiens
  Payload ID: 3736
  Gene Symbol: CCDC61
  Gene Name: coiled-coil domain containing 61
  ENST ID: ENST00000594672
  CDS Start-End: 203-433
gaaccgctcgcgaggagggttgctagtggagaagcctggatctctgccctgaactccagactcatatcatggccgactcttctctctttggaagttcatctgacattcagacataaacttgtcccaaaccaatcttgcgatttcttcctttcaacctccaaacccagttgatgggacattcatcctgccagcaaccttggccatggaccagccggctggcctgcaggtggactacgtcttccggggtgtggagcatgccgtgcgggtgatggtttctgggcaggtgctggagctggaggtggaggaccggatgacggctgaccagtggcggggcgagttcgatgctggcttcattgaagatttgactcacaagacagggaacttcaaacagttcaacatcttctgtcatatgctggagtcagccctcactcag

SEQ ID NO: 121082 - DNA, 1817 bp, Homo sapiens
  Payload ID: 3736
  Gene Symbol: CCDC61
  Gene Name: coiled-coil domain containing 61
  Uniprot ID: Q9Y6R9
  ENST ID: ENST00000595358
  CDS Start-End: 50-1588
agttgaaccgctcgcgaggagggttgctagtggagaagcaaccttggccatggaccagccggctggcctgcaggtggactacgtcttccggggtgtggagcatgccgtgcgggtgatggtttctgggcaggtgctggagctggaggtggaggaccggatgacggctgaccagtggcggggcgagttcgatgctggcttcattgaagatttgactcacaagacagggaacttcaaacagttcaacatcttctgtcatatgctggagtcagccctcactcagagtagtgagtcagtcaccctggacctgctgacctacacagacctggagtccctgcggaaccgcaagatggggggccgcccaggctccttggcccccaggtcggcccagctcaactccaagcgctacctgatcctcatctactccgtggagtttgacaggattcactacccgctgcccctcccgtaccagggcaagccagaccccgtggttctgcagggcatcatccggtcactgaaggaggaactgggccgcctgcaagggctggatggccagaacactcgggacacccgggagaatgagatctggcatctgcgggagcaggtgtcgcgcctggcgtccgagaagcgggagctggaggcgcagctgggccgatcgcgcgaggaggcgctggccgggcgcgcggcacgccaggaggccgaggcgctgcgcgggctggtgcgcgggctggagctggagctgcggcaggagcgcggcctcgggcacagggtggccggccgtcgcggccaggactgccgccgtctggccaaggagctcgaggaggcgaaggcatcggagcggagcctgcgcgcccggctgaagacgctgaccagcgagctggcattgtacaagagggggaggcggactccgccggtgcagccgcccccgacgcgggaggaccgggcctcatcgtcccgggagcgctccgcgtcgcgaggccgcggcgccgcgcgctcctcatcccgggagagcggccgcgggagccggggtcggggccgccctgcgcgcccctcgccctcgcccacaggtggtcgcgcgctccgcttcgaccccacggcctttgtgaaagccaaggaaaggaagcagagagagatccagatgaagcagcagcagcggaaccgcttaggcagtgggggaagcggggacggtccgtccgtctcctggtctcgccagacccagccccctgctgccttgactggccgaggggacgcccctaaccgctcccgaaaccgcagctcctcagtggacagtttccgcagccgctgctcgtctgccagctcctgcagcgatttggaggatttctctgagtcgctctccagagggggtcaccgccgccgtgggaagcctcccagcccaacgccctggagtgggtccaatatgaagtctccccccgtggaacgcagccaccatcagaaatctctggccaactccgggggctgggtccccatcaaagagtacagctcggagcaccaggcggctgacatggccgaaatagacgcacgcctgaaggccttgcaggagtacatgaaccgactggacatgcggtcataacgtggagaaggggtactacccctccatcccccacccacttgctgggtatggtgtggggggtggggccagggtggcctccagccctgcccagtccctgccctggccccgtccctcctgctgcccctggggtctcaggtgtgtgaggccctgaccctgccctctccccaggcagtgcatgctgggagggaggatgtgtgcattttgtaaataaacatatttgccctgggga

SEQ ID NO: 121083 - DNA, 3546 bp, Homo sapiens
  Payload ID: 3737
  Gene Symbol: CCDC62
  Gene Name: coiled-coil domain containing 62
  Uniprot ID: Q6P9F0
  ENST ID: ENST00000253079
  CDS Start-End: 345-2399
gccggttctttcaggccttccagcgccggagcctcgggcgtgggcaaaaagcgtccatacgcagcctgagccacttgggagcccccagtttccgaggcagaagaacagtgcccaccagcgcagcggggctgcggcccggaaaccctggcggggagccccgagccccggcgggcgcacgccgcgtgggcaccaggcaggcggttggagtacggggcgggggtcggccgagggcgcggggccccggggctccgggctcgcccccgccgctcggggcaggcgcgccgatggcgtttctgaggtgacgccgcccacaccgggcttctccgggggcggaggaaacacctatgaaccctccggcagccttccttgccgggcgccagaacatcgggtcagaagttgagatttccactatcgagaaacaacggaaggagctgcagttgctcattggagaattaaaagatcgagataaagagctcaatgacatggttgcagtgcaccagcaacagcttctttcatgggaagaggatcggcagaaagtgttgacactggaagaacgttgcagcaaattagaaggtgaactacataaaagaactgaaataatcaggtcactcacgaagaaggtaaaagctcttgaatccaatcaaatggaatgccaaacagctctccaaaagacccaactacagcttcaggaaatggctcaaaaggcaacgcattcttctcttctctctgaagaccttgaggctagaaacgaaactctcagcaacacgttagtggaactttctgcccaggtaggacagctacaagctcgagaacaagctcttacgacaatgataaagctaaaggacaaagatattattgaggcagttaatcacattgcagattgttcgggtaaatttaaaatgctagagcatgccctacgtgatgccaagatggcggagacttgtattgtgaaagaaaagcaagattataagcagaaattgaaggcacttaagattgaagtcaacaaactaaaagaggacctcaatgaaaagacgacagaaaataatgagcaacgagaagagatcattcgcctcaagcaagagaaaagttgcctgcacgatgaattgctttttactgtagagagagaaaagaggaaagatgaattgcttaatattgcgaagtcaaagcaagaacgcacaaattcagaactgcacaatctgagacagatttatgtaaaacaacagagtgatctgcagtttcttaatttcaatgtggaaaattctcaggaattaatacagatgtatgactcaaagatggaggaatcaaaggctctggactccagcagagacatgtgtttatcagaccttgaaaataaccacccaaaagtcgatattaagagggaaaaaaatcagaagtcactgtttaaggaccagaaatttgaagccatgttggttcagcaaaataggtcagacaagagctcttgcgatgaatgcaaagagaagaaacaacagatcgatactgtgtttggggagaaaagtgtaattacgctgtcatccatattcaccaaagacttagtagagaaacacaacctcccttggtctctgggaggaaaaacccagattgaacccgaaaacaaaattacattgtgcaagatccacacaaaatcaccaaaatgtcatggcactggggttcagaacgaaggaaaacaaccctcagaaacacccactttatctgatgagaagcagtggcatgatgtcagtgtttacctgggcctgaccaactgtccaagttcaaaacatccagaaaagctggatgtagaatgtcaagatcagatggaaaggtccgaaatctcatgctgccagaaaaatgaagcctgtctgggcgaaagtggcatgtgtgactccaagtgctgccacccgagtaacttcataattgaagccccaggccacatgtctgacgtggagtggatgagtattttcaagccttccaaaatgcagagaattgtccgcctcaaatctgggtgcacctgttcagaaagcatctgtggcacacaacatgactccccggcaagtgagctaattgccatccaagattcccactctttgggttcttcaaaatctgccttgagagaagatgagacggagtcctcttccaataaaaagaactcacctacgagtttgttaatctacaaagatgcaccagcattcaatgaaaaggcttcaattgtgttaccctcccaggatgatttctcgcccacgagcaagctccagcgtttgctggcggaatctcgtcagatggtgacggacctggagctgagcacactgctgcccatcagccatgagaatctcactggcagtgccacaaataagtcagaggtcccagaagagtcagctcaaaaaaatacctttgtcagttattgaaggaaacaaaaggcaacttcagtattcatcgtgatcacgaatttctcatctatgtggaaggcagaaagcagacaccaatactgaatgaatacttaaccgtaaaactgaaagaggattctagttcttcataaacggcacttaattccagctgggagcagaactagaaagttaatttttaaacatctacacttcattttcaagttaaccatttttgtgctgaagaaatattttcatgtgtaagaaagtagaccttattgtacatatagaaagttggaattatgctaagaatgaaaaagacttctctgtaaagatacggactacagttaaatgctagagaagctctttaaaaatgtgaatgtcaaatagagaaagaaccctgcatagaaagtgctgttttaactatctgatttttaaaaaatctgtgcatacatttaaattctaaacaatagcttatcagagtcagctcaaaatatatgagaaacagtattctctcatggttttagcttttgactttgctgtgtaaatagacataaggtgctttgatataaaatataaaatgtaactggaaaatagctcgaggtccttctgtcccaagctgagcagagccccatctttctgggtctatattagtcccacctactgacacaaacaaaagcttgctggaagatcgagttttagacgcatttttaaaaatcttaaagactaaaacacttccattttaacttgtaaagtaatttaattttttaaagattatactatatgcctctgtgtcttctctaaaagaatagatcaacttcagtccataaaagatatttttaatattaaagaaaaaatatgtttccttggtttctttttattttacaggagtaaaataaggaaggaacgttcatcactttaaactgaacctggcaagttaatttcctcaggaatggggatgtatttttttaagcattgcagatatcaaagttctattgtgctgaataaatgcccctttgttaacaggtctcagtgttacttcagagatgattttcatgagcggggaagagccacctcatttagcctttttaattagggtgctgaaaagagaagttgggtgaggtttggttatgttctttatcaatgcgtgctttctccctcaggctgggct

SEQ ID NO: 121084 - DNA, 2479 bp, Homo sapiens
  Payload ID: 3737
  Gene Symbol: CCDC62
  Gene Name: coiled-coil domain containing 62
  Uniprot ID: Q6P9F0
  ENST ID: ENST00000341952
  CDS Start-End: 144-2192
ttggagtacggggcgggggtcggccgagggcgcggggccccggggctccgggctcgcccccgccgctcggggcaggcgcgccgatggcgtttctgaggtgacgccgcccacaccgggcttctccgggggcggaggaaacacctatgaaccctccggcagccttccttgccgggcgccagaacatcgggtcagaagttgagatttccactatcgagaaacaacggaaggagctgcagttgctcattggagaattaaaagatcgagataaagagctcaatgacatggttgcagtgcaccagcaacagcttctttcatgggaagaggatcggcagaaagtgttgacactggaagaacgttgcagcaaattagaaggtgaactacataaaagaactgaaataatcaggtcactcacgaagaaggtaaaagctcttgaatccaatcaaatggaatgccaaacagctctccaaaagacccaactacagcttcaggaaatggctcaaaaggcaacgcattcttctcttctctctgaagaccttgaggctagaaacgaaactctcagcaacacgttagtggaactttctgcccaggtaggacagctacaagctcgagaacaagctcttacgacaatgataaagctaaaggacaaagatattattgaggcagttaatcacattgcagattgttcgggtaaatttaaaatgctagagcatgccctacgtgatgccaagatggcggagacttgtattgtgaaagaaaagcaagattataagcagaaattgaaggcacttaagattgaagtcaacaaactaaaagaggacctcaatgaaaagacgacagaaaataatgagcaacgagaagagatcattcgcctcaagcaagagaaaagttgcctgcacgatgaattgctttttactgtagagagagaaaagaggaaagatgaattgcttaatattgcgaagtcaaagcaagaacgcacaaattcagaactgcacaatctgagacagatttatgtaaaacaacagagtgatctgcagtttcttaatttcaatgtggaaaattctcaggaattaatacagatgtatgactcaaagatggaggaatcaaaggctctggactccagcagagacatgtgtttatcagaccttgaaaataaccacccaaaagtcgatattaagagggaaaaaaatcagaagtcactgtttaaggaccagaaatttgaagccatgttggttcagcaaaataggtcagacaagagctcttgcgatgaatgcaaagagaagaaacaacagatcgatactgtgtttggggagaaaagtgtaattacgctgtcatccatattcaccaaagacttagtagagaaacacaacctcccttggtctctgggaggaaaaacccagattgaacccgaaaacaaaattacattgtgcaagatccacacaaaatcaccaaaatgtcatggcactggggttcagaacgaaggaaaacaaccctcagaaacacccactttatctgatgagaagcagtggcatgatgtcagtgtttacctgggcctgaccaactgtccaagttcaaaacatccagaaaagctggatgtagaatgtcaagatcagatggaaaggtccgaaatctcatgctgccagaaaaatgaagcctgtctgggcgaaagtggcatgtgtgactccaagtgctgccacccgagtaacttcataattgaagccccaggccacatgtctgacgtggagtggatgagtattttcaagccttccaaaatgcagagaattgtccgcctcaaatctgggtgcacctgttcagaaagcatctgtggcacacaacatgactccccggcaagtgagctaattgccatccaagattcccactctttgggttcttcaaaatctgccttgagagaagatgagacggagtcctcttccaataaaaagaactcacctacgagtttgttaatctacaaagatgcaccagcattcaatgaaaaggcttcaattgtgttaccctcccaggatgatttctcgcccacgagcaagctccagcgtttgctggcggaatctcgtcagatggtgacggacctggagctgagcacactgctgcccatcagccatgagaatctcactggcagtgccacaaatatttctcatctatgtggaaggcagaaagcagacaccaatactgaatgaatacttaaccgtaaaactgaaagaggattctagttcttcataaacggcacttaattccagctgggagcagaactagaaagttaatttttaaacatctacacttcattttcaagttaaccatttttgtgctgaagaaatattttcatgtgagtaaaataaggaaggaacgttcatcactttaaactgaacctggcaagttaatttcctcaggaatggggatgtatttttttaagcattgcagatatcaaagttctattgtgctgaataaatgcccctttgttaacagg

SEQ ID NO: 121085 - DNA, 2266 bp, Homo sapiens
  Payload ID: 3737
  Gene Symbol: CCDC62
  Gene Name: coiled-coil domain containing 62
  ENST ID: ENST00000392440
  CDS Start-End: 31-1524
cacattgcagattgttcgggtaaatttaaaatgctagagcatgccctacgtgatgccaagatggcggagacttgtattgtgaaagaaaagcaagattataagcagaaattgaaggcacttaagattgaagtcaacaaactaaaagaggacctcaatgaaaagacgacagaaaataatgagcaacgagaagagatcattcgcctcaagcaagagaaaagttgcctgcacgatgaattgctttttactgtagagagagaaaagaggaaagatgaattgcttaatattgcgaagtcaaagcaagaacgcacaaattcagaactgcacaatctgagacagatttatgtaaaacaacagagtgatctgcagtttcttaatttcaatgtggaaaattctcaggaattaatacagatgtatgactcaaagatggaggaatcaaaggctctggactccagcagagacatgtgtttatcagaccttgaaaataaccacccaaaagtcgatattaagagggaaaaaaatcagaagtcactgtttaaggaccagaaatttgaagccatgttggttcagcaaaataggtcagacaagagctcttgcgatgaatgcaaagagaagaaacaacagatcgatactgtgtttggggagaaaagtgtaattacgctgtcatccatattcaccaaagacttagtagagaaacacaacctcccttggtctctgggaggaaaaacccagattgaacccgaaaacaaaattacattgtgcaagatccacacaaaatcaccaaaatgtcatggcactggggttcagaacgaaggaaaacaaccctcagaaacacccactttatctgatgagaagcagtggcatgatgtcagtgtttacctgggcctgaccaactgtccaagttcaaaacatccagaaaagctggatgtagaatgtcaagatcagatggaaaggtccgaaatctcatgctgccagaaaaatgaagcctgtctgggcgaaagtggcatgtgtgactccaagtgctgccacccgagtaacttcataattgaagccccaggccacatgtctgacgtggagtggatgagtattttcaagccttccaaaatgcagagaattgtccgcctcaaatctgggtgcacctgttcagaaagcatctgtggcacacaacatgactccccggcaagtgagctaattgccatccaagattcccactctttgggttcttcaaaatctgccttgagagaagatgagacggagtcctcttccaataaaaagaactcacctacgagtttgttaatctacaaagatgcaccagcattcaatgaaaaggcttcaattgtgttaccctcccaggatgatttctcgcccacgagcaagctccagcgtttgctggcggaatctcgtcagatggtgacggacctggagctgagcacactgctgcccatcagccatgagaatctcactggcagtgccacaaatatttctcatctatgtggaaggcagaaagcagacaccaatactgaatgaatacttaaccgtaaaactgaaagaggattctagttcttcataaacggcacttaattccagctgggagcagaactagaaagttaatttttaaacatctacacttcattttcaagttaaccatttttgtgctgaagaaatattttcatgtgtaagaaagtagaccttattgtacatatagaaagttggaattatgctaagaatgaaaaagacttctctgtaaagatacggactacagttaaatgctagagaagctctttaaaaatgtgaatgtcaaatagagaaagaaccctgcatagaaagtgctgttttaactatctgatttttaaaaaatctgtgcatacatttaaattctaaacaatagcttatcagagtcagctcaaaatatatgagaaacagtattctctcatggttttagcttttgactttgctgtgtaaatagacataaggtgctttgatataaaatataaaatgtaactggaaaatagctcgaggtccttctgtcccaagctgagcagagccccatctttctgggtctatattagtcccacctactgacacaaacaaaagcttgctggaagatcgagttttagacgcatttttaaaaatcttaaagactaaaacacttccattttaacttgtaaagtaatttaattttttaaagattatactatatgcctctgtgtcttctctaaaagaatagatcaacttcagtccataaaagatatttttaatattaaagaaa

SEQ ID NO: 121086 - DNA, 2936 bp, Homo sapiens
  Payload ID: 3737
  Gene Symbol: CCDC62
  Gene Name: coiled-coil domain containing 62
  Uniprot ID: Q6P9F0
  ENST ID: ENST00000392441
  CDS Start-End: 146-2194
ggttggagtacggggcgggggtcggccgagggcgcggggccccggggctccgggctcgcccccgccgctcggggcaggcgcgccgatggcgtttctgaggtgacgccgcccacaccgggcttctccgggggcggaggaaacacctatgaaccctccggcagccttccttgccgggcgccagaacatcgggtcagaagttgagatttccactatcgagaaacaacggaaggagctgcagttgctcattggagaattaaaagatcgagataaagagctcaatgacatggttgcagtgcaccagcaacagcttctttcatgggaagaggatcggcagaaagtgttgacactggaagaacgttgcagcaaattagaaggtgaactacataaaagaactgaaataatcaggtcactcacgaagaaggtaaaagctcttgaatccaatcaaatggaatgccaaacagctctccaaaagacccaactacagcttcaggaaatggctcaaaaggcaacgcattcttctcttctctctgaagaccttgaggctagaaacgaaactctcagcaacacgttagtggaactttctgcccaggtaggacagctacaagctcgagaacaagctcttacgacaatgataaagctaaaggacaaagatattattgaggcagttaatcacattgcagattgttcgggtaaatttaaaatgctagagcatgccctacgtgatgccaagatggcggagacttgtattgtgaaagaaaagcaagattataagcagaaattgaaggcacttaagattgaagtcaacaaactaaaagaggacctcaatgaaaagacgacagaaaataatgagcaacgagaagagatcattcgcctcaagcaagagaaaagttgcctgcacgatgaattgctttttactgtagagagagaaaagaggaaagatgaattgcttaatattgcgaagtcaaagcaagaacgcacaaattcagaactgcacaatctgagacagatttatgtaaaacaacagagtgatctgcagtttcttaatttcaatgtggaaaattctcaggaattaatacagatgtatgactcaaagatggaggaatcaaaggctctggactccagcagagacatgtgtttatcagaccttgaaaataaccacccaaaagtcgatattaagagggaaaaaaatcagaagtcactgtttaaggaccagaaatttgaagccatgttggttcagcaaaataggtcagacaagagctcttgcgatgaatgcaaagagaagaaacaacagatcgatactgtgtttggggagaaaagtgtaattacgctgtcatccatattcaccaaagacttagtagagaaacacaacctcccttggtctctgggaggaaaaacccagattgaacccgaaaacaaaattacattgtgcaagatccacacaaaatcaccaaaatgtcatggcactggggttcagaacgaaggaaaacaaccctcagaaacacccactttatctgatgagaagcagtggcatgatgtcagtgtttacctgggcctgaccaactgtccaagttcaaaacatccagaaaagctggatgtagaatgtcaagatcagatggaaaggtccgaaatctcatgctgccagaaaaatgaagcctgtctgggcgaaagtggcatgtgtgactccaagtgctgccacccgagtaacttcataattgaagccccaggccacatgtctgacgtggagtggatgagtattttcaagccttccaaaatgcagagaattgtccgcctcaaatctgggtgcacctgttcagaaagcatctgtggcacacaacatgactccccggcaagtgagctaattgccatccaagattcccactctttgggttcttcaaaatctgccttgagagaagatgagacggagtcctcttccaataaaaagaactcacctacgagtttgttaatctacaaagatgcaccagcattcaatgaaaaggcttcaattgtgttaccctcccaggatgatttctcgcccacgagcaagctccagcgtttgctggcggaatctcgtcagatggtgacggacctggagctgagcacactgctgcccatcagccatgagaatctcactggcagtgccacaaatatttctcatctatgtggaaggcagaaagcagacaccaatactgaatgaatacttaaccgtaaaactgaaagaggattctagttcttcataaacggcacttaattccagctgggagcagaactagaaagttaatttttaaacatctacacttcattttcaagttaaccatttttgtgctgaagaaatattttcatgtgtaagaaagtagaccttattgtacatatagaaagttggaattatgctaagaatgaaaaagacttctctgtaaagatacggactacagttaaatgctagagaagctctttaaaaatgtgaatgtcaaatagagaaagaaccctgcatagaaagtgctgttttaactatctgatttttaaaaaatctgtgcatacatttaaattctaaacaatagcttatcagagtcagctcaaaatatatgagaaacagtattctctcatggttttagcttttgactttgctgtgtaaatagacataaggtgctttgatataaaatataaaatgtaactggaaaatagctcgaggtccttctgtcccaagctgagcagagccccatctttctgggtctatattagtcccacctactgacacaaacaaaagcttgctggaagatcgagttttagacgcatttttaaaaatcttaaagactaaaacacttccattttaacttgtaaagtaatttaattttttaaagattatactatatgcctctgtgtcttctctaaaagaatagatcaacttcagtccataaaagatatttttaatattaaagaaa

SEQ ID NO: 121087 - DNA, 331 bp, Homo sapiens
  Payload ID: 3737
  Gene Symbol: CCDC62
  Gene Name: coiled-coil domain containing 62
  ENST ID: ENST00000539171
  CDS Start-End: 140-331
agtacggggcgggggtcggccgagggcgcggggccccggggctccgggctcgcccccgccgctcggggcaggcgcgccgatggcgtttctgaggtgacgccgcccacaccgggcttctccgggggcggaggaaacacctatgaaccctccggcagccttccttgccgggcgccaggctagaaacgaaactctcagcaacacgttagtggaactttctgcccaggtaggacagctacaagctcgagaacaagctcttacgacaatgataaagctaaaggacaaagatattattgaggcagttaatcacattgcagattgttcgggtaaattt

SEQ ID NO: 121088 - DNA, 3537 bp, Homo sapiens
  Payload ID: 3737
  Gene Symbol: CCDC62
  Gene Name: coiled-coil domain containing 62
  Uniprot ID: Q6P9F0
  ENST ID: ENST00000537566
  CDS Start-End: 1203-2540
tattgtctttgggtacatgtgaaagatttccttacataatttattttttaatgatgtatgttgtatttggatcagttacaatattaaattgcccttaatagattgagtatgtatagatgccttagatgttgtagttgtcatgcatattgaacactggaagacttaattttctttttatagactaaaattcccattgtttagtaaggatcatttacatttaaacagtaactatttcgtgattttgtttggttttttttgatagagttttgctcttgttgcccaggctagagtgcaatggcacgatctcggctcactgcaacctctgcctccagggttcaagcagttctcctgcctcagcctcttgagtagctgggattacaggcgcatgccaccacactgagctaatttttgtatttttagtagagatggggttttgccacgttggccaggctggtctcgaactcctgacctcaggtgatcggcccaccttgacctcccaaaatgctggaattacaggcgtgagccaccacgcctggccactatttcatgtttacctgtacttggttactcaaattgctggggcaaggtaggggataatgttattgactggcagagaaaagggttgttggcaaagggggagaaaaagtgcagaaataggtttatttgtttacccagtgggttttagaaacagtcccactttttaggcatggtacgtatggcatgacagaaaattgtagagaggcagagtgcatggtagattttaacttgaacatgttttaagtatacataatcttttgctgccatgttattaaaacttaattgaactacttagaattggccgcaaaagaagatatacttatttggaaaatggactttggctgatttgttattgatttcattctattttgatgtgaaaccgctttctatgtttagaacatcgggtcagaagttgagatttccactatcgagaaacaacggaaggagctgcagttgctcattggagaattaaaagatcgagataaagagctcaatgacatggttgcagtgcaccagcaacagcttctttcatgggaagaggatcggcagaaagtgttgacactggaagaacgttgcagcaaattagaaggtgaactacataaaagaactgaaataatcaggtcactcacgaagaaggtaaaagctcttgaatccaatcaaatggaatgccaaacagctctccaaaagacccaactacagcttcaggaaatggctcaaaagtagagagagaaaagaggaaagatgaattgcttaatattgcgaagtcaaagcaagaacgcacaaattcagaactgcacaatctgagacagatttatgtaaaacaacagagtgatctgcagtttcttaatttcaatgtggaaaattctcaggaattaatacagatgtatgactcaaagatggaggaatcaaaggctctggactccagcagagacatgtgtttatcagaccttgaaaataaccacccaaaagtcgatattaagagggaaaaaaatcagaagtcactgtttaaggaccagaaatttgaagccatgttggttcagcaaaataggtcagacaagagctcttgcgatgaatgcaaagagaagaaacaacagatcgatactgtgtttggggagaaaagtgtaattacgctgtcatccatattcaccaaagacttagtagagaaacacaacctcccttggtctctgggaggaaaaacccagattgaacccgaaaacaaaattacattgtgcaagatccacacaaaatcaccaaaatgtcatggcactggggttcagaacgaaggaaaacaaccctcagaaacacccactttatctgatgagaagcagtggcatgatgtcagtgtttacctgggcctgaccaactgtccaagttcaaaacatccagaaaagctggatgtagaatgtcaagatcagatggaaaggtccgaaatctcatgctgccagaaaaatgaagcctgtctgggcgaaagtggcatgtgtgactccaagtgctgccacccgagtaacttcataattgaagccccaggccacatgtctgacgtggagtggatgagtattttcaagccttccaaaatgcagagaattgtccgcctcaaatctgggtgcacctgttcagaaagcatctgtggcacacaacatgactccccggcaagtgagctaattgccatccaagattcccactctttgggttcttcaaaatctgccttgagagaagatgagacggagtcctcttccaataaaaagaactcacctacgagtttgttaatctacaaagatgcaccagcattcaatgaaaaggcttcaattgtgttaccctcccaggatgatttctcgcccacgagcaagctccagcgtttgctggcggaatctcgtcagatggtgacggacctggagctgagcacactgctgcccatcagccatgagaatctcactggcagtgccacaaataagtcagaggtcccagaagagtcagctcaaaaaaatacctttgtcagttattgaaggaaacaaaaggcaacttcagtattcatcgtgatcacgaatttctcatctatgtggaaggcagaaagcagacaccaatactgaatgaatacttaaccgtaaaactgaaagaggattctagttcttcataaacggcacttaattccagctgggagcagaactagaaagttaatttttaaacatctacacttcattttcaagttaaccatttttgtgctgaagaaatattttcatgtgtaagaaagtagaccttattgtacatatagaaagttggaattatgctaagaatgaaaaagacttctctgtaaagatacggactacagttaaatgctagagaagctctttaaaaatgtgaatgtcaaatagagaaagaaccctgcatagaaagtgctgttttaactatctgatttttaaaaaatctgtgcatacatttaaattctaaacaatagcttatcagagtcagctcaaaatatatgagaaacagtattctctcatggttttagcttttgactttgctgtgtaaatagacataaggtgctttgatataaaatataaaatgtaactggaaaatagctcgaggtccttctgtcccaagctgagcagagccccatctttctgggtctatattagtcccacctactgacacaaacaaaagcttgctggaagatcgagttttagacgcatttttaaaaatcttaaagactaaaacacttccattttaacttgtaaagtaatttaattttttaaagattatactatatgcctctgtgtcttctctaaaagaatagatcaacttcagtccataaaagatatttttaatattaaagaaaaaatatgtttccttggtttctttttattttacaggagtaaaataaggaaggaacgttcatcactttaaactgaacctggcaagttaatttcctcaggaatggggatgtatttttttaagcattgcagatatcaaagttctattgtgctgaataaatgcccctttgtt

SEQ ID NO: 121089 - DNA, 1993 bp, Homo sapiens
  Payload ID: 3738
  Gene Symbol: CCDC63
  Gene Name: coiled-coil domain containing 63
  Uniprot ID: Q8NA47
  ENST ID: ENST00000308208
  CDS Start-End: 243-1934
agaacgcccgggcgtggggctgggggtgtggcgcagcgaggccgcgcagcaagcagtcctcccggcaccgtcggaagcgcagttgcagcagccgtcggacaagcggccggagcagccacggacaagcagtccgggccccgccactgggcattgcagagagacagagagagagaggaaggctcactggctttgagctctctgggtacagtgtctgagtggaggcaaagtgcggttccttcaagatgtctgtgttgaagaagaacaggagaaaagactccgacactccccaggaaccttcggagaaggccaaagagcagcaggcggaggcagagctccggaagctaaggcagcagttcaggaagatggtggaaagccggaagtcttttaagttccgaaaccagcagaagattgcgagtcagtacaaggagatcaagaccctgaagacagagcaggatgagatcaccctactgttgagtctcatgaaatcctcgaggaacatgaatcggagtgagaagaactacatggagctgcgactcctgctccaaactaaggaggactatgaggcattgattaaatccctgaaagtgctgttggctgaactggatgagaagattcttcagatggaaaaaaaaatcgcaaaccaaaaacagattttcgcaaaaatgcaggaggccaataacccccggaaactgcagaaacagattcacattttggaaacccgtttgaatctcgtcactgttcactttgacaagatgctgaccactaatgccaagctccggaaggagattgaagacctacgatttgagaaggctgcttatgacaatgtctaccagcagctccagcactgcctgttgatggagaagaaaaccatgaacttggccattgagcaatcttctcaggcctatgagcagagggtggaggccatggctcgaatggctgccatgaaagaccgccagaagaaggacacctctcagtacaacctggagatccgagagctggagcgtctctatgcccatgagagcaagctcaagtccttcctgctcgtcaagctgaatgatcgcaatgaattcgaggagcaggccaaaagggaggaagctctcaaggcaaagaagcatgtcaagaagaacaggggagagagttttgagagctatgaggtggcccacctccggctgctgaagctggctgagagtgggaacctaaaccagctcattgaagattttctggccaaggaggagaagaattttgctcggttcacgtatgtcacggagctcaacaacgacatggagatgatgcacaagaggacccaacgaatccaggacgagatcatcctcttgcgatcccagcagaaattgtcccacgatgacaaccactctgtcctgagacagctggaggataaactgaggaagaccacggaggaggcagatatgtatgagagcaagtacggggaggtcagcaagaccttggatctattgaagaactcagtggagaaactgttcaagaagataaactgtgacgccaccaagatcctggtgcagttaggggagacggggaaagtcactgacatcaaccttccgcagtattttgccatcattgaaaagaagaccaacgacctgctgctgttggagacctacaggcgcatcctggaagtggaaggggcagaggctgagatcccgccacccttcatcaaccctttctggggtggctctgccctcctcaagcccccagaacccatcaaagtcatccccccagtgctgggggctgaccccttcagcgacaggttggatgatgtggaacagcccctggaccacagcagccttcggcagctggttctcgacaattatatcctgaaggagaatcggagtaaggaagtgcgcggagacagcctgcctgagaaggtggatgacttcagatccaggaagaaagtaaccatgtgaggtgcatgcatggggccacctttgcaacataaccgaaagaataaatgttttgttctgta

SEQ ID NO: 121090 - DNA, 1887 bp, Homo sapiens
  Payload ID: 3738
  Gene Symbol: CCDC63
  Gene Name: coiled-coil domain containing 63
  Uniprot ID: Q8NA47
  ENST ID: ENST00000545036
  CDS Start-End: 258-1829
agaacgcccgggcgtggggctgggggtgtggcgcagcgaggccgcgcagcaagcagtcctcccggcaccgtcggaagcgcagttgcagcagccgtcggacaagcggccggagcagccacggacaagcagtccgggccccgccactgttgaagaagaacaggagaaaagactccgacactccccaggaaccttcggagaaggccaaagagcagcaggcggaggcagagctccggaagctaaggcagcagttcaggaagatggtggaaagccggaagtcttttaagttccgaaaccagcagaagattgcgagtcagtacaaggagatcaagaccctgaagacagagcaggatgagatcaccctactgttgagtctcatgaaatcctcgaggaacatgaatcggagtgagaagaactacatggagctgcgactcctgctccaaactaaggaggactatgaggcattgattaaatccctgaaagtgctgttggctgaactggatgagaagattcttcagatggaaaaaaaaatcgcaaaccaaaaacagattttcgcaaaaatgcaggaggccaataacccccggaaactgcagaaacagattcacattttggaaacccgtttgaatctcgtcactgttcactttgacaagatgctgaccactaatgccaagctccggaaggagattgaagacctacgatttgagaaggctgcttatgacaatgtctaccagcagctccagcactgcctgttgatggagaagaaaaccatgaacttggccattgagcaatcttctcaggcctatgagcagagggtggaggccatggctcgaatggctgccatgaaagaccgccagaagaaggacacctctcagtacaacctggagatccgagagctggagcgtctctatgcccatgagagcaagctcaagtccttcctgctcgtcaagctgaatgatcgcaatgaattcgaggagcaggccaaaagggaggaagctctcaaggcaaagaagcatgtcaagaagaacaggggagagagttttgagagctatgaggtggcccacctccggctgctgaagctggctgagagtgggaacctaaaccagctcattgaagattttctggccaaggaggagaagaattttgctcggttcacgtatgtcacggagctcaacaacgacatggagatgatgcacaagaggacccaacgaatccaggacgagatcatcctcttgcgatcccagcagaaattgtcccacgatgacaaccactctgtcctgagacagctggaggataaactgaggaagaccacggaggaggcagatatgtatgagagcaagtacggggaggtcagcaagaccttggatctattgaagaactcagtggagaaactgttcaagaagataaactgtgacgccaccaagatcctggtgcagttaggggagacggggaaagtcactgacatcaaccttccgcagtattttgccatcattgaaaagaagaccaacgacctgctgctgttggagacctacaggcgcatcctggaagtggaaggggcagaggctgagatcccgccacccttcatcaaccctttctggggtggctctgccctcctcaagcccccagaacccatcaaagtcatccccccagtgctgggggctgaccccttcagcgacaggttggatgatgtggaacagcccctggaccacagcagccttcggcagctggttctcgacaattatatcctgaaggagaatcggagtaaggaagtgcgcggagacagcctgcctgagaaggtggatgacttcagatccaggaagaaagtaaccatgtgaggtgcatgcatggggccacctttgcaacataaccgaaagaataaatgttttgttctgt

SEQ ID NO: 121091 - DNA, 1651 bp, Homo sapiens
  Payload ID: 3738
  Gene Symbol: CCDC63
  Gene Name: coiled-coil domain containing 63
  ENST ID: ENST00000552694
  CDS Start-End: 138-1592
ccgtcggaagcgcagttgcagcagccgtcggacaagcggccggagcagccacggacaagcagtccgggccccgccactgcaaggagatcaagaccctgaagacagagcaggatgagatcaccctactgttgagtctcatgaaatcctcgaggaacatgaatcggagtgagaagaactacatggagctgcgactcctgctccaaactaaggaggactatgaggcattgattaaatccctgaaagtgctgttggctgaactggatgagaagattcttcagatggaaaaaaaaatcgcaaaccaaaaacagattttcgcaaaaatgcaggaggccaataacccccggaaactgcagaaacagattcacattttggaaacccgtttgaatctcgtcactgttcactttgacaagatgctgaccactaatgccaagctccggaaggagattgaagacctacgatttgagaaggctgcttatgacaatgtctaccagcagctccagcactgcctgttgatggagaagaaaaccatgaacttggccattgagcaatcttctcaggcctatgagcagagggtggaggccatggctcgaatggctgccatgaaagaccgccagaagaaggacacctctcagtacaacctggagatccgagagctggagcgtctctatgcccatgagagcaagctcaagtccttcctgctcgtcaagctgaatgatcgcaatgaattcgaggagcaggccaaaagggaggaagctctcaaggcaaagaagcatgtcaagaagaacaggggagagagttttgagagctatgaggtggcccacctccggctgctgaagctggctgagagtgggaacctaaaccagctcattgaagattttctggccaaggaggagaagaattttgctcggttcacgtatgtcacggagctcaacaacgacatggagatgatgcacaagaggacccaacgaatccaggacgagatcatcctcttgcgatcccagcagaaattgtcccacgatgacaaccactctgtcctgagacagctggaggataaactgaggaagaccacggaggaggcagatatgtatgagagcaagtacggggaggtcagcaagaccttggatctattgaagaactcagtggagaaactgttcaagaagataaactgtgacgccaccaagatcctggtgcagttaggggagacggggaaagtcactgacatcaaccttccgcagtattttgccatcattgaaaagaagaccaacgacctgctgctgttggagacctacaggcgcatcctggaagtggaaggggcagaggctgagatcccgccacccttcatcaaccctttctggggtggctctgccctcctcaagcccccagaacccatcaaagtcatccccccagtgctgggggctgaccccttcagcgacaggttggatgatgtggaacagcccctggaccacagcagccttcggcagctggttctcgacaattatatcctgaaggagaatcggagtaaggaagtgcgcggagacagcctgcctgagaaggtggatgacttcagatccaggaagaaagtaaccatgtgaggtgcatgcatggggccacctttgcaacataaccgaaagaataaatgttttgttctgta

SEQ ID NO: 121092 - DNA, 3055 bp, Homo sapiens
  Payload ID: 3739
  Gene Symbol: CCDC64
  Gene Name: coiled-coil domain containing 64
  Uniprot ID: Q6ZP65
  ENST ID: ENST00000397558
  CDS Start-End: 1-1722
atgtccgctttctgcctgggcttggtcggccgcgcttcagcacccgccgagccggacagcgcctgctgcatggagctgcccgccgcggccggggacgcagtccggagtcccgccgccgccgccgccctcatcttccccgggggctccggggagctagaactggcgttagaggaggagctggcgctgctggcggccggggagcggccgtccgaccccggggaacaccctcaggccgagcctgggtctctggccgagggggccggaccgcagccgccgccctcccaggaccccgagctgctgtcggtgatccgacagaaggagaaggatctggtgttggcggcccggctgggtaaggcgctgctcgagaggaaccaggacatgagccggcagtacgagcagatgcataaggagctgacagacaagctcgagcacttagagcaagagaaacatgaattgagaagacgatttgagaaccgagaaggggagtgggaaggccgagtgtcagagctggagagtgatgtgaagcagctacaggatgagttggagaggcagcagattcatctgcgggaagcagatcgagaaaaatcacgggctgtccaggaactgtcggaacagaaccaaaggctattggatcagctcagcagggcatcagaagttgagagacaactctccatgcaggtccacgccctcagagaagactttcgggagaaaaactcatcaaccaaccagcacattatccggctggagagccttcaggccgagatcaagatgctgtcagatcggaaacgggagctggagcatcgtctcagcgctactttagaggaaaatgacctgctccaagggaccgtggaggagctacaggaccgggtgctaatcctggagaggcagggccatgacaaggacctacagctgcaccaaagccagctggagcttcaggaggtgcgtctctcctgccgacagctgcaggtgaaggtggaagaactcactgaggagaggagtctgcagagctctgccgccaccagcacatccctcctgtcagagatcgagcagagcatggaggctgaggagctggagcaggagcgagagcagctgagactgcagctctgggaagcctactgccaggttcgctatctgtgctcacaccttcgaggcaatgacagtgctgactcagccgtctccacggactcctccatggacgagtcttcagaaacctcgtccgccaaggatgtgccagccggcagcttgcgcactgccctcaatgagctcaagagactgatacagagcattgtggatggcatggagcccacggtgacactgctgagtgtggagatgactgccctaaaagaggagagagaccgactcagagtcacttctgaggacaaggagccaaaggagcagcttcagaaggccatcagggaccgcgacgaggccattgcaaagaagaatgctgtggagctggaacttgccaagtgcaggatggatatgatgtctctgaacagccagttgctggatgccattcagcagaaactgaacctctcgcagcagctggaagcttggcaggatgacatgcacagggtcattgaccggcagctgatggacacgcacctgaaagaacggagccagccggctgctgccctctgcaggggccacagcgctgggcggggggatgagcccagcatcgctgaaggcaaacgactcttctcattcttcaggaaaatttaagttgggaggagtcaggccaccaaagatgggtggactggaggcagctggaaaggcggtgcaggcaaggcctcccctgcagcttgcacctcagcagctgccctgcccctcatgctagggccccatgggtccgggagggcctgctccctttcgtcggtggggatggagacctagaggtgggggcctgccttggccactgaaggcttcccttggcccaccgcctggccaagcccacgcctgggcttctccaggaccacgtgcttgagcagggttaggccacctcccagaggggccccttggtgttgggctttgcagctcacacccaacagatcgcagcccacccccaggcactgctgcctccttgattttagcaaatggggaacagaaggaatggaggcccttctctgcatgcctcaggaggcctgagccccaggggcctagacctgtgggggcagcgggccaggcctgagcctccattccttccccagcccctggcccagggtcaaaggagagatggcagcccctcccccgcatgcatgcacctcagctggcaggaggccaagcctctggccgcagggtctaagagccggggcttacccaagctcagctgaggccacccgagccccagggaggaagaaggccctgtccccctgtcgccactgctctccctcccagccttcagtctctgccccttagcagggcctggccaggcagagtgttatcaccagtcatctgcaggctttagccatccagccctttcccctgctcagggctggggttggacggggtctcctcctcccacagctccctcctccacccctcacatacatacataatttcttggcctagccaaacaagtccaggccactgaatggcaccagaggggtctgtggtcagccaccccaccttgagggcagcacaggcaccacggggtggaggggagggggaggctgccggaagcctccagatgctgcctgcctgcctgcagaagcctgcagtggctgctgctcctgcctctgcagccgcccctcctcctccacccaggccccaactcagaggctccgcggcccggccagccctcagctgctcacaaccgattcagtctccctccctccctcacgtggggaaagcacagcagggatgcgcggcaagaatgtacctgtagatgtgtacataccacagtgctgtaattttgtatgtagcaatcatgtaaatacatgtatggattttataatatacatatataaaaatctataaaggcatatttttagaaaaacagcacaccactgcttcttttgaaaatagtctgaataagaataaaatgaatttctacaga

SEQ ID NO: 121093 - DNA, 1109 bp, Homo sapiens
  Payload ID: 3739
  Gene Symbol: CCDC64
  Gene Name: coiled-coil domain containing 64
  ENST ID: ENST00000548673
  CDS Start-End: 1-876
gagaggagtctgcagagctctgccgccaccagcacatccctcctgtcagagatcgagcagagcatggaggctgaggagctggagcaggagcgagagcagctgagactgcagctctgggaagcctactgccaggttcgctatctgtgctcacaccttcgaggcaatgacagtgctgactcagccgtctccacggactcctccatggacgagtcttcagaaacctcgtccgccaaggatgtgccagccggcagcttgcgcactgccctcaatgagctcaagagactgatacagagcattgtggatggcatggagcccacgggctcccggagacttgatgatgactccttagaagaacagataaggcagaccagtgaggactcgagagccctaagggagctcatggagggagagaggggtaaactgaggcaaagcctagaagagctgcagcgactccacagtcaggtgacactgctgagtgtggagatgactgccctaaaagaggagagagaccgactcagagtcacttctgaggacaaggagccaaaggagcagcttcagaaggccatcagggaccgcgacgaggccattgcaaagaagaatgctgtggagctggaacttgccaagtgcaggatggatatgatgtctctgaacagccagttgctggatgccattcagcagaaactgaacctctcgcagcagctggaagcttggcaggatgacatgcacagggtcattgaccggcagctgatggacacgcacctgaaagaacggagccagccggctgctgccctctgcaggggccacagcgctgggcggggggatgagcccagcatcgctgaaggcaaacgactcttctcattcttcaggaaaatttaagttgggaggagtcaggccaccaaagatgggtggactggaggcagctggaaaggcggtgcaggcaaggcctcccctgcagcttgcacctcagcagctgccctgcccctcatgctagggccccatgggtccgggagggcctgctccctttcgtcggtggggatggagacctagaggtgggggcctgccttggccactgaaggcttcccttggcccaccgcctggccaagcccacg

SEQ ID NO: 121094 - DNA, 747 bp, Homo sapiens
  Payload ID: 3739
  Gene Symbol: CCDC64
  Gene Name: coiled-coil domain containing 64
  ENST ID: ENST00000547841
  CDS Start-End: 1-232
caaggagccaaaggagcagcttcagaaggccatcagggaccgcgacgaggccattgcaaagaagaatgctgtggagctggaacttgccaagtgcaggatggatatgatgtctctgaacagccagttgctggatgccattcagcagaaactgaacctctcgcagcagctggaagcttggcagtttgcttcctcagggctttttactatctggctcctttggtttctgatctagtggcctttctcagttcccgtatcaacagctttagttgtacacccctcctgcctttgaggatgacatgcacagggtcattgaccggcagctgatggacacgcacctgaaagaacggagccagccggctgctgccctctgcaggggccacagcgctgggcggggggatgagcccagcatcgctgaaggcaaacgactcttctcattcttcaggaaaatttaagttgggaggagtcaggccaccaaagatgggtggactggaggcagctggaaaggcggtgcaggcaaggcctcccctgcagcttgcacctcagcagctgccctgcccctcatgctagggccccatgggtccgggagggcctgctccctttcgtcggtggggatggagacctagaggtgggggcctgccttggccactgaaggcttcccttggcccaccgcctggccaagcccacgcctgggcttctccaggaccacgtgcttgagcagggttaggccacctcccagaggggcccctt

SEQ ID NO: 121095 - DNA, 2397 bp, Homo sapiens
  Payload ID: 3739
  Gene Symbol: CCDC64
  Gene Name: coiled-coil domain containing 64
  ENST ID: ENST00000546420
  CDS Start-End: 1-685
ctgcctgggcttggtcggccgcgcttcagcacccgccgagccggacagcgcctgctgcatggagctgcccgccgcggccggggacgcagtccggagtcccgccgccgccgccgccctcatcttccccgggggctccggggagctagaactggcgttagaggaggagctggcgctgctggcggccggggagcggccgtccgaccccggggaacaccctcaggccgagcctgggtctctggccgagggggccggaccgcagccgccgccctcccaggaccccgagctgctgtcggtgatccgacagaaggagaaggatctggtgttggcggcccggctgggtaaggcgctgctcgagaggaaccaggacatgagccggcagtacgagcagatgcataaggagctgacagacaagctcgagcacttagagcaagagaaacatgaattgagaagacgatttgagaaccgagaaggggagtgggaaggccgagtgtcagagctggagagtgatgtgaagcagctacaggatgagttggagaggcagcagattcatctgcgggaagcagatcgagaaaaatcacgggctgtccaggaactgtcggaacagaaccaaaggctattggatcagctcagcaggaaaattaagacttggatttactattctacctcagcccttcttgtatattgaaaataaaactaccaactcttcagttaccggaggaaaaagaacttctctgatatcatccctcagcactgatgttctcatgggagcagtgccgtgtctgcatggtctcctctgtttcaggcatcagaagttgagagacaactctccatgcaggtccacgccctcagagaagactttcgggagaaaaactcatcaaccaaccagcacattatccggctggagagccttcaggccgagatcaagatgctgtcagatcggaaacgggagctggagcatcgtctcagcgctactttagaggaaaatgacctgctccaagggaccgtggaggagctacaggaccgggtgctaatcctggagaggcagggccatgacaaggacctacagctgcaccaaagccagctggagcttcaggaggtgcgtctctcctgccgacagctgcaggtgaaggtggaagaactcactgaggagaggagtctgcagagctctgccgccaccagcacatccctcctgtcagagatcgagcagagcatggaggctgaggagctggagcaggagcgagagcaggtgacactgctgagtgtggagatgactgccctaaaagaggagagagaccgactcagagtcacttctgaggacaaggagccaaaggagcagcttcagaaggccatcagggaccgcgacgaggccattgcaaagaagaatgctgtggagctggaacttgccaagtgcaggatggatatgatgtctctgaacagccagttgctggatgccattcagcagaaactgaacctctcgcagcagctggaagcttggcaggatgacatgcacagggtcattgaccggcagctgatggacacgcacctgaaagaacggagccagccggctgctgccctctgcaggggccacagcgctgggcggggggatgagcccagcatcgctgaaggcaaacgactcttctcattcttcaggaaaatttaagttgggaggagtcaggccaccaaagatgggtggactggaggcagctggaaaggcggtgcaggcaaggcctcccctgcagcttgcacctcagcagctgccctgcccctcatgctagggccccatgggtccgggagggcctgctccctttcgtcggtggggatggagacctagaggtgggggcctgccttggccactgaaggcttcccttggcccaccgcctggccaagcccacgcctgggcttctccaggaccacgtgcttgagcagggttaggccacctcccagaggggccccttggtgttgggctttgcagctcacacccaacagatcgcagcccacccccaggcactgctgcctccttgattttagcaaatggggaacagaaggaatggaggcccttctctgcatgcctcaggaggcctgagccccaggggcctagacctgtgggggcagcgggccaggcctgagcctccattccttccccagcccctggcccagggtcaaaggagagatggcagcccctcccccgcatgcatgcacctcagctggcaggaggccaagcctctggccgcagggtctaagagccggggcttacccaagctcagctgaggccacccgagccccagggaggaagaaggccctgtccccctgtcgccactgctctccctcccagccttcagtctctgccccttagcagggcctggccaggcagagtgttatcaccagtcatctgcaggc

SEQ ID NO: 121096 - DNA, 1811 bp, Homo sapiens
  Payload ID: 3740
  Gene Symbol: CCDC64B
  Gene Name: coiled-coil domain containing 64B
  Uniprot ID: A1A5D9
  ENST ID: ENST00000389347
  CDS Start-End: 46-1572
tagagtgtcccgcagccacctgtccccgcagatgctgcaggtgacatgagctctccagatgggcccagcttcccgtccgggccgctctcagggggcgcctctcccagcggcgacgagggcttcttcccctttgtgctggagcggcgggactcattcctgggagggggcccagggcctgaggagcccgaggacctagccttgcagctgcagcagaaggagaaagacctgctgttggccgcggagctcggcaagatgcttctggagcgaaatgaagagctgcggcggcagctggagacgctgagcgcccagcacttggagcgtgaggaacggctccagcaggagaaccatgagctccggcgaggcctggcagcccgaggagccgagtgggaggcccgggccgtggagctggagggggacgtggaggccctgcgggcccagcttggggagcagcgctcagagcagcaggacagtgggcgagaacgggcacgggccctcagcgagctcagcgagcagaacctccggctcagccagcagctggctcaggcctcccagactgagcaggaacttcagagggaactggacgcccttcggggacagtgccaggctcaggcactggctggagcagagctgaggacgcggctggagagtctgcagggggaaaaccagatgctgcagagccgccggcaggacctggaggcccagatccgaggcctgcgtgaggaggtggagaagggtgagggcagactgcagaccacccacgaggagttgctgctgctgaggcgggagcggcgggagcacagcctggagctggaacgcgcacggtcagaggctggggaggcgctgagtgcgctgcggaggctgcagcggcgcgtctccgagctggaggaggagtcacgcctccaggacgccgacgtgtcggctgcctcgttgcagtcagaactggcccacagcctcgacgacggcgaccagggccagggcgccgacgcacccggagacaccccgaccacccggtccccaaagacccgaaaggcgtccagcccccagccttcacccccggaagagatcttagagccccccaagaagcgaacatccctcagtccagcggagatactggaggagaaggaggtggaagtggccaagctgcaagatgagatctcgctgcagcaggcagagctgcagtccctgcgggaagagctgcagaggcagaaggagctgcgggcgcaggaagaccctggggaggccctgcacagtgccctctcagaccgggacgaggccgtgaacaaggccctggagctgtccctgcagctcaaccgcgtctcgctggagcgagactccctgtctcgggagctgctgcgcgccatccgccagaaggtggcgctcacgcaggagctggaggcctggcaggacgacatgcaggtggtgatcgggcagcagctgcgctcacagcgccagaaggagctgagcgcctccgcgtcgtcgtcgaccccgcgccgtgccgcgccccgcttctcgctgcgcctgggccccgggcccgccggtggctttctcagtaacctcttccgaaggacctgacggctgggcccagagggctgcccttgcccacttaggggctcactttcctcttcaggccaatggagcgacagggcccagattgtcttccaaaagaagctgatgccctccccgccccaggatgctgggcaagggctcatcgggagcaggggctcatccggagcaggggccagctttgtggggcaggagctccaggtgggtggcaggggcaggtgaacagagctattttccgaattaatata

SEQ ID NO: 121097 - DNA, 1984 bp, Homo sapiens
  Payload ID: 3740
  Gene Symbol: CCDC64B
  Gene Name: coiled-coil domain containing 64B
  Uniprot ID: A1A5D9
  ENST ID: ENST00000572449
  CDS Start-End: 64-1590
gcggggacctcggagggagcccggcggcttcggccacctgtccccgcagatgctgcaggtgacatgagctctccagatgggcccagcttcccgtccgggccgctctcagggggcgcctctcccagcggcgacgagggcttcttcccctttgtgctggagcggcgggactcattcctgggagggggcccagggcctgaggagcccgaggacctagccttgcagctgcagcagaaggagaaagacctgctgttggccgcggagctcggcaagatgcttctggagcgaaatgaagagctgcggcggcagctggagacgctgagcgcccagcacttggagcgtgaggaacggctccagcaggagaaccatgagctccggcgaggcctggcagcccgaggagccgagtgggaggcccgggccgtggagctggagggggacgtggaggccctgcgggcccagcttggggagcagcgctcagagcagcaggacagtgggcgagaacgggcacgggccctcagcgagctcagcgagcagaacctccggctcagccagcagctggctcaggcctcccagactgagcaggaacttcagagggaactggacgcccttcggggacagtgccaggctcaggcactggctggagcagagctgaggacgcggctggagagtctgcagggggaaaaccagatgctgcagagccgccggcaggacctggaggcccagatccgaggcctgcgtgaggaggtggagaagggtgagggcagactgcagaccacccacgaggagttgctgctgctgaggcgggagcggcgggagcacagcctggagctggaacgcgcacggtcagaggctggggaggcgctgagtgcgctgcggaggctgcagcggcgcgtctccgagctggaggaggagtcacgcctccaggacgccgacgtgtcggctgcctcgttgcagtcagaactggcccacagcctcgacgacggcgaccagggccagggcgccgacgcacccggagacaccccgaccacccggtccccaaagacccgaaaggcgtccagcccccagccttcacccccggaagagatcttagagccccccaagaagcgaacatccctcagtccagcggagatactggaggagaaggaggtggaagtggccaagctgcaagatgagatctcgctgcagcaggcagagctgcagtccctgcgggaagagctgcagaggcagaaggagctgcgggcgcaggaagaccctggggaggccctgcacagtgccctctcagaccgggacgaggccgtgaacaaggccctggagctgtccctgcagctcaaccgcgtctcgctggagcgagactccctgtctcgggagctgctgcgcgccatccgccagaaggtggcgctcacgcaggagctggaggcctggcaggacgacatgcaggtggtgatcgggcagcagctgcgctcacagcgccagaaggagctgagcgcctccgcgtcgtcgtcgaccccgcgccgtgccgcgccccgcttctcgctgcgcctgggccccgggcccgccggtggctttctcagtaacctcttccgaaggacctgacggctgggcccagagggctgcccttgcccacttaggggctcactttcctcttcaggccaatggagcgacagggcccagattgtcttccaaaagaagctgatgccctccccgccccaggatgctgggcaagggctcatcgggagcaggggctcatccggagcaggggccagctttgtggggcaggagctccaggtgggtggcaggggcaggtgaacagagctattttccgaattaatatacgtctatcttttctagggcagggatggggctgggtatttatgtatcaagatcggacagagtaatatataaatcactccaccgatttggcccccattcatagaaagaaagagcatggtaaaaaagcctgaaactttattgtaaaaaaaaaaaaaaa

SEQ ID NO: 121098 - DNA, 3519 bp, Homo sapiens
  Payload ID: 3740
  Gene Symbol: CCDC64B
  Gene Name: coiled-coil domain containing 64B
  Uniprot ID: A1A5D9
  ENST ID: ENST00000573514
  CDS Start-End: 2192-3097
cctggagcccgttctctaagggacagcccaggactttcaaaaactgcaaatcagatcatttcactcctcaaccagaatctccccctcacacttagaatgaaaccaaaacccttccccagggcctaaaagtcccagagaactgggctcctccccgacctcatcacagcagcaccacccctttctcccctcctccaagaagggcagccgaaccaccctctccccgacaatgagggctcttttcatttcctccaagaactcacgcttgttccctcaggaactttgcacttgctgttccttaatgcctagccttctttctggtggctcttcttgtcctgcagaagtcgactcaaacatgacgtcctccttgaaggaccctccacccccaccccactccttactctctatcatttcccgggtctctttacagcccttactgtctccctgaaactacctggctccggcatgtgtccatgccctctggactctaagctgcttgaagcagtgaacttggtggtctcacgtgccactgacagcagaccccagaacaagtggagctcaggaaatgtgggaggattgatagcagtgtgggtggatagacttagagatattgtgtccaggccacaaggcatcagcagagccgagcatcagccaggacaatctgaccttgaacctgacagcttaatcctgaagctgtgttgcctctgcagtattcggttaagagttctgctgcctgagttggcatccctgctttgtgaagttattgtgtgtcggctgggcacggtgtctcatgcctgtaatcccagcactttgggaggccgaggagggtggatcgcttaaggccaggagttcaggaccagcctggccaacatggtgaaaccccgtctctcctaagaaaacaaaaaaatttgccgggcagggtggcgcacgccagtaatcttagctacttgggaggctgaggcaggagaatctcttgaacttgggaggcggacattgccgtgagctgagatagtgccactgcgctctagcctgggccaaagagtaaagatctgtctcaaaataaataaataaataaaaaataaaaacaacaataaatgactgtgtgtccttaggcaaggcacttagcaactcttgagcttgttccatctgtaaacccaggacgttagtgattctccctctagtggatgaaatgaagcaatgcagatagagccctaatgcagggtacctgcgagtcgctgcagcagctgtggcaattgtcaccttcatccaggcccatcccgctttgagggcctagagagagtgggccagaggttaacccccgattcatctgcctccccacgctgggcatctgggtgtgccagggcattcccccgctggtcagacaggtttttgggccagggcggggctgaccagggttaattagagggaactggctaggaggagctggggagggggctgggcagagtccaggcctccagagcccctgggacacagcaggtgtgtgctgccatgggccggggcttgaactctgccagactcaggcgccaaaaacggcgcttgcgacctcaggtccagaagccccggcagcagctggaggtgagtggtcatcagagatccccccaccccaacccttgccccgggcccacgcgtcctgtctgctcggaaccttccctctaaatctctgggtcttgctcacgcttcctccctcactctcccttgcttttgtgtctgtcttggacacaaggcccccttaggctttctccctaggtgtctgtccctccatcgccatctctctgtgcctgcccagtctcatcggtgcctctctgcctctgtccctctgccctggcccccacagcggctccagcaggagaaccatgagctccggcgaggcctggcagcccgaggagccgagtgggaggcccgggccgtggagctggagggggacgtggaggccctgcgggcccagcttggggagcagcgctcagagcagcaggacagtgggcgagaacgggcacgggccctcagcgagctcagcgagcagaacctccggctcagccagcagctggctcaggcctcccagactgagcaggaacttcagagggaactggacgcccttcggggacagtgccaggctcaggcactggctggagcagagctgaggacgcggctggagagtctgcagggggaaaaccagatgctgcagagccgccggcaggacctggaggcccagatccgaggcctgcgtgaggaggtggagaagggtgagggcagactgcagaccacccacgaggagttgctgctgctgaggcgggagcggcgggagcacagcctggagctggaacgcgcacggtcagaggctggggaggcgctgagtgcgctgcggaggctgcagcggcgcgtctccgagctggaggaggagtcacgcctccaggacgccgacgtgtcggctgcctcgttgcagtcagaactggcccacagcctcgacgacggcgaccagggccagggcgccgacgcacccggagacaccccgaccacccggtccccaaagacccgaaaggcgtccagcccccagccttcacccccggaagagatcttagagccccccaagaagcgaacatccctcagtccagcggagatactggaggagaaggaggtggaagtggccaagctgcaagatgagatctcgctgcagcaggcagagctgcagtccctgcgggaagagctgcagaggcagaaggagctgcgggcgcaggaagaccctggggaggccctgcacagtgccctctcagaccgggacgaggccgtgaacaaggccctggagctgtccctgcagctcaaccgcgtctcgctggagcgagactccctgtctcgggagctgctgcgcgccatccgccagaaggtggcgctcacgcaggagctggaggcctggcaggacgacatgcaggtggtgatcgggcagcagctgcgctcacagcgccagaaggagctgagcgcctccgcgtcgtcgtcgaccccgcgccgtgccgcgccccgcttctcgctgcgcctgggccccgggcccgccggtggctttctcagtaacctcttccgaaggacctgacggctgggcccagagggctgcccttgcccacttaggggctcactttcctcttcaggccaatggagcgacagggcccagattgtcttccaaaagaagctgatgccctccccgccccaggatgctgggcaagggctcatcgggagcaggggctcatccggagcaggggccagctttgtggggcaggagctccaggtgggtggcaggggcaggtgaacagagctattttccgaattaatatacgtctatcttttctagggcagggatggggctgggtatttatgtatcaagatcggacagagtaatatataaatcactccaccgatttggcccccattcatagaaagaaagagcatggtaaaaaagcctgaaactttattgtaaaaaaaaaaaaaaaaagaaaatgaaaaacactctaaaaccct

SEQ ID NO: 121099 - DNA, 2084 bp, Homo sapiens
  Payload ID: 3741
  Gene Symbol: CCDC65
  Gene Name: coiled-coil domain containing 65
  Uniprot ID: Q8IXS2
  ENST ID: ENST00000266984
  CDS Start-End: 228-1721
gatatcctcgttgctaggagactagacgcgtcttacagtgggagagctcagcctcactgatagccggggatctctcctgttcgagggctgagatctccggtcccacaaccgcccacaaccaggggcacttctggaagtcccctttctagggacatttttcttctaagctctgtaacgcgggccgaggcagaccgaggcttctttcccggatccaatcccctgcccccatgcctaagaaagaaaaaatggccaagacgcccctgtccgatgagaagcagctgcttctgtttcagcagaagttgctggcagaggaggagatggccaaaaagaaggagaggctcctcagccagttcttgaaggacaagctggccaaggaggaacacaacagtgctctgaaccttaataagattaacacacagtggagaactgtccttcgggaagtcaagaccagagaacttcataaggacattgagatcctcagccaaacatttgaacgagtggtggactgtaaggacaatgtcatcaagtctttagctaaagacctgtccgaagccgaggagcagtacgcccatgccctgcgcagccacttgcacaatgttgaccagctcttggccctgcagaggcaccggctcagtctcctggaggaaagttacaacatggagctggaagccctaaccaaggagtttgagacagaaaggaagacaattattgaccaacatgagaaagagattcactatctgcaagatatcttcatggccatggagcagaactatatagattctgagtatgaaagcaagctggagttccagagcatgtggaatgatctcaaaaacatgaatttagaagagaagcactttctaagactgcacctggagaacagagtagaagatctgtggagaaagttccaggatgtactcaagaattacactgatgccacagaggatcgaaaggctgcctttgagaccctgcaggtgaaggatgagaagagctccaaagagattgaagtacagatgaaaaaaatacagaaactacaggatgccataactatttcaaaaggcaagatcatgatacacagccgtgagagtgaagatgagaaccggtatatccgtaatgacaaggaattggtccttgtacaactgcgaaaacttaaggcccaaagaactcaggcccgggcagcatcccagaagaacttagtcagactcaccctggaaagtaatgccaccctcaaggccctgagaaagattgttgataagggtgaaaagatccttaaacttgctgaaatatgtaggaaatttgaaaccgaagaagaaaaagtgctgcctttttattcatcagtattgactcctaaggagcaggaggggattcagaagaataatctagaagagcttactgaggagctcaccaaggtgatggtggactacataggaatggagaatttctggaaaaggtacaacaaagtgaaactggagcaactgagcctccaacatagacgagcccagctgctagatatcaatgggaagctgcgggagatgctgaagcagtacttggatggcatctcagtgagtgacgaagtgctgagccagctcaacccactctttatagtcaactatcaaagcaacttactccagcccttgtccatacgtatagcccatccaggcagcacaagcccatctgcaccctggagggaccagagaaggagctttttccttggatcaagttagaagaaatccaaacaacagagaaaggtgagatgattcttggaaagataggagagttggcccacccctggctggagatacaacttaatcacagaaccattgctagaaaagcctccacactcaaaggtgtctctgtcagtgtgtaggagaaaccctaccacagtacctgggcttccaagactcatggggcacccaccatgcccagcttgattaaagacaatggtgtttattaattcatccatttgttcatcaaggttgcatgactattatgtgccaaagaataagcagaacactgctctttaaatgttcttaagtgtttatttataacaggttgttaataaagtaaaagcctgagttggcatatat

SEQ ID NO: 121100 - DNA, 1775 bp, Homo sapiens
  Payload ID: 3741
  Gene Symbol: CCDC65
  Gene Name: coiled-coil domain containing 65
  Uniprot ID: Q8IXS2
  ENST ID: ENST00000320516
  CDS Start-End: 189-1643
gggagagctcagcctcactgatagccggggatctctcctgttcgagggctgagatctccggtcccacaaccgcccacaaccaggggcacttctggaagtcccctttctagggacatttttcttctaagctctgtaacgcgggccgaggcagaccgaggcttctttcccggatccaatcccctgcccccatgcctaagaaagaaaaaatggccaagacgcccctgtccgatgagaagcagctgcttctgtttcagcagaagttgctggcagaggaggagatggccaaaaagaaggagaggctcctcagccagttcttgaaggacaagctggccaaggaggaacacaacagtgctctgaaccttaataagattaacacacagtggagaactgtccttcgggaagtcaagaccagagaacttcataaggacattgagatcctcagccaaacatttgaacgagtggtggactgtaaggacaatgtcatcaagtctttagctaaagacctgtccgaagccgaggagcagtacgcccatgccctgcgcagccacttgcacaatgttgaccagctcttggccctgcagaggcaccggctcagtctcctggaggaaagttacaacatggagctggaagccctaaccaaggagtttgagacagaaaggaagacaattattgaccaacatgagaaagagattcactatctgcaagatatcttcatggccatggagcagaactatatagattctgagtatgaaagcaagctggagttccagagcatgtggaatgatctcaaaaacatgaatttagaagagaagcactttctaagactgcacctggagaacagagtagaagatctgtggagaaagttccaggatgtactcaagaattacactgatgccacagaggatcgaaaggctgcctttgagaccctgcaggtgaaggatgagaagagctccaaagagattgaagtacagatgaaaaaaatacagaaactacaggatgccataactatttcaaaaggcaagatcatgatacacagccgtgagagtgaagatgagaaccggtatatccgtaatgacaaggaattggtccttgtacaactgcgaaaacttaaggcccaaagaactcaggcccgggcagcatcccagaagaacttagtcagactcaccctggaaagtaatgccaccctcaaggccctgagaaagattgttgataagggtgaaaagatccttaaacttgctgaaatatgtaggaaatttgaaaccgaagaagaaaaagtgctgcctttttattcatcagtattgactcctaaggagcaggaggggattcagaagaataatctagaagagcttactgaggagctcaccaaggtgatggtggactacataggaatggagaatttctggaaaaggtacaacaaagtgaaactggagcaactgagcctccaacatagacgagcccagctgctagatatcaatgggaagctgcgggagatgctgaagcagtacttggatggcatctcagtgagtgacgaagtgctgagccagctcaacccactctttatagtcaactatcaaagcaacttactccagcccttgtccatacgtatagcccatccaggtgataaacaacatccaaccacttaaaatataattgaagcagcccagatgatcttccacaacctgtgatctaaggaaaaaaatctttcaactcctagagatttttttttttttttgagaaatgtagggatgttgctattaaaaatttccatggagttt

SEQ ID NO: 121101 - DNA, 1338 bp, Homo sapiens
  Payload ID: 3741
  Gene Symbol: CCDC65
  Gene Name: coiled-coil domain containing 65
  ENST ID: ENST00000552942
  CDS Start-End: 219-1338
gttgctaggagactagacgcgtcttacagtgggagagctcagcctcactgatagccggggatctctcctgttcgagggctgagatctccggtcccacaaccgcccacaaccaggggcacttctggaagtcccctttctagggacatttttcttctaagctctgtaacgcgggccgaggcagaccgaggcttctttcccggatccaatcccctgcccccatgcctaagaaagaaaaaatggccaagacgcccctgtccgatgagaagcagctgcttctgtttcagcagaagttgctggcagaggaggagatggccaaaaagaaggagaggctcctcagccagttcttgaaggacaagctggccaaggaggaacacaacagtgctctgaaccttaataagattaacacacagtggagaactgtccttcgggaagtcaagaccagagaacttcataaggacattgagatcctcagccaaacatttgaacgagtggtggactgtaaggacaatgtcatcaagaatttagaagagaagcactttctaagactgcacctggagaacagagtagaagatctgtggagaaagttccaggatgtactcaagaattacactgatgccacagaggatcgaaaggctgcctttgagaccctgcaggtgaaggatgagaagagctccaaagagattgaagtacagatgaaaaaaatacagaaactacaggatgccataactatttcaaaaggcaagatcatgatacacagccgtgagagtgaagatgagaaccggtatatccgtaatgacaaggaattggtccttgtacaactgcgaaaacttaaggcccaaagaactcaggcccgggcagcatcccagaagaacttagtcagactcaccctggaaagtaatgccaccctcaaggccctgagaaagattgttgataagggtgaaaagatccttaaacttgctgaaatatgtaggaaatttgaaaccgaagaagaaaaagtgctgcctttttattcatcagtattgactcctaaggagcaggaggggattcagaagaataatctagaagagcttactgaggagctcaccaaggtgatggtggactacataggaatggagaatttctggaaaaggtacaacaaagtgaaactggagcaactgagcctccaacatagacgagcccagctgctagatatcaatgggaagctgcgggagatgctgaagcagtacttggatggcatctcagtgagtgacgaagtgctgagccagctcaacccactctttatagtcaactatcaaagcaacttactccagcccttgtccatacgtatagcccatccag

SEQ ID NO: 121102 - DNA, 1746 bp, Homo sapiens
  Payload ID: 3741
  Gene Symbol: CCDC65
  Gene Name: coiled-coil domain containing 65
  ENST ID: ENST00000547861
  CDS Start-End: 205-333
agacgcgtcttacagtgggagagctcagcctcactgatagccggggatctctcctgttcgagggctgagatctccggtcccacaaccgcccacaaccaggggcacttctggaagtcccctttctagggacatttttcttctaagctctgtaacgcgggccgaggcagaccgaggcttctttcccggatccaatcccctgcccccatgcctaagaaagaaaaaatggccaagacgcccctgtccgatgagaagcagctgcttctgtttcagcagaagttgctggcagaggaggagatggccaaaaagaaggagaggaacacaacagtgctctgaaccttaataagattaacacacagtggagaactgtccttcgggaagtcaagaccagagaacttcataaggacattgagatcctcagccaaacatttgaacgagtggtggactgtaaggacaatgtcatcaagtctttagctaaagacctgtccgaagccgaggagcagtacgcccatgccctgcgcagccacttgcacaatgttgaccagctcttggccctgcagaggcaccggctcagtctcctggaggaaagttacaacatggagctggaagccctaaccaaggagtttgagacagaaaggaagacaattattgaccaacatgagaaagagattcactatctgcaagatatcttcatggccatggagcagaactatatagattctgagtatgaaagcaagctggagttccagagcatgtggaatgatctcaaaaacatgaatttagaagagaagcactttctaagactgcacctggagaacagagtagaagatctgtggagaaagttccaggatgtactcaagaattacactgatgccacagaggatcgaaaggctgcctttgagaccctgcaggtgaaggatgagaagagctccaaagagattgaagtacagatgaaaaaaatacagaaactacaggatgccataactatttcaaaaggcaagatcatgatacacagccgtgagagtgaagatgagaaccggtatatccgtaatgacaaggaattggtccttgtacaactgcgaaaacttaaggcccaaagaactcaggcccgggcagcatcccagaagaacttagtcagactcaccctggaaagtaatgccaccctcaaggccctgagaaagattgttgataagggtgaaaagatccttaaacttgctgaaatatgtaggaaatttgaaaccgaagaagaaaaagtgctgcctttttattcatcagtattgactcctaaggagcaggaggggattcagaagaataatctagaagagcttactgaggagctcaccaaggtgatggtggactacataggaatggagaatttctggaaaaggtacaacaaagtgaaactggagcaactgagcctccaacatagacgagcccagctgctagatatcaatgggaagctgcgggagatgctgaagcagtacttggatggcatctcagtgagtgacgaagtgctgagccagctcaacccactctttatagtcaactatcaaagcaacttactccagcccttgtccatacgtatagcccatccaggtgataaacaacatccaaccacttaaaatataattgaagcagcccagatgatcttccacaacctgtgatctaaggaaaaaaatctttcaactcctagagatttttttttttttttgagaaatgtagggatgttgctattaaaaatttccatgg

SEQ ID NO: 121103 - DNA, 3027 bp, Homo sapiens
  Payload ID: 3742
  Gene Symbol: CCDC66
  Gene Name: coiled-coil domain containing 66
  Uniprot ID: A2RUB6
  ENST ID: ENST00000326595
  CDS Start-End: 139-2883
aaccgacgtacacaaggggcttgagcgttctgtggagagagtgcgagagatggtttaaagcttgaaactgaattactggatggaaaaaccaagctaatattgtctccatatgaacataaatcaaaaatttctgtgaagatgggaaataaggccaagattgcaaaatgtcctttaagaacaaaaactgggcacattctaaaatcaacacaagatacttgtattgggagtgaaaaacttttgcaaaagaagccagttggttcagaaacatcacaggcaaaaggtgaaaaaaatggaatgactttttcatccactaaggatttatgtaaacaatgtatagataaagactgtcttcatatccagaaagagatttcacctgcaacccctaatatgcagaagactagaaacaccgtaaatacatctctagtaggtaaacagaagcctcacaaaaaacacatcacagctgaaaacatgaagagcagtttggtgtgtctaacacaagaccaactacaacagattttgatgactgtaaaccaaggaaatagatctctttccctgactgagaatggaaaggaggcaaaaagtcaatatagtctatatttaaacagtatttctaatcagccaaaggatgagaacattatgggattattcaaaaaaactgaaatggtttcatctgtcccagctgaaaataaatctgtcttaaatgaacatcaggagacatctaaacagtgtgagcaaaaaattgccatagagaatgaatggaaaccagctgatatattcagtactctgggggaaagggaatgtgatagaagttcgttggaagcaaaaaaagcccagtggaggaaagagctagatgaacaggttgctttaaagaagaaagaaaaagaagtttctgaaaaatggaatgatccttggaaaaaatctgaaagtgataaaataatatgggaaaaacatcaaattcttgaccaatctagggaaacagtactgctggagcaccctttcagtgctgtgaaacaagaactgcaaagaaaatggattgaagagttgaataagcaaatagaagatgaccgtcaaagaaaaatagaggaaaaaattatatattcaaagggtgaggaacatgacagatgggcaatgcactttgattcattaaagagttatcctggttctcaatctcagctgttctctcagtcaacacacaaacaacctgagtacttctgtgtctctcctgacactcaggagctggctgatgtcagcagtgtttgtacacctacaaccggaagccaggttgaaccttcagaggaggagcatatagcaaaacctattaaggatgtggttatggcaaacagtaagaaaacaaactttctccgttctatgactgctctcttggacccagctcagattgaggaacgagacagacgacgacaaaaacaattagagcatcagaaagccatcactgcccaggtagaagagaagcgcaggaagaaacaactggaggaagagcaaagaaagaaggaagaacaagaagaggagcttcgcttagcacaggaacgtgaagagatgcagaaacagtatgaagaagacatacttaagcaaaaacaaaaggaagaaatcatgactctcaagacaaatgagctattccagacaatgcagcgagcacaggaactggcacagagactaaaacaagaacaaagaatccgagaattggcgcaaaagggacatgacacttctagactgattaaaaatcttggtgttgatacaatacaaatggaatataatgcatctaacatttcaaattcaagacatgattctgatgaaatcagtggtaaaatgaatacatatatgaattctacgacttctaagaaggatactggtgtgcaaacagatgacttaaatataggaatattcaccaatgcagaatcacattgtggatcattaatggagagggacatcacaaattgttcatctcctgagatttcggcagaacttattggacagtttagcaccaagaaaaacaagcaagaactaactcaggataaaggagccagcttagaaaaagaaaacaatcggtgtaatgaccagtgtaatcagttcacaagaatagagaaacaaacaaaacacatgaagaaatatcctaaaaggcctgattggaatataaataagccacctaaaaggtatattccagcatcagaaaagtaccctaaacagcttcaaaagcagagagaagaaaaaaaagtaaggaggcagatggaattgcttcatttggtagaaaaaaataatcctgggcacctctctcaaaacagaggcatttcaccagaaatttttcattcatctcatcaagaaacggagtcaaagttgaggtggcatctagtcaaaaaggaagaagagcctctgaatattcattcattcagcaaggaaaggtctccatcatcaccagttccagtagtgaaaaacagaacccaacaaactcaaaatacattacatttaccactaaaaaacagtagctatgagagagagaatttgatctcaggaagtaatcaaacagaattatcatctgggatttctgaatcatcccattttattccgtatgttcgaacaaatgagatctattaccttgatcccgatgcaccattgtctgggccttcaacccaggaccctcagtaccaaaattcacaagactgtggccaaaaacgacagctatttgattctgactgtgtcagggatccacttcttaatcctaacatggtgaaaaatagggatcgacagcaagcaatccttaagggactttcagaactgagacagggccttctccagaagcaaaaggagttggaaagtagtctcctgcctttagctgaaaatcaagaagagagttttggttcttcattttaaatgtagaaaatcaaatccttcacatttgatttgtgtcttccaaattataaaatgtgctcactggctcaactgtatttttcaaatagcctagatttacttatttttttaaatgctcattaaaaacttgtatactatgtagtaaaa

SEQ ID NO: 121104 - DNA, 3042 bp, Homo sapiens
  Payload ID: 3742
  Gene Symbol: CCDC66
  Gene Name: coiled-coil domain containing 66
  ENST ID: ENST00000341455
  CDS Start-End: 25-717
gtggagagagtgcgaggtcaggccatgaacttgggagatggtttaaagcttgaaactgaattactggatggaaaaaccaagctaatattgtctccatatgaacataaatcaaaaatttctgtgaagatgggaaataaggccaagattgcaaaatgtcctttaagaacaaaaactgggcacattctaaaatcaacacaagatacttgtattgggagtgaaaaacttttgcaaaagaagccagttggttcagaaacatcacaggcaaaaggtgaaaaaaatggaatgactttttcatccactaaggatttatgtaaacaatgtatagataaagactgtcttcatatccagaaagagatttcacctgcaacccctaatatgcagaagactagaaacaccgtaaatacatctctagtaggtaaacagaagcctcacaaaaaacacatcacagctgaaaacatgaagagcagtttggtgtgtctaacacaagaccaactacaacagattttgatgactgtaaaccaaggaaatagatctctttccctgactgagaatggaaaggaggcaaaaagtcaatatagtctatatttaaacagtatttctaatcagccaaaggatgagaacattatgggattattcaaaaaaactgaaatggtttcatctgtcccagctgaaaataaatctgtcttaaatgaacatcaggagacatctaaacagtagagaatgaatggaaaccagctgatatattcagtactctgggggaaagggaatgtgatagaagttcgttggaagcaaaaaaagcccagtggaggaaagagctagatgaacaggttgctttaaagaagaaagaaaaagaagtttctgaaaaatggaatgatccttggaaaaaatctgaaagtgataaaataatatgggaaaaacatcaaattcttgaccaatctagggaaacagtactgctggagcaccctttcagtgctgtgaaacaagaactgcaaagaaaatggattgaagagttgaataagcaaatagaagatgaccgtcaaagaaaaatagaggaaaaaattatatattcaaagggtgaggaacatgacagatgggcaatgcactttgattcattaaagagttatcctggttctcaatctcagctgttctctcagtcaacacacaaacaacctgagtacttctgtgtctctcctgacactcaggagctggctgatgtcagcagtgtttgtacacctacaaccggaagccaggttgaaccttcagaggaggagcatatagcaaaacctattaaggatgtggttatggcaaacagtaagaaaacaaactttctccgttctatgactgctctcttggacccagctcagattgaggaacgagacagacgacgacaaaaacaattagagcatcagaaagccatcactgcccaggtagaagagaagcgcaggaagaaacaactggaggaagagcaaagaaagaaggaagaacaagaagaggagcttcgcttagcacaggaacgtgaagagatgcagaaacagtatgaagaagacatacttaagcaaaaacaaaaggaagaaatcatgactctcaagacaaatgagctattccagacaatgcagcgagcacaggaactggcacagagactaaaacaagaacaaagaatccgagaattggcgcaaaagggacatgacacttctagactgattaaaaatcttggtgttgatacaatacaaatggaatataatgcatctaacatttcaaattcaagacatgattctgatgaaatcagtggtaaaatgaatacatatatgaattctacgacttctaagaaggatactggtgtgcaaacagatgacttaaatataggaatattcaccaatgcagaatcacattgtggatcattaatggagagggacatcacaaattgttcatctcctgagatttcggcagaacttattggacagtttagcaccaagaaaaacaagcaagaactaactcaggataaaggagccagcttagaaaaagaaaacaatcggtgtaatgaccagtgtaatcagttcacaagaatagagaaacaaacaaaacacatgaagaaatatcctaaaaggcctgattggaatataaataagccacctaaaaggtatattccagcatcagaaaagtaccctaaacagcttcaaaagcagagagaagaaaaaaaagtaaggaggcagatggaattgcttcatttggtagaaaaaaataatcctgggcacctctctcaaaacagaggcatttcaccagaaatttttcattcatctcatcaagaaacggagtcaaagttgaggtggcatctagtcaaaaaggaagaagagcctctgaatattcattcattcagcaaggaaaggtctccatcatcaccagttccagtagtgaaaaacagaacccaacaaactcaaaatacattacatttaccactaaaaaacagtagctatgagagagagaatttgatctcaggaagtaatcaaacagaattatcatctgggatttctgaatcatcccattttattccgtatgttcgaacaaatgagatctattaccttgatcccgatgcaccattgtctgggccttcaacccaggaccctcagtaccaaaattcacaagactgtggccaaaaacgacagctatttgattctgactgtgtcagggatccacttcttaatcctaacatggtgaaaaatagggatcgacagcaagcaatccttaagggactttcagaactgagacagggccttctccagaagcaaaaggagttggaaagtagtctcctgcctttagctgaaaatcaagaagagagttttggttcttcattttaaatgtagaaaatcaaatccttcacatttgatttgtgtcttccaaattataaaatgtgctcactggctcaactgtatttttcaaatagcctagatttacttatttttttaaatgctcattaaaaacttgtatactatgtagtaaaatgctgtacttgttctatacaataaaacagatacttcttttgtaaaa

SEQ ID NO: 121105 - DNA, 3096 bp, Homo sapiens
  Payload ID: 3742
  Gene Symbol: CCDC66
  Gene Name: coiled-coil domain containing 66
  Uniprot ID: A2RUB6
  ENST ID: ENST00000394672
  CDS Start-End: 71-2917
ctgagcggcggcggcaaccgacgtacacaaggggcttgagcgttctgtggagagagtgcgaggtcaggccatgaacttgggagatggtttaaagcttgaaactgaattactggatggaaaaaccaagctaatattgtctccatatgaacataaatcaaaaatttctgtgaagatgggaaataaggccaagattgcaaaatgtcctttaagaacaaaaactgggcacattctaaaatcaacacaagatacttgtattgggagtgaaaaacttttgcaaaagaagccagttggttcagaaacatcacaggcaaaaggtgaaaaaaatggaatgactttttcatccactaaggatttatgtaaacaatgtatagataaagactgtcttcatatccagaaagagatttcacctgcaacccctaatatgcagaagactagaaacaccgtaaatacatctctagtaggtaaacagaagcctcacaaaaaacacatcacagctgaaaacatgaagagcagtttggtgtgtctaacacaagaccaactacaacagattttgatgactgtaaaccaaggaaatagatctctttccctgactgagaatggaaaggaggcaaaaagtcaatatagtctatatttaaacagtatttctaatcagccaaaggatgagaacattatgggattattcaaaaaaactgaaatggtttcatctgtcccagctgaaaataaatctgtcttaaatgaacatcaggagacatctaaacagtgtgagcaaaaaattgccatagagaatgaatggaaaccagctgatatattcagtactctgggggaaagggaatgtgatagaagttcgttggaagcaaaaaaagcccagtggaggaaagagctagatgaacaggttgctttaaagaagaaagaaaaagaagtttctgaaaaatggaatgatccttggaaaaaatctgaaagtgataaaataatatgggaaaaacatcaaattcttgaccaatctagggaaacagtactgctggagcaccctttcagtgctgtgaaacaagaactgcaaagaaaatggattgaagagttgaataagcaaatagaagatgaccgtcaaagaaaaatagaggaaaaaattatatattcaaagggtgaggaacatgacagatgggcaatgcactttgattcattaaagagttatcctggttctcaatctcagctgttctctcagtcaacacacaaacaacctgagtacttctgtgtctctcctgacactcaggagctggctgatgtcagcagtgtttgtacacctacaaccggaagccaggttgaaccttcagaggaggagcatatagcaaaacctattaaggatgtggttatggcaaacagtaagaaaacaaactttctccgttctatgactgctctcttggacccagctcagattgaggaacgagacagacgacgacaaaaacaattagagcatcagaaagccatcactgcccaggtagaagagaagcgcaggaagaaacaactggaggaagagcaaagaaagaaggaagaacaagaagaggagcttcgcttagcacaggaacgtgaagagatgcagaaacagtatgaagaagacatacttaagcaaaaacaaaaggaagaaatcatgactctcaagacaaatgagctattccagacaatgcagcgagcacaggaactggcacagagactaaaacaagaacaaagaatccgagaattggcgcaaaagggacatgacacttctagactgattaaaaatcttggtgttgatacaatacaaatggaatataatgcatctaacatttcaaattcaagacatgattctgatgaaatcagtggtaaaatgaatacatatatgaattctacgacttctaagaaggatactggtgtgcaaacagatgacttaaatataggaatattcaccaatgcagaatcacattgtggatcattaatggagagggacatcacaaattgttcatctcctgagatttcggcagaacttattggacagtttagcaccaagaaaaacaagcaagaactaactcaggataaaggagccagcttagaaaaagaaaacaatcggtgtaatgaccagtgtaatcagttcacaagaatagagaaacaaacaaaacacatgaagaaatatcctaaaaggcctgattggaatataaataagccacctaaaaggtatattccagcatcagaaaagtaccctaaacagcttcaaaagcagagagaagaaaaaaaagtaaggaggcagatggaattgcttcatttggtagaaaaaaataatcctgggcacctctctcaaaacagaggcatttcaccagaaatttttcattcatctcatcaagaaacggagtcaaagttgaggtggcatctagtcaaaaaggaagaagagcctctgaatattcattcattcagcaaggaaaggtctccatcatcaccagttccagtagtgaaaaacagaacccaacaaactcaaaatacattacatttaccactaaaaaacagtagctatgagagagagaatttgatctcaggaagtaatcaaacagaattatcatctgggatttctgaatcatcccattttattccgtatgttcgaacaaatgagatctattaccttgatcccgatgcaccattgtctgggccttcaacccaggaccctcagtaccaaaattcacaagactgtggccaaaaacgacagctatttgattctgactgtgtcagggatccacttcttaatcctaacatggtgaaaaatagggatcgacagcaagcaatccttaagggactttcagaactgagacagggccttctccagaagcaaaaggagttggaaagtagtctcctgcctttagctgaaaatcaagaagagagttttggttcttcattttaaatgtagaaaatcaaatccttcacatttgatttgtgtcttccaaattataaaatgtgctcactggctcaactgtatttttcaaatagcctagatttacttatttttttaaatgctcattaaaaacttgtatactatgtagtaaaatgctgtacttgttctatacaataaaacagatactt

SEQ ID NO: 121106 - DNA, 709 bp, Homo sapiens
  Payload ID: 3742
  Gene Symbol: CCDC66
  Gene Name: coiled-coil domain containing 66
  ENST ID: ENST00000439445
  CDS Start-End: 81-263
gtagcgcttgctgagcggcggcggcaaccgacgtacacaaggggcttgagcgttctgtggagagagtgcgaggtcaggccatgaacttgggagatggtttaaagcttgaaactgaattactggatggaaaaaccaagctaatattgtctccatatgaacataaatcaaaaatttctgtgaagtgtcttaaagtctttgcttgtctgtggatagaacccagtttggatgatgtaccactttatccttcaactctaagcccttgatggctttacttgcaggtttaattaaggtgaagaagttgctggagtacccgaaatatcactcaataaatagatgggaaataaggccaagattgcaaaatgtcctttaagaacaaaaactgggcacattctaaaatcaacacaagatacttgtattgggagtgaaaaacttttgcaaaagaagccagttggttcagaaacatcacaggcaaaagaaagagatttcacctgcaacccctaatatgcagaagactagaaacaccgtaaatacatctctagtaggtaaacagaagcctcacaaaaaacacatcacagctgaaaacatgaagagcagtttggtgtgtctaacacaagaccaactacaacagattttgatgactgtaaaccaaggaaatagatctctttccctgactgagaatggaaaggaggcaaaaagtaagatttttcta

SEQ ID NO: 121107 - DNA, 2413 bp, Homo sapiens
  Payload ID: 3742
  Gene Symbol: CCDC66
  Gene Name: coiled-coil domain containing 66
  ENST ID: ENST00000434467
  CDS Start-End: 34-216
gagcgttctgtggagagagtgcgaggtcaggccatgaacttgggagatggtttaaagcttgaaactgaattactggatggaaaaaccaagctaatattgtctccatatgaacataaatcaaaaatttctgtgaagtgtcttaaagtctttgcttgtctgtggatagaacccagtttggatgatgtaccactttatccttcaactctaagcccttgatggctttacttgcaggtttaattaaggtgaagaagttgctggagtacccgaaatatcactcaataaatagatgggaaataaggccaagattgcaaaatgtcctttaagaacaaaaactgggcacattctaaaatcaacacaagatacttgtattgggagtgaaaaacttttgcaaaagaagccagttggttcagaaacatcacaggcaaaaggtgaaaaaaatggaatgactttttcatccactaaggatttatgtaaacaatgtatagataaagactgtcttcatatccagaaagagatttcacctgcaacccctaatatgcagaagactagaaacaccgtaaatacatctctagtaggtaaacagaagcctcacaaaaaacacatcacagctgaaaacatgaagagcagtttggtgtgtctaacacaagaccaactacaacagattttgatgactgtaaaccaaggaaatagatctctttccctgactgagaatggaaaggaggcaaaaagtcaatatagtctatatttaaacagtatttctaatcagccaaaggatgagaacattatgggattattcaaaaaaactgaaatggtttcatctgtcccagctgaaaataaatctgtcttaaatgaacatcaggagacatctaaacagtagagaatgaatggaaaccagctgatatattcagtactctgggggaaagggaatgtgatagaagttcgttggaagcaaaaaaagcccagtggaggaaagagctagttttgcagactgtacaagcatggtaccagcatctcctcggcttctggtgaggcctcaggaagcttttactcacggtggaaggcaaagggggagcaggcattttacatggcaagagagatgccaggctcttttacacaaccagctctcatgtgaactgacagagggagaactcaagcatcatcccaaggggatggcaccaagccattcatgagggattcatctcctgtgacccaaacacctccccttaggccccacctccaacactggggaatcacatttcaacatgagatttgaaggggacaaatatccaaactgtatcatcaaggtaaaagaagaatgaagagattaaacttatgttagcagtatcagaaggtttggcggtcttgatgtgtgtttatatcacaatttcatctttaaatattttctttcagcacattccacatcaaaatgcaataccaaatgtctgaaataatatggaactacttggaaatgaccagaatattttgtgctttaatcatttttgttgttgttgttgttttgagacggagtttcattcttgttgcccaagctggagtgcaatggcaccatctcagctcactgcaacctctgcttgctgggttcaagtgattctcctgcctcagcctcctgagtagctgggattacaggcacctgccaccatgcccaacttactttttgtatctttagtagagacagggtttcaccatgttggccaggctggtctcaaactcctaacctcaggtgatccgcctgccttggcctcccgaagtgctgtgattacagttgtgagccaccacacctggccttatgctttaattattttaaaaatcagtttactgtttttttaacttgtctcagtaaagtgcctctatttaagtcatgcttccagtaacattcttggaatttaaatttatacaacattgaattttgtatttaaagaactactgttgattggggggttagttttgactatatctctcagacacaggcttttatgttttttacttgtcagcaattaagaaataatagctaacattcattgaatatttactttgtgccaagccctatattgagataggcactattattatccccattttatagaagaaaccaaggcttagaaagcttaccagcagttggccaactgcggtgggctcatgcctgtaatcctaccacgttgggaggccgaggcaggtggatcacaaggtcaggaaatagagaccatcctagccaacatggtgaaaccacatctccactaaaatacaaaaattagccgggcgtggtggtgctgcctgtagccccagctactcaggaggctgaggcaggggaatcgcttgaacctgggaggcggagattgcagtgagctgagatagcgccattgcactccaggctgctgacagaatgagactctatatt

SEQ ID NO: 121108 - DNA, 1983 bp, Homo sapiens
  Payload ID: 3742
  Gene Symbol: CCDC66
  Gene Name: coiled-coil domain containing 66
  ENST ID: ENST00000422222
  CDS Start-End: 83-1983
gcgtagcgcttgctgagcggcggcggcaaccgacgtacacaaggggcttgagcgttctgtggagagagtgcgaggtcaggccatgaacttgggagatggtttaaagcttgaaactgaattactggatggaaaaaccaagctaatattgtctccatatgaacataaatcaaaaatttctgtgaagatgggaaataaggccaagattgcaaaatgtcctttaagaacaaaaactgggcacattctaaaatcaacacaagatacttgtattgggagtgaaaaacttttgcaaaagaagccagttggttcagaaacatcacaggcaaaaggtgaaaaaaatggaatgactttttcatccactaaggatttatgtaaacaatgtatagataaagactgtcttcatatccagaaagagatttcacctgcaacccctaatatgcagaagactagaaacaccgtaaatacatctctagtaggtaaacagaagcctcacaaaaaacacatcacagctgaaaacatgaagagcagtttggtgtgtctaacacaagaccaactacaacagattttgatgactgtaaaccaaggaaatagatctctttccctgactgagaatggaaaggaggcaaaaagtcaatatagtctatatttaaacagtatttctaatcagccaaaggatgagaacattatgggattattcaaaaaaactgaaatggtttcatctgtcccagctgaaaataaatctgtcttaaatgaacatcaggagacatctaaacagtgtgagcaaaaaattgccatagagaatgaatggaaaccagctgatatattcagtactctgggggaaagggaatgtgatagaagttcgttggaagcaaaaaaagcccagtggaggaaagagctagatgaacaggttgctttaaagaagaaagaaaaagaagtttctgaaaaatggaatgatccttggaaaaaatctgaaagtgataaaataatatgggaaaaacatcaaattcttgaccaatctaggggtgaggaacatgacagatgggcaatgcactttgattcattaaagagttatcctggttctcaatctcagctgttctctcagtcaacacacaaacaacctgagtacttctgtgtctctcctgacactcaggagctggctgatgtcagcagtgtttgtacacctacaaccggaagccaggttgaaccttcagaggaggagcatatagcaaaacctattaaggatgtggttatggcaaacagtaagaaaacaaactttctccgttctatgactgctctcttggacccagctcagattgaggaacgagacagacgacgacaaaaacaattagagcatcagaaagccatcactgcccaggtagaagagaagcgcaggaagaaacaactggaggaagagcaaagaaagaaggaagaacaagaagaggagcttcgcttagcacaggaacgtgaagagatgcagaaacagtatgaagaagacatacttaagcaaaaacaaaaggaagaaatcatgactctcaagacaaatgagctattccagacaatgcagcgagcacaggaactggcacagagactaaaacaagaacaaagaatccgagaattggcgcaaaagggacatgacacttctagactgattaaaaatcttggtgttgatacaatacaaatggaatataatgcatctaacatttcaaattcaagacatgattctgatgaaatcagtggtaaaatgaatacatatatgaattctacgacttctaagaaggatactggtgtgcaaacagatgacttaaatataggaatattcaccaatgcagaatcacattgtggatcattaatggagagggacatcacaaattgttcatctcctgagatttcggcagaacttattggacagtttagcaccaagaaaaacaagcaagaactaactcaggataaaggagccagcttagaaaaagaaaacaatcggtgtaa

SEQ ID NO: 121109 - DNA, 762 bp, Homo sapiens
  Payload ID: 3742
  Gene Symbol: CCDC66
  Gene Name: coiled-coil domain containing 66
  ENST ID: ENST00000422788
  CDS Start-End: 25-141
gtggagagagtgcgaggtcaggccatgaacttgggagatggtttaaagcttgaaactgaattactggatggaaaaaccaagctaatattgtctccatatgaacataaatcaaaaatttctgtgaaggctgatttgttatagaagccacatttgtgaagacattttattgtcattttaaccaactcagaacatctgaagatcccctttataggcctataataaacagaattactggtcttggatttttgatgggaaataaggccaagattgcaaaatgtcctttaagaacaaaaactgggcacattctaaaatcaacacaagatacttgtattgggagtgaaaaacttttgcaaaagaagccagttggttcagaaacatcacaggcaaaaggtgaaaaaaatggaatgactttttcatccactaaggatttatgtaaacaatgtatagataaagactgtcttcatatccagaaagagatttcacctgcaacccctaatatgcagaagactagaaacaccgtaaatacatctctagtaggtaaacagaagcctcacaaaaaacacatcacagctgaaaacatgaagagcagtttggtgtgtctaacacaagaccaactacaacagattttgatgactgtaaaccaaggaaatagatctctttccctgactgagaatggaaaggaggcaaaaactgggcatagagacaattcatgaaaaggttttccactgatttcacagctaaataagaaaaataacgtcaagg

SEQ ID NO: 121110 - DNA, 3120 bp, Homo sapiens
  Payload ID: 3742
  Gene Symbol: CCDC66
  Gene Name: coiled-coil domain containing 66
  ENST ID: ENST00000471681
  CDS Start-End: 116-979
agcgttctgtggagagagtgcgagagatggtttaaagcttgaaactgaattactggatggaaaaaccaagctaatattgtctccatatgaacataaatcaaaaatttctgtgaagatgggaaataaggccaagattgcaaaatgtcctttaagaacaaaaactgggcacattctaaaatcaacacaagatacttgtattgggagtgaaaaacttttgcaaaagaagccagttggttcagaaacatcacaggcaaaaggtgaaaaaaatggaatgactttttcatccactaaggatttatgtaaacaatgtatagataaagactgtcttcatatccagaaagagatttcacctgcaacccctaatatgcagaagactagaaacaccgtaaatacatctctagtaggtaaacagaagcctcacaaaaaacacatcacagctgaaaacatgaagagcagtttggtgtgtctaacacaagaccaactacaacagattttgatgactgtaaaccaaggaaatagatctctttccctgactgagaatggaaaggaggcaaaaagtcaatatagtctatatttaaacagtatttctaatcagccaaaggatgagaacattatgggattattcaaaaaaactgaaatggtttcatctgtcccagctgaaaataaatctgtcttaaatgaacatcaggagacatctaaacagtgtgagcaaaaaattgccatagagaatgaatggaaaccagctgatatattcagtactctgggggaaagggaatgtgatagaagttcgttggaagcaaaaaaagcccagtggaggaaagagctagatgaacaggttgctttaaagaagaaagaaaaagaagtttctgaaaaatggaatgatccttggaaaaaatctgaaagtgataaaataatatgggaaaaacatcaaattcttgaccaatctaggctcttcaagcattctatcacagtctcgtagccaggttatggtggtccaagctgatggggcattcacaacttagagctagtcagactttagaggaaacagtactgctggagcaccctttcagtgctgtgaaacaagaactgcaaagaaaatggattgaagagttgaataagcaaatagaagatgaccgtcaaagaaaaatagaggaaaaaattatatattcaaagggtgaggaacatgacagatgggcaatgcactttgattcattaaagagttatcctggttctcaatctcagctgttctctcagtcaacacacaaacaacctgagtacttctgtgtctctcctgacactcaggagctggctgatgtcagcagtgtttgtacacctacaaccggaagccaggttgaaccttcagaggaggagcatatagcaaaacctattaaggatgtggttatggcaaacagtaagaaaacaaactttctccgttctatgactgctctcttggacccagctcagattgaggaacgagacagacgacgacaaaaacaattagagcatcagaagagaagcgcaggaagaaacaactggaggaagagcaaagaaagaaggaagaacaagaagaggagcttcgcttagcacaggaacgtgaagagatgcagaaacagtatgaagaagacatacttaagcaaaaacaaaaggaagaaatcatgactctcaagacaaatgagctattccagacaatgcagcgagcacaggaactggcacagagactaaaacaagaacaaagaatccgagaattggcgcaaaagggacatgacacttctagactgattaaaaatcttggtgttgatacaatacaaatggaatataatgcatctaacatttcaaattcaagacatgattctgatgaaatcagtggtaaaatgaatacatatatgaattctacgacttctaagaaggatactggtgtgcaaacagatgacttaaatataggaatattcaccaatgcagaatcacattgtggatcattaatggagagggacatcacaaattgttcatctcctgagatttcggcagaacttattggacagtttagcaccaagaaaaacaagcaagaactaactcaggataaaggagccagcttagaaaaagaaaacaatcggtgtaatgaccagtgtaatcagttcacaagaatagagaaacaaacaaaacacatgaagaaatatcctaaaaggcctgattggaatataaataagccacctaaaaggtatattccagcatcagaaaagtaccctaaacagcttcaaaagcagagagaagaaaaaaaagtaaggaggcagatggaattgcttcatttggtagaaaaaaataatcctgggcacctctctcaaaacagaggcatttcaccagaaatttttcattcatctcatcaagaaacggagtcaaagttgaggtggcatctagtcaaaaaggaagaagagcctctgaatattcattcattcagcaaggaaaggtctccatcatcaccagttccagtagtgaaaaacagaacccaacaaactcaaaatacattacatttaccactaaaaaacagtagctatgagagagagaatttgatctcaggaagtaatcaaacagaattatcatctgggatttctgaatcatcccattttattccgtatgttcgaacaaatgagatctattaccttgatcccgatgcaccattgtctgggccttcaacccaggaccctcagtaccaaaattcacaagactgtggccaaaaacgacagctatttgattctgactgtgtcagggatccacttcttaatcctaacatggtgaaaaatagggatcgacagcaagcaatccttaagggactttcagaactgagacagggccttctccagaagcaaaaggagttggaaagtagtctcctgcctttagctgaaaatcaagaagagagttttggttcttcattttaaatgtagaaaatcaaatccttcacatttgatttgtgtcttccaaattataaaatgtgctcactggctcaactgtatttttcaaatagcctagatttacttatttttttaaatgctcattaaaaacttgtatactatgtagtaaaatgctgtacttgttctatacaataaaacagatacttcttttgtaaaa

SEQ ID NO: 121111 - DNA, 2664 bp, Homo sapiens
  Payload ID: 3743
  Gene Symbol: CCDC67
  Gene Name: coiled-coil domain containing 67
  Uniprot ID: Q05D60
  ENST ID: ENST00000298050
  CDS Start-End: 101-1915
atacgcggtcctgcgccctcgcctcagacctctcgggcgagcgcggcgcagcgcagattaaaaatcaagaaatataaaccagatgtagcagtttcttgacatggagaaccaagcccataatacgatgggaacttctccttgtgaggctgagcttcaggaattaatggaacaaattgacatcatggtaagcaacaagaaaatggattgggaaagaaagatgcgggctttggagacacgattagatcttcgggatcaagaattggcaaatgcacaaacttgtttggatcagaaaggtcaagaggtagggttacttcgacagaaattggacagtctggaaaaatgtaatttagcaatgactcagaattatgaaggacaactacaaagcctaaaggctcaattttccaaactaacaaataactttgaaaaactgagattacatcagatgaaacaaaacaaagttccacgaaaagaattaccacaccttaaagaagaaataccctttgaactgagcaatttgaaccagaaattagaggaatttagagcaaagtcaagagaatgggacaagcaagagatattatatcagactcatctgatttctttagatgctcaacaaaaattattatctgagaagtgtaatcagtttcagaaacaggcacaaagttaccaaactcaactaaatggtaaaaaacagtgcttagaagacagcagctctgaaattcctcgtttgatatgtgacccagatcccaattgtgaaatcaatgaaagagatgagttcattattgaaaaactgaaatcagctgtaaatgagatagcactaagcaggaataaattacaagatgaaaatcagaagctcttgcaagaactgaaaatgtaccaaagacagtgccaggccatggaagcaggtctctcagaggtaaaaagtgagttacagtcacgtgatgatctcttgagaattatagaaatggaacgattgcaattacacagagaattattaaaaataggagagtgccaaaatgctcaaggaaataaaacaagacttgaatcatcttatttgccttctattaaagaaccagaaaggaaaataaaagagctgttttcagtgatgcaagatcaaccaaatcatgaaaaagaattgaacaagataagaagccaactccaacaggtggaagagtaccataactctgagcaggaaagaatgaggaatgaaatctctgacctaacagaagagcttcatcagaaggagatcactatagcaactgtcacaaagaaagctgcccttctggaaaaacagttaaaaatggaattagaaataaaagaaaaaatgttagcaaaacaaaaggtctcagatatgaaatataaagctgtcagaactgaaaacacacatctaaaaggaatgatgggagatttagaccccggagaatacatgagtatggacttcactaacagggaacagtcaaggcatacatctattaataaactgcaatatgagaatgaaaggctccgaaatgatcttgcaaaacttcatgtcaatggaaaatcaacctggactaatcaaaacacctatgaagaaacaggaagatatgcctatcaaagccaaataaaagtggaacaaaatgaagagagacttagtcatgactgtgagccaaacagaagtacaatgcctcccttgccaccttcgacatttcaagccaaagaaatgacaagtcctttggttagtgatgatgatgtattcccactgtctcccccagatatgtccttcccagcatctttggctgcacagcatttccttctggaagaagagaaacgagcaaaagaacttgaaaaacttctaaatacacatattgatgaactgcaaagacacacagaatttactcttaataaatactccaagctaaaacaaaatagacacatatgagcttttaaacttttttatttgcttcccccccccacccccgccaagaaaaaaagctctggcaaaatatttacaaagctgattaatgaaaccaagaaattctgttctgtttccttgagtaaataatttccgtaaggcagctagaaaatagtaagtattttgttctataaagctgttcacatttctgcattaacatgctaaattgtcctgctgtagagttactataaaataaacatgactattccaaaagagatttttttccagtctaaggaatattttggaatcaaatatgcagttttttttccccacttgaatcatgtatactgaaaacccatttcctcagcaactacacaaaataagagaaagggaagtgctatattccagatacaaatgactcaaaggcagctcagttgtactggttttgaaaactcaaggattttataaataaaaatatttaagtatttccagttatgtaaacactctaaaattctataattttttggaaaaaaaaagctatagctttattgtttttacattcacctttataatgtctgtctgtttcaacacaatgaaggtatatggaatgtgcaatttacaaacctaaaatatatgtgccaaaaattaacgcttttttgttagtactaattacttcatggacacaaacaagataaaggaaatataaagcattactgttgctacattttcctttgtaatcacttctgtttttaatacaataaaggaatgtaaaattc

SEQ ID NO: 121112 - DNA, 1871 bp, Homo sapiens
  Payload ID: 3743
  Gene Symbol: CCDC67
  Gene Name: coiled-coil domain containing 67
  ENST ID: ENST00000530862
  CDS Start-End: 211-1871
ctcctcttagaagctattctcttctccctgaagggaggcaacactgtccgttcgcctgactggcagtgttttaaggacccatcgcgcttgacgggaaagtcagattaaaaatcaagaaatataaaccagatgtagcagtttcttgacatggagaaccaagcccataatacgatgggaacttctccttgtgaggctgagcttcaggaattaatggaacaaattgacatcatggtaagcaacaagaaaatggattgggaaagaaagatgcgggctttggagacacgattagatcttcgggatcaagaattggcaaatgcacaaacttgtttggatcagaaaggtcaagaggtagggttacttcgacagaaattggacagtctggaaaaatgtaatttagcaatgactcagaattatgaaggacaactacaaagcctaaaggctcaattttccaaactaacaaataactttgaaaaactgagattacatcagatgaaacaaaacaaagttccacgaaaagaattaccacaccttaaagaagaaataccctttgaactgagcaatttgaaccagaaattagaggaatttagagcaaagtcaagagaatgggacaagcaagagatattatatcagactcatctgatttctttagatgctcaacaaaaattattatctgagaagtgtaatcagtttcagaaacaggcacaaagttaccaaactcaactaaatggtaaaaaacagtgcttagaagacagcagctctgaaattcctcgtttgatatgtgacccagatcccaattgtgaaatcaatgaaagagatgagttcattattgaaaaactgaaatcagctgtaaatgagatagcactaagcaggaataaattacaagatgaaaatcagaagctcttgcaagaactgaaaatgtaccaaagacagtgccaggccatggaagcaggtctctcagaggtaaaaagtgagttacagtcacgtgatgatctcttgagaattatagaaatggaacgattgcaattacacagagaattattaaaaataggagagtgccaaaatgctcaaggaaataaaacaagacttgaatcatcttatttgccttctattaaagaaccagaaaggaaaataaaagagctgttttcagtgatgcaagatcaaccaaatcatgaaaaagaattgaacaagataagaagccaactccaacaggtggaagagtaccataactctgagcaggaaagaatgaggaatgaaatctctgacctaacagaagagcttcatcagaaggagatcactatagcaactgtcacaaagaaagctgcccttctggaaaaacagttaaaaatggaattagaaataaaagaaaaaatgttagcaaaacaaaaggtctcagatatgaaatataaagctgtcagaactgaaaacacacatctaaaaggaatgatgggagatttagaccccggagaatacatgagtatggacttcactaacagggaacagtcaaggcatacatctattaataaactgcaatatgagaatgaaaggctccgaaatgatcttgcaaaacttcatgtcaatggaaaatcaacctggactaatcaaaacacctatgaagaaacaggaagatatgcctatcaaagccaaataaaagtggaacaaaatgaagagagacttagtcatgactgtgagccaaacagaagtacaatgcctcccttgccaccttcgacatttcaagccaaagaaatgacaagtcctttggttagtgatgatgatgtattcccactggtgagttgctggttgtgggctttttttttctttaatgggttattgctttactcttacactgatgtcaataaactgacgtacatagt

SEQ ID NO: 121113 - DNA, 2588 bp, Homo sapiens
  Payload ID: 3743
  Gene Symbol: CCDC67
  Gene Name: coiled-coil domain containing 67
  ENST ID: ENST00000534747
  CDS Start-End: 48-1094
cagattaaaaatcaagaaatataaaccagatgtagcagtttcttgacatggagaaccaagcccataatacgatgggaacttctccttgtgaggctgagcttcaggaattaatggaacaaattgacatcatggtaagcaacaagaaaatggattgggaaagaaagatgcgggctttggagacacgattagatcttcgggatcaagaattggcaaatgcacaaacttgtttggatcagaaaggtcaagaggtagggttacttcgacagaaattggacagtctggaaaaatgtaatttagcaatgactcagaattatgaaggacaactacaaagcctaaaggctcaattttccaaactaacaaataactttgaaaaactgagattacatcagatgaaacaaaacaaagttccacgaaaagaattaccacaccttaaagaagaaataccctttgaactgagcaatttgaaccagaaattagaggaatttagagcaaagtcaagagaatgggacaagcaagagatattatatcagactcatctgatttctttagatgctcaacaaaaattattatctgagaagtgtaatcagtttcagaaacaggcacaaagttaccaaactcaactaaatggtaaaaaacagtgcttagaagacagcagctctgaaattcctcgtttgatatgtgacccagatcccaattgtgaaatcaatgaaagagatgagttcattattgaaaaactgaaatcagctgtaaatgagatagcactaagcaggaataaattacaagatgaaaatcagaagctcttgcaagaactgaaaatgtaccaaagacagtgccaggccatggaagcaggtctctcagaggtaaaaagtgagttacagtcacgtgatgatctcttgagaattatagaaatggaacgattgcaattacacagagaattattaaaaataggagagtgccaaaatgctcaaggaaataaaacaagacttgaatcatcttatttgccttctattaaagaaccagaaaggaaaataaaagagctgttttcagtgatgcaagatcaaccaaatcatgaaaaagaattgaacaagagataagaagccaactccaacaggtggaagagtaccataactctgagcaggaaagaatgaggaatgaaatctctgacctaacagaagagcttcatcagaaggagatcactatagcaactgtcacaaagaaagctgcccttctggaaaaacagttaaaaatggaattagaaataaaagaaaaaatgttagcaaaacaaaaggtctcagatatgaaatataaagctgtcagaactgaaaacacacatctaaaaggaatgatgggagatttagaccccggagaatacatgagtatggacttcactaacagggaacagtcaaggcatacatctattaataaactgcaatatgagaatgaaaggctccgaaatgatcttgcaaaacttcatgtcaatggaaaatcaacctggactaatcaaaacacctatgaagaaacaggaagatatgcctatcaaagccaaataaaagtggaacaaaatgaagagaggtatgctggctccattatataagggcataactctgtattcctcactcacttttctttctttctctctttagtctcccccagatatgtccttcccagcatctttggctgcacagcatttccttctggaagaagagaaacgagcaaaagaacttgaaaaacttctaaatacacatattgatgaactgcaaagacacacagaatttactcttaataaatactccaagctaaaacaaaatagacacatatgagcttttaaacttttttatttgcttcccccccccacccccgccaagaaaaaaagctctggcaaaatatttacaaagctgattaatgaaaccaagaaattctgttctgtttccttgagtaaataatttccgtaaggcagctagaaaatagtaagtattttgttctataaagctgttcacatttctgcattaacatgctaaattgtcctgctgtagagttactataaaataaacatgactattccaaaagagatttttttccagtctaaggaatattttggaatcaaatatgcagttttttttccccacttgaatcatgtatactgaaaacccatttcctcagcaactacacaaaataagagaaagggaagtgctatattccagatacaaatgactcaaaggcagctcagttgtactggttttgaaaactcaaggattttataaataaaaatatttaagtatttccagttatgtaaacactctaaaattctataattttttggaaaaaaaaagctatagctttattgtttttacattcacctttataatgtctgtctgtttcaacacaatgaaggtatatggaatgtgcaatttacaaacctaaaatatatgtgccaaaaattaacgcttttttgttagtactaattacttcatggacacaaacaagataaaggaaatataaagcattactgttgctacattttcctttgtaatcacttctgtttttaatacaataaaggaatgtaaaattcaatggacttgaagcataaa

SEQ ID NO: 121114 - DNA, 767 bp, Homo sapiens
  Payload ID: 3743
  Gene Symbol: CCDC67
  Gene Name: coiled-coil domain containing 67
  ENST ID: ENST00000527307
  CDS Start-End: 39-359
aatcaagaaatataaaccagatgtagcagtttcttgacatggagaaccaagcccataatacgatgggaacttctccttgtgaggctgagcttcaggaattaatggaacaaattgacatcatggtaagcaacaagaaaatggattgggaaagaaagatgcgggctttggagacacgattagatcttcgggatcaagaattggcaaatgcacaaacttgtttggatcagaaaggtcaagaggtagggttacttcgacagaaattggacagtctggaaaaatgtaatttagcaatgactcagaattatgaaggacaactacaaagcctaaaggctcaagtaagaaaacttattataatttaatatcacacattttgatatatttttttttacctgtagagttgtgttaactttaaactgttttcagtataaacaaatgtcttgtattttaattataagcttggtcatgtctttccctgttttatatgcattgattttgtctcttactagattgttgtcttgctatattttctgtgcctctgttagcacagtagtagacaaatggctttctatttctcaagagacttgttgatgaattaaataataattagctcacaaaaaataattctgtgagcaacaacaaaaaacaattattttttgtggttattactatctaataaagatgttctcaattctgtgataatttaaaatgtggaagtttgctgttatgaaatagataattgaaataataaaactggtctttattacctt

SEQ ID NO: 121115 - DNA, 410 bp, Homo sapiens
  Payload ID: 3743
  Gene Symbol: CCDC67
  Gene Name: coiled-coil domain containing 67
  ENST ID: ENST00000530273
  CDS Start-End: 173-334
ggcccaggcggcgggagcgcggcggcgggtggcggggccccttggggcgggcctggcggggcgggaggtgacatacgcggtcctgcgccctcgcctcagacctctcgggcgagcgcggcgcagcgcagattaaaaatcaagaaatataaaccagatgtagcagtttcttgacatggagaaccaagcccataatacgatggggctgaagtgtaagacctcaataactacctgcttatccagtctgagtgactggacttacaccagctccctggagaatgcttcagcttctttgaaaaagaactctgtagtgagagcacttaccaatctgtcttaacaacagttgctatagtcctagctgttatactaagcattttgtttgaaactcaataaaccctcctggacccaagata

SEQ ID NO: 121116 - DNA, 1656 bp, Homo sapiens
  Payload ID: 3743
  Gene Symbol: CCDC67
  Gene Name: coiled-coil domain containing 67
  ENST ID: ENST00000531792
  CDS Start-End: 289-1626
agaagctattctcttctccctgaagggaggcaacactgtccgttcgcctgactggcagtgttttaaggacccatcgcgcttgacgggaaagtcaggtacaagctgatgctgttatcaccacaggaaccaggggctgagcggtgaaatccagctcctcccagctggaagacgctagggtgaacggagataaaagcagttctctttacccgaagtttatttctttttcatgccacttcaaatttggattaaaaatcaagaaatataaaccagatgtagcagtttcttgacatggagaaccaagcccataatacgatgggaacttctccttgtgaggctgagcttcaggaattaatggaacaaattgacatcatggtaagcaacaagaaaatggattgggaaagaaagatgcgggctttggagacacgattagatcttcgggatcaagaattggcaaatgcacaaacttgtttggatcagaaaggtcaagaggtagggttacttcgacagaaattggacagtctggaaaaatgtaatttagcaatgactcagaattatgaaggacaactacaaagcctaaaggctcaattttccaaactaacaaataactttgaaaaactgagattacatcagatgaaacaaaacaaagttccacgaaaagaattaccacaccttaaagaagaaataccctttgaactgagcaatttgaaccagaaattagaggaatttagagcaaagtcaagagaatgggacaagcaagagatattatatcagactcatctgatttctttagatgctcaacaaaaattattatctgagaagtgtaatcagtttcagaaacaggcacaaagttaccaaactcaactaaatggtaaaaaacagtgcttagaagacagcagctctgaaattcctcgtttgatatgtgacccagatcccaattgtgaaatcaatgaaagagatgagttcattattgaaaaactgaaatcagctgtaaatgagatagcactaagcaggaataaattacaagatgaaaatcagaagctcttgcaagaactgaaaatgtaccaaagacagtgccaggccatggaagcaggtctctcagaggtaaaaagtgagttacagtcacgtgatgatctcttgagaattatagaaatggaacgattgcaattacacagagaattattaaaaataggagagtgccaaaatgctcaaggaaataaaacaagacttgaatcatcttatttgccttctattaaagaaccagaaaggaaaataaaagagctgttttcagtgatgcaagatcaaccaaatcatgaaaaagaattgaacaagataagaagccaactccaacaggtggaagagtaccataactctgagcaggaaagaatgaggaatgaaatctctgacctaacagaagagcttcatcagaaggagatcactatagcaactgtcacaaagaaagctgcccttctggaaaaacagttaaaaatggaattagaaataaaagaaaaaatgttagcaaaacaaaaggtctcagatatgaaatataaagctgtcagaactgaaaacacacatctaaaaggaatgatgggagatttagaccccggagaatacatggtaatatgctgacatcattcaataaattgaacaaagagatta

SEQ ID NO: 121117 - DNA, 1031 bp, Homo sapiens
  Payload ID: 3743
  Gene Symbol: CCDC67
  Gene Name: coiled-coil domain containing 67
  ENST ID: ENST00000532819
  CDS Start-End: 45-1031
attaaaaatcaagaaatataaaccagatgtagcagtttcttgacatggagaaccaagcccataatacgatgggaacttctccttgtgaggctgagcttcaggaattaatggaacaaattgacatcatggtaagcaacaagaaaatggattgggaaagaaagatgcgggctttggagacacgattagatcttcgggatcaagaattggcaaatgcacaaacttgtttggatcagaaaggtcaagaggtagggttacttcgacagaaattggacagtctggaaaaatgtaatttagcaatgactcagaattatgaaggacaactacaaagcctaaaggctcaattttccaaactaacaaataactttgaaaaactgagattacatcagatgaaacaaaacaaagttccacgaaaagaattaccacaccttaaagaagaaataccctttgaactgagcaatttgaaccagaaattagaggaatttagagcaaagtcaagagaatgggacaagcaagagatattatatcagactcatctgatttctttagatgctcaacaaaaattattatctgagaagtgtaatcagtttcagaaacaggcacaaagttaccaaactcaactaaatggtaaaaaacagtgcttagaagacagcagctctgaaattcctcgtttgatatgtgacccagatcccaattgtgaaatcaatgaaagagatgagttcattattgaaaaactgaaatcagctgtaaatgagatagcactaagcaggaataaattacaagatgaaaatcagaagctcttgcaagaactgaaaatgtaccaaagacagtgccaggccatggaagcaggtctctcagaggtaaaaagtgagttacagtcacgtgatgatctcttgagaattatagaaatggaacgattgcaattacacagagaattattaaaaataggagagtgccaaaatgctcaaggaaataaaacaagacttgaatcatcttatttgccttctattaaagaaccagaaaggaaaataaaa

SEQ ID NO: 121118 - DNA, 1920 bp, Homo sapiens
  Payload ID: 3743
  Gene Symbol: CCDC67
  Gene Name: coiled-coil domain containing 67
  ENST ID: ENST00000525646
  CDS Start-End: 129-1169
ggaaaatggggagtgactgttaatgagtatcaggtttcctttggggatgatgaaaatgctctggaataaagtagtggtgatgttcaactttgtgactaaattgaaaactgctggattgtacactttaaatgggcgaatttatggccatggaagcaggtctctcagaggtaaaaagtgagttacagtcacgtgatgatctcttgagaattatagaaatggaacgattgcaattacacagagaattattaaaaataggagagtgccaaaatgctcaaggaaataaaacaagacttgaatcatcttatttgccttctattaaagaaccagaaaggaaaataaaagagctgttttcagtgatgcaagatcaaccaaatcatgaaaaagaattgaacaagataagaagccaactccaacaggtggaagagtaccataactctgagcaggaaagaatgaggaatgaaatctctgacctaacagaagagcttcatcagaaggagatcactatagcaactgtcacaaagaaagctgcccttctggaaaaacagttaaaaatggaattagaaataaaagaaaaaatgttagcaaaacaaaaggtctcagatatgaaatataaagctgtcagaactgaaaacacacatctaaaaggaatgatgggagatttagaccccggagaatacatgagtatggacttcactaacagggaacagtcaaggcatacatctattaataaactgcaatatgagaatgaaaggctccgaaatgatcttgcaaaacttcatgtcaatggaaaatcaacctggactaatcaaaacacctatgaagaaacaggaagatatgcctatcaaagccaaataaaagtggaacaaaatgaagagagacttagtcatgactgtgagccaaacagaagtacaatgcctcccttgccaccttcgacatttcaagccaaagaaatgacaagtcctttggttagtgatgatgatgtattcccactgtctcccccagatatgtccttcccagcatctttggctgcacagcatttccttctggaagaagagaaacgagcaaaagaacttgaaaaacttctaaatacacatattgatgaactgcaaagacacacagaatttactcttaataaatactccaagctaaaacaaaatagacacatatgagcttttaaacttttttatttgcttcccccccccacccccgccaagaaaaaaagctctggcaaaatatttacaaagctgattaatgaaaccaagaaattctgttctgtttccttgagtaaataatttccgtaaggcagctagaaaatagtaagtattttgttctataaagctgttcacatttctgcattaacatgctaaattgtcctgctgtagagttactataaaataaacatgactattccaaaagagatttttttccagtctaaggaatattttggaatcaaatatgcagttttttttccccacttgaatcatgtatactgaaaacccatttcctcagcaactacacaaaataagagaaagggaagtgctatattccagatacaaatgactcaaaggcagctcagttgtactggttttgaaaactcaaggattttataaataaaaatatttaagtatttccagttatgtaaacactctaaaattctataattttttggaaaaaaaaagctatagctttattgtttttacattcacctttataatgtctgtctgtttcaacacaatgaaggtatatggaatgtgcaatttacaaacctaaaatatatgtgccaaaaattaacgcttttttgttagtactaattacttcatggacacaaacaagataaaggaaatataaagcattactgttgctacattttcctttgtaatcacttctgtttttaatacaataaaggaatgtaaaattcaa

SEQ ID NO: 121119 - DNA, 2784 bp, Homo sapiens
  Payload ID: 3743
  Gene Symbol: CCDC67
  Gene Name: coiled-coil domain containing 67
  ENST ID: ENST00000531448
  CDS Start-End: 222-1730
gggagggagaggcccaactgcctcgttggtcgcgcggcgggagggcccaggcggcgggagcgcggcggcgggtggcggggccccttggggcgggcctggcggggcgggaggtgacatacgcggtcctgcgccctcgcctcagacctctcgggcgagcgcggcgcagcgcaggtaatgattaaaaatcaagaaatataaaccagatgtagcagtttcttgacatggagaaccaagcccataatacgatgggaacttctccttgtgaggctgagcttcaggaattaatggaacaaattgacatcatggtaagcaacaagaaaatggattgggaaagaaagatgcgggctttggagacacgattagatcttcgggatcaagaattggcaaatgcacaaacttgtttggatcagaaaggtcaagaggtagggttacttcgacagaaattggacagtctggaaaaatgtaatttagcaatgactcagaattatgaaggacaactacaaagcctaaaggctcaattttccaaactaacaaataactttgaaaaactgagattacatcagatgaaacaaaacaaagttccacgaaaagaattaccacaccttaaagaagaaataccctttgaactgagcaatttgaaccagaaattagaggaatttagagcaaagtcaagagaatgggacaagcaagagatattatatcagactcatctgatttctttagatgctcaacaaaaattattatctgagaagtgtaatcagtttcagaaacaggcacaaagttaccaaactcaactaaatggtaaaaaacagtgcttagaagacagcagctctgaaattcctcgtttgatatgtgacccagatcccaattgtgaaatcaatgaaagagatgagttcattattgaaaaactgaaatcagctgtaaatgagatagcactaagcaggaataaattacaagatgaaaatcagaagctcttgcaagaactgaaaatgtaccaaagacagtgccaggccatggaagcaggtctctcagaggtaaaaagtgagttacagtcacgtgatgatctcttgagaattatagaaatggaacgattgcaattacacagagaattattaaaaataggagagtgccaaaatgctcaaggaaataaaacaagacttgaatcatcttatttgccttctattaaagaaccagaaaggaaaataaaagagctgttttcagtgatgcaagatcaaccaaatcatgaaaaagaattgaacaagataagaagccaactccaacaggtggaagagtaccataactctgagcaggaaagaatgaggaatgaaatctctgacctaacagaagagcttcatcagaaggagatcactatagcaactgtcacaaagaaagctgcccttctggaaaaacagttaaaaatggaattagaaataaaagaaaaaatgttagcaaaacaaaaggtctcagatatgaaatataaagctgtcagaactgaaaacacacatctaaaaggaatgatgggagatttagaccccggagaatacatgagtatggacttcactaacagggaacagtcaaggcatacatctattaataaactgcaatatgagaatgaaaggctccgaaatgatcttgcaaaacttcatgtcaatggaaaatcaacctggactaatcaaaacacctatgaagaaacaggaagatatgcctatcaaagccaaataaaaacttagtcatgactgtgagccaaacagaagtacaatgcctcccttgccaccttcgacatttcaagccaaagaaatgacaagtcctttggttagtgatgatgatgtattcccactgtctcccccagatatgtccttcccagcatctttggctgcacagcatttccttctggaagaagagaaacgagcaaaagaacttgaaaaacttctaaatacacatattgatgaactgcaaagacacacagaatttactcttaataaatactccaagctaaaacaaaatagacacatatgagcttttaaacttttttatttgcttcccccccccacccccgccaagaaaaaaagctctggcaaaatatttacaaagctgattaatgaaaccaagaaattctgttctgtttccttgagtaaataatttccgtaaggcagctagaaaatagtaagtattttgttctataaagctgttcacatttctgcattaacatgctaaattgtcctgctgtagagttactataaaataaacatgactattccaaaagagatttttttccagtctaaggaatattttggaatcaaatatgcagttttttttccccacttgaatcatgtatactgaaaacccatttcctcagcaactacacaaaataagagaaagggaagtgctatattccagatacaaatgactcaaaggcagctcagttgtactggttttgaaaactcaaggattttataaataaaaatatttaagtatttccagttatgtaaacactctaaaattctataattttttggaaaaaaaaagctatagctttattgtttttacattcacctttataatgtctgtctgtttcaacacaatgaaggtatatggaatgtgcaatttacaaacctaaaatatatgtgccaaaaattaacgcttttttgttagtactaattacttcatggacacaaacaagataaaggaaatataaagcattactgttgctacattttcctttgtaatcacttctgtttttaatacaataaaggaatgtaaaattcaatggacttgaagcataaa

SEQ ID NO: 121120 - DNA, 1964 bp, Homo sapiens
  Payload ID: 3743
  Gene Symbol: CCDC67
  Gene Name: coiled-coil domain containing 67
  ENST ID: ENST00000618031
  CDS Start-End: 167-1964
ttgagtttcgttccagcttctcctcttagaagctattctcttctccctgaagggaggcaacactgtccgttcgcctgactggcagtgttttaaggacccatcgcgcttgacgggaaagtcagattaaaaatcaagaaatataaaccagatgtagcagtttcttgacatggagaaccaagcccataatacgatgggaacttctccttgtgaggctgagcttcaggaattaatggaacaaattgacatcatggtaagcaacaagaaaatggattgggaaagaaagatgcgggctttggagacacgattagatcttcgggatcaagaattggcaaatgcacaaacttgtttggatcagaaaggtcaagaggtagggttacttcgacagaaattggacagtctggaaaaatgtaatttagcaatgactcagaattatgaaggacaactacaaagcctaaaggctcaattttccaaactaacaaataactttgaaaaactgagattacatcagatgaaacaaaacaaagttccacgaaaagaattaccacaccttaaagaagaaataccctttgaactgagcaatttgaaccagaaattagaggaatttagagcaaagtcaagagaatgggacaagcaagagatattatatcagactcatctgatttctttagatgctcaacaaaaattattatctgagaagtgtaatcagtttcagaaacaggcacaaagttaccaaactcaactaaatggtaaaaaacagtgcttagaagacagcagctctgaaattcctcgtttgatatgtgacccagatcccaattgtgaaatcaatgaaagagatgagttcattattgaaaaactgaaatcagctgtaaatgagatagcactaagcaggaataaattacaagatgaaaatcagaagctcttgcaagaactgaaaatgtaccaaagacagtgccaggccatggaagcaggtctctcagaggtaaaaagtgagttacagtcacgtgatgatctcttgagaattatagaaatggaacgattgcaattacacagagaattattaaaaataggagagtgccaaaatgctcaaggaaataaaacaagacttgaatcatcttatttgccttctattaaagaaccagaaaggaaaataaaagagctgttttcagtgatgcaagatcaaccaaatcatgaaaaagaattgaacaagataagaagccaactccaacaggtggaagagtaccataactctgagcaggaaagaatgaggaatgaaatctctgacctaacagaagagcttcatcagaaggagatcactatagcaactgtcacaaagaaagctgcccttctggaaaaacagttaaaaatggaattagaaataaaagaaaaaatgttagcaaaacaaaaggtctcagatatgaaatataaagctgtcagaactgaaaacacacatctaaaaggaatgatgggagatttagaccccggagaatacatgagtatggacttcactaacagggaacagtcaaggcatacatctattaataaactgcaatatgagaatgaaaggctccgaaatgatcttgcaaaacttcatgtcaatggaaaatcaacctggactaatcaaaacacctatgaagaaacaggaagatatgcctatcaaagccaaataaaagtggaacaaaatgaagagagacttagtcatgactgtgagccaaacagaagtacaatgcctcccttgccaccttcgacatttcaagccaaagaaatgacaagtcctttggttagtgatgatgatgtattcccactgtctcccccagatatgtccttcccagcatctttggctgcacagcatttccttctggaagaagagaaacgagcaaaagaacttgaaaaacttctaaatacacatattgatgaactgcaaagacacacagaatttactcttaataaatactccaagctaaaac

SEQ ID NO: 121121 - DNA, 1457 bp, Homo sapiens
  Payload ID: 3744
  Gene Symbol: CCDC68
  Gene Name: coiled-coil domain containing 68
  Uniprot ID: Q9H2F9
  ENST ID: ENST00000337363
  CDS Start-End: 173-1180
gttgctattttgtgaattactgataggcatgttatttgttagcttatttgtttacagtatgctcaacattgaagggaagccagtcttaatatgatggaaacatctctgaacttctaaaagaccaaggttggcgttttagctctattaattttacttcgtcttggaattcacaatgacaacagtgacagtgaccacagaaattcccccaagggataagatggaagataattctgccttgtatgagtctacgtccgctcacattattgaagaaaccgagtatgtgaaaaagattcgaactactctgcaaaagatcaggacccagatgtttaaagatgaaataagacatgacagtacaaatcacaaactagatgcaaagcactgtggaaaccttcaacagggctctgattctgaaatggatccttcttgttgcagtttggatttgcttatgaaaaagataaaaggaaaagacctacagctcttagaaatgaacaaagagaatgaagtattgaaaatcaagctgcaagcctccagagaagcaggagcagcagctctgagaaacgtggcccagagattatttgaaaactaccaaacgcaatctgaagaagtgagaaagaagcaggaggacagtaaacaattactccaggttaacaagcttgaaaaagaacagaaattgaaacaacatgttgaaaatctgaatcaagttgctgaaaaacttgaagaaaaacacagtcaaattacagaattggagaaccttgtacagagaatggaaaaggaaaagagaacactactagaaagaaaactgtctttggaaaacaagctactgcaactcaaatccagtgctacatatggaaaaagttgccaggatcttcagagggagatttccattctccaggagcagatctctcatctgcagtttgtgattcactcccaacatcagaacctgcgcagtgtcatccaggagatggaaggattaaaaaataatttaaaagaacaagacaaaagaattgaaaatctcagagaaaaggttaacatacttgaagcccagaataaagaactaaaaacccaggtagcactttcatctgaaactcctaggacaaaggtatctaaggctgtctctacaagtgaattgaagaccgaaggtgtttccccttatttaatgttgattaggttacggaaatgaactggctggatgaagatctgatttagaaagactgcgtgagtcttatttattctctgaaacacagcccaagtttcatgttaaaatggcaaaatgccattatttaaatggaacttattacataccaatggctttgcaagaagatgacatttcagaaaatcaaacaaatctatatttaatggatggactcttcaaaacttaccaaatagttgaagaaaccaggtgccttctcatgatggaagacagattctgctttaaattaaaaaaaaaaaaaaatctg

SEQ ID NO: 121122 - DNA, 4014 bp, Homo sapiens
  Payload ID: 3744
  Gene Symbol: CCDC68
  Gene Name: coiled-coil domain containing 68
  Uniprot ID: Q9H2F9
  ENST ID: ENST00000432185
  CDS Start-End: 160-1167
tttatgaatatatacagataccaatgatttatagcttttctgctatatttgactatagtgataaaacaacttatttcagtttatgaaccatataatcatacaatcaaaacagtctgttttgcttagctgatttatgttttcctaaagccagaattcacaatgacaacagtgacagtgaccacagaaattcccccaagggataagatggaagataattctgccttgtatgagtctacgtccgctcacattattgaagaaaccgagtatgtgaaaaagattcgaactactctgcaaaagatcaggacccagatgtttaaagatgaaataagacatgacagtacaaatcacaaactagatgcaaagcactgtggaaaccttcaacagggctctgattctgaaatggatccttcttgttgcagtttggatttgcttatgaaaaagataaaaggaaaagacctacagctcttagaaatgaacaaagagaatgaagtattgaaaatcaagctgcaagcctccagagaagcaggagcagcagctctgagaaacgtggcccagagattatttgaaaactaccaaacgcaatctgaagaagtgagaaagaagcaggaggacagtaaacaattactccaggttaacaagcttgaaaaagaacagaaattgaaacaacatgttgaaaatctgaatcaagttgctgaaaaacttgaagaaaaacacagtcaaattacagaattggagaaccttgtacagagaatggaaaaggaaaagagaacactactagaaagaaaactgtctttggaaaacaagctactgcaactcaaatccagtgctacatatggaaaaagttgccaggatcttcagagggagatttccattctccaggagcagatctctcatctgcagtttgtgattcactcccaacatcagaacctgcgcagtgtcatccaggagatggaaggattaaaaaataatttaaaagaacaagacaaaagaattgaaaatctcagagaaaaggttaacatacttgaagcccagaataaagaactaaaaacccaggtagcactttcatctgaaactcctaggacaaaggtatctaaggctgtctctacaagtgaattgaagaccgaaggtgtttccccttatttaatgttgattaggttacggaaatgaactggctggatgaagatctgatttagaaagactgcgtgagtcttatttattctctgaaacacagcccaagtttcatgttaaaatggcaaaatgccattatttaaatggaacttattacataccaatggctttgcaagaagatgacatttcagaaaatcaaacaaatctatatttaatggatggactcttcaaaacttaccaaatagttgaagaaaccaggtgccttctcatgatggaagacagattctgctttaaattaaaaaaaaaaaaaaatctgaatcttgttttcagatttttttttctactgggattgttttaagattgtcaattctgacttttttatagtggtttttaagagtataaatagaagggagagtgtatatgtgtatgaatgaacatacatttcctgcatatatatgtatgaagggcatgtatatgtatgaatgagcaaacatatttgaaagttaacttttggatgataggaaagatcgtacagtgacataagttcatctcctgatccattgtttgtgggagaattatacttgactgaattatgggcaggagaaagagcagattccttttagctaattccccaacccatatgcccctctgaagttgagaatcatggctgcctcaccacacatcagagaatgactgttcttcttagttctgggattaaaaattggtttctagaggtaacctgtacacacaaacgcacagggatgcacatggtttcctctgcctttgtgactaattttcttcttgatagttattaatagtatctaaataaaatattggggggatagaaaaataatgctgttagctcatacttccatgaaaatgtatatattataggctcaaaggaataatgactgctgtctgcagccagaaagaatctgaatttatgaattggaaagatatatatagtgtatttgtgaaagtttgcttaaattctgatacatgccttctttgtaggtggagtttgtgattgcagtgaatagaacaaattctgacttgcagaaatgcagacatacagtcaggaaagaacaaacttcaattaaatgtataatgagagaccttggtccccctaaaggatgaatttcctttaggcctttgatcttcctctctagtgtataactttaaatatttgctcagaaaagatgctgactctttcattatggaatgtgaaatatcagtgttgtctataaatatttgaaggtatataaaaatgagatgatgtaatgtatttataaatttatccaagtactgtaatccttgaattgttgtgtaactgtgtgtgagttttacgcttcatggtatttttggaaacatttttattgcttgcttattttgaaggtatatttatctgttaacatttagggcatagttaccttataccagcaacaagtctaagcactttacttgtattaatttattttatcttccccaaggccctcagaagcagattattcctgttttacagagaaagatactgagagtggttgagtaatttgcccagctgctaactgtgaagcaaaaatttgaaccttttgacttggctattgatattcattctacttgctcacatggtggtctaagaaatttcccagctatagaaatctctctatttttgccactttaatcaacacatagcttcctggatgactgcctgtgttattttgtggatgacagtaagaaacaacaaatactgataaaatcaatattttgctgaaatgagttgatctttcaccagctggactaccattgtgagaactcagttcagacaaacttccctgctaaaaatctgtttatcatacatttattatttatgactttatgtcacattgaagaatttcttcatgatacattttcaggcacacttgtaggaaaattaggatcatgagtcctgctttaagtatttgcagtgtagtaagagaatccatcttttactaggagaccagattccttttatacctcattcatcatgctggattgtaataaatttcagattttggaatgggcttatttaactgacctgacaatcttgatgatttccattagaataacttattctaaggtcaaaagtggaaagacactgttggtttttattttgatttcactatactcatttttgaacatggaaatacagtggtgaaaccacctatgcaaaaatgataacagtgaggaaattatgacagtgaaagagatctgacctaactatctatcttgcctcgaaactgcccttggtcgttcctgagtgtgggccaagctaactttgggagaaatttactttataggttaaattataatagcccttcccaaaactaaacgattctcctgcctcagcctcccgagtagctgtctttataataccatcagccttatcatttattcgtcatgtatggattgtttcctatatccactatcataaaattatcatttgaaatatttttttatgaaaaaaaaaacacttctcagtgaaaaaacaagattacaagggggaataatatttattcagctaaaatagtacttcacaggaaatataggaaaagaaacactagttcagttttattccaaataatgtacttctaattatactcttgaatttattggataagaaggtctgaggtgggtctgaaattcatacatgaagtcaggaaaagaaaagaaacttagttctaccttgattacatatgttgttacaaattatcattataaaatgtttaaacaattagtatagtatatcttttgaataattgcttataatatgccttaccataaagaaaattgatgctacattgtgtgaattgtttggttttctttttatattaaaattatgcataaatg

SEQ ID NO: 121123 - DNA, 4132 bp, Homo sapiens
  Payload ID: 3744
  Gene Symbol: CCDC68
  Gene Name: coiled-coil domain containing 68
  Uniprot ID: Q9H2F9
  ENST ID: ENST00000591504
  CDS Start-End: 276-1283
ggggcctcaccggcgccggactctgccctgggcgcgccccgcggggcggagccaagcctgcgggcggtggcggctgcactcgcagggccctggcagccgaccctggccccaaggtccgatcgcccaggggaggagcagcaccgggaccccgcgtcggctgggcgccccacaagggaagccagtcttaatatgatggaaacatctctgaacttctaaaagaccaaggttggcgttttagctctattaattttacttcgtcttggccagaattcacaatgacaacagtgacagtgaccacagaaattcccccaagggataagatggaagataattctgccttgtatgagtctacgtccgctcacattattgaagaaaccgagtatgtgaaaaagattcgaactactctgcaaaagatcaggacccagatgtttaaagatgaaataagacatgacagtacaaatcacaaactagatgcaaagcactgtggaaaccttcaacagggctctgattctgaaatggatccttcttgttgcagtttggatttgcttatgaaaaagataaaaggaaaagacctacagctcttagaaatgaacaaagagaatgaagtattgaaaatcaagctgcaagcctccagagaagcaggagcagcagctctgagaaacgtggcccagagattatttgaaaactaccaaacgcaatctgaagaagtgagaaagaagcaggaggacagtaaacaattactccaggttaacaagcttgaaaaagaacagaaattgaaacaacatgttgaaaatctgaatcaagttgctgaaaaacttgaagaaaaacacagtcaaattacagaattggagaaccttgtacagagaatggaaaaggaaaagagaacactactagaaagaaaactgtctttggaaaacaagctactgcaactcaaatccagtgctacatatggaaaaagttgccaggatcttcagagggagatttccattctccaggagcagatctctcatctgcagtttgtgattcactcccaacatcagaacctgcgcagtgtcatccaggagatggaaggattaaaaaataatttaaaagaacaagacaaaagaattgaaaatctcagagaaaaggttaacatacttgaagcccagaataaagaactaaaaacccaggtagcactttcatctgaaactcctaggacaaaggtatctaaggctgtctctacaagtgaattgaagaccgaaggtgtttccccttatttaatgttgattaggttacggaaatgaactggctggatgaagatctgatttagaaagactgcgtgagtcttatttattctctgaaacacagcccaagtttcatgttaaaatggcaaaatgccattatttaaatggaacttattacataccaatggctttgcaagaagatgacatttcagaaaatcaaacaaatctatatttaatggatggactcttcaaaacttaccaaatagttgaagaaaccaggtgccttctcatgatggaagacagattctgctttaaattaaaaaaaaaaaaaaatctgaatcttgttttcagatttttttttctactgggattgttttaagattgtcaattctgacttttttatagtggtttttaagagtataaatagaagggagagtgtatatgtgtatgaatgaacatacatttcctgcatatatatgtatgaagggcatgtatatgtatgaatgagcaaacatatttgaaagttaacttttggatgataggaaagatcgtacagtgacataagttcatctcctgatccattgtttgtgggagaattatacttgactgaattatgggcaggagaaagagcagattccttttagctaattccccaacccatatgcccctctgaagttgagaatcatggctgcctcaccacacatcagagaatgactgttcttcttagttctgggattaaaaattggtttctagaggtaacctgtacacacaaacgcacagggatgcacatggtttcctctgcctttgtgactaattttcttcttgatagttattaatagtatctaaataaaatattggggggatagaaaaataatgctgttagctcatacttccatgaaaatgtatatattataggctcaaaggaataatgactgctgtctgcagccagaaagaatctgaatttatgaattggaaagatatatatagtgtatttgtgaaagtttgcttaaattctgatacatgccttctttgtaggtggagtttgtgattgcagtgaatagaacaaattctgacttgcagaaatgcagacatacagtcaggaaagaacaaacttcaattaaatgtataatgagagaccttggtccccctaaaggatgaatttcctttaggcctttgatcttcctctctagtgtataactttaaatatttgctcagaaaagatgctgactctttcattatggaatgtgaaatatcagtgttgtctataaatatttgaaggtatataaaaatgagatgatgtaatgtatttataaatttatccaagtactgtaatccttgaattgttgtgtaactgtgtgtgagttttacgcttcatggtatttttggaaacatttttattgcttgcttattttgaaggtatatttatctgttaacatttagggcatagttaccttataccagcaacaagtctaagcactttacttgtattaatttattttatcttccccaaggccctcagaagcagattattcctgttttacagagaaagatactgagagtggttgagtaatttgcccagctgctaactgtgaagcaaaaatttgaaccttttgacttggctattgatattcattctacttgctcacatggtggtctaagaaatttcccagctatagaaatctctctatttttgccactttaatcaacacatagcttcctggatgactgcctgtgttattttgtggatgacagtaagaaacaacaaatactgataaaatcaatattttgctgaaatgagttgatctttcaccagctggactaccattgtgagaactcagttcagacaaacttccctgctaaaaatctgtttatcatacatttattatttatgactttatgtcacattgaagaatttcttcatgatacattttcaggcacacttgtaggaaaattaggatcatgagtcctgctttaagtatttgcagtgtagtaagagaatccatcttttactaggagaccagattccttttatacctcattcatcatgctggattgtaataaatttcagattttggaatgggcttatttaactgacctgacaatcttgatgatttccattagaataacttattctaaggtcaaaagtggaaagacactgttggtttttattttgatttcactatactcatttttgaacatggaaatacagtggtgaaaccacctatgcaaaaatgataacagtgaggaaattatgacagtgaaagagatctgacctaactatctatcttgcctcgaaactgcccttggtcgttcctgagtgtgggccaagctaactttgggagaaatttactttataggttaaattataatagcccttcccaaaactaaacgattctcctgcctcagcctcccgagtagctgtctttataataccatcagccttatcatttattcgtcatgtatggattgtttcctatatccactatcataaaattatcatttgaaatatttttttatgaaaaaaaaaacacttctcagtgaaaaaacaagattacaagggggaataatatttattcagctaaaatagtacttcacaggaaatataggaaaagaaacactagttcagttttattccaaataatgtacttctaattatactcttgaatttattggataagaaggtctgaggtgggtctgaaattcatacatgaagtcaggaaaagaaaagaaacttagttctaccttgattacatatgttgttacaaattatcattataaaatgtttaaacaattagtatagtatatcttttgaataattgcttataatatgccttaccataaagaaaattgatgctacattgtgtgaattgtttggttttctttttatattaaaattatgcataaatgaa

SEQ ID NO: 121124 - DNA, 708 bp, Homo sapiens
  Payload ID: 3744
  Gene Symbol: CCDC68
  Gene Name: coiled-coil domain containing 68
  ENST ID: ENST00000592040
  CDS Start-End: 1-610
attatttgaaaactaccaaacgcaatctgaagaagtgagaaagaagcaggaggacagtaaacaattactccaggttaacaagcttgaaaaagaacagaaattgaaacaacatgttgaaaatctgaatcaagttgctgaaaaacttgaagaaaaacacagtcaaattacagaattggagaaccttgtacagagaatggaaaaggaaaagagaacactactagaaagaaaactgtctttggaaaacaagctactgcaactcaaatccagtgctacatatggaaaaagttgccaggatcttcagagggagatttccattctccaggagcagatctctcatctgcagtttgtgattcactcccaacatcagaacctgcgcagtgtcatccaggagatggaaggattaaaaaataatttaaaagaacaagacaaaagaattgaaaatctcagagaaaaggttaacatacttgaagcccagaataaagaactaaaaacccaggtagcactttcatctgaaactcctaggacaaaggtatctaaggctgtctctacaagtgaattgaagaccgaaggtgtttccccttatttaatgttgattaggttacggaaatgaactggctggatgaagatctgatttagaaagactgcgtggagtttgtgattgcagtgaatagaacaaattctgacttgcagaaatgcagacatacagtc

SEQ ID NO: 121125 - DNA, 3451 bp, Homo sapiens
  Payload ID: 3745
  Gene Symbol: CCDC69
  Gene Name: coiled-coil domain containing 69
  Uniprot ID: A6NI79
  ENST ID: ENST00000355417
  CDS Start-End: 176-1066
atttacggcgggcggccgccccagctcaggctcaagacagcgcttccaggttcagtttcagggtctcgccggcagccccagccggcgggcgcggagcgggcagcggggcccggatcgcaggctcctctgggggccccggagttgggaagcggcgtccgggagcccccggaggaggatgggctgcagacacagcaggctgagcagctgcaaacccccgaaaaagaagcgccaagaaccagaaccagaacagccacccagaccagagccccatgaattaggtcccctcaatggggacacagctataactgtccagctctgtgcatcagaggaggctgagcggcaccagaaggatataaccagaattctccagcaacatgaggaggaaaagaagaaatgggcacaacaggtggagaaggaaagggagctagagcttcgagacagactggatgagcagcaaagggtcctggaaggaaagaatgaagaggccctgcaagtcctccgggcctcatatgaacaggagaaagaagcgcttacccactctttccgggaggccagttctacccagcaggagaccatagacagactgacctcacagctggaggctttccaggccaaaatgaagagggtggaggagtccattctgagccgaaactataagaaacatatccaggattatgggagccccagccagttctgggagcaggagctggagagcttacactttgtcatcgagatgaagaatgagcgtattcatgagctggacaggcggctgatcctcatggaaacagtgaaagagaaaaatctgatattggaggaaaaaattacgaccctgcaacaggaaaatgaggacctccatgtccgaagccgcaaccaggtggtcctgtcaaggcagctgtcagaagacctgcttctcacgcgtgaggccctggagaaggaggtgcagctgcggcgacagctccagcaggagaaggaggagctgttgtaccgggtccttggggccaatgcctcgcctgccttccctctggcccctgtcactcccactgaggtctctttcctcgccacatagggtgcagggcctgggcccaccacgacgcctgaagtcacagctccttccaaggtttttctggagaagacagcaggagcctctcagttcttttccaggaaggaacgagggtgggagcgagatggagatcctgggtgtgtgcccagtgagccctggggccttgagttacatggaatcacccacagggttttggaggccccgagaagcgtcttcccttgagttggccaagggaataagcaagaggagacatttcctccctgccccagcactctgtcccaatccgagaagttccgaggctttcccaggggcagtctgtgtcacgctggccatttgacataaaggagacagcccctggtcccagcttgtcagctctgctgccgacttgctgacttatcaacttcctctaggtgtttccactccaccctggcctgctcagagcctcagtttacccctgcattaaaatggtggggggactggtcaaaggactcttatgtcactgcagtgtcccattctaggattgtctgaaggccagagtaggggttggggggagtgtggacaaaccccgcaaatcagagtggggaaggtgagtggtagagagggggtctctgaaggcccttggggctgacagggccaggcagcctccccagctgaggcatcattcctgggccagagtcgtgtccaccaagggacagtagccagagctcctcttcctttaccaggcaaggtgcatcccctcagccctcctggcccttcagtcttggtgccacctgggcacaggggcaagcttggtggttgtgagtccattcatctatcagagctggaacctcatccctgcacagatgaggaaaccaaggcatggagcagttcccagagtcgaatctagatctcatctgtcatccgggtcttatcctttgctctgtttttctcttcaggctctggaaaatcagatctgtgacttaatcttcctctccctggccctcacccacttagtttctttttcattcctgctccctgccttaactcctcctcccactgcccctgatcccaggcccaggcttttacaacctggtgctcagcttccccatcagtgaaaaggggtggctagagtaactaacctcagcaggccgtccagtcctgatagtctgtggatttcggatccttctcaggaagcttcatgtctaatggagactataattataactcctgttctgcatagagcatttgcatcaaaggctttccatacccctccctcccctggtcctcataagatccttgaagcaggttcctattcctcattggcaacatggcaaacagatcacaggagtcaaagggccttgctcaaggtccccagcttcagccccaggccctaagccagcgtcagaacagtcaatctgcatttttcatcagtcattctatagtgacatcatcccagactgccttctgtattcccctgtgtacagtctccttctgtttctaggtttagaagttcagaggtgactgtgtttctccatttccacagccaaatgggggaagaggtgaggctaggggagtgctgtgctgattctccagccatggtcagacaggtcacccaggagcctcgaggaaagccctggagggaatcacatgtgtactttttcatgaagctttttgcaaagcacatctgcgatacactagtttattgaactaatgtccaggagtagacatgattggtggccaagttatttggggacacctaaacagatcagtgacctgaatgacttctcagaacctttaatatgccaatgtgtgtggcaaacttacaagaagggagctaagtatccagcctctcccaaacctctttgaacaaagcttctgtccctcccacacctctcacctcacaggcacatcaggctgcagaatgcgctttagaaagcattgttttagtccaggcacagtggctcacgcctgtaatcccagcactttgggaggccgaggtgggtggatcacaaggttgggagattgagaccatcctggctaacacagtgaaaccctgtctctactaaaaaaatacaaaaaattagcttggcgtggtggtgggcgcctgtagtcccagcagcttgggaggctgaggctggagaatggtgtgaacccaggaggcggagcttgcagtgagccaagatcgcgccactgcactccagcccgggtgacagagcaagactccgtctcaaaaaaaagaaaagaaaaaagaaagcattgttttaattgagaggggcagggctggagaaggagcaagttgtggggagccaggcttccctcacgcagcctgtggtggatgtgggaaggagatcaacttctcctcactctgggacagacgatgtatggaaactaaaaagaacatgcggcacctta

SEQ ID NO: 121126 - DNA, 479 bp, Homo sapiens
  Payload ID: 3745
  Gene Symbol: CCDC69
  Gene Name: coiled-coil domain containing 69
  ENST ID: ENST00000522964
  CDS Start-End: 1-267
aagcgccaagaaccagaaccagaacagccacccagaccagagccccatgaattaggtcccctcaatggggacacagctataactgtccagctctgtgcatcagaggaggctgagcggcaccagaaggatataaccagaattctccagcaacatgaggaggaaaagaagaaatgggcacaacagtcctccgggcctcatatgaacaggagaaagaagcgcttacccactctttccgggaggccagttctacccagcaggagaccatagacagactgacctcacagctggaggctttccaggccaaaatgaagagggtggaggagtccattctgagccgaaactataagaaacatatccaggattatgggagccccagccagttctgggagcaggagctggagagcttacactttgtcatcgagatgaagaatgagcgtattcatgagctggacaggcggctgatcctcatggaaacagtg

SEQ ID NO: 121127 - DNA, 291 bp, Homo sapiens
  Payload ID: 3745
  Gene Symbol: CCDC69
  Gene Name: coiled-coil domain containing 69
  ENST ID: ENST00000519740
  CDS Start-End: 123-266
agtttcagggtctcgccggcagccccagccggcgggcgcggagcgggcagcggggcccggatcgcaggctcctctgggggccccggagttgggaagcggcgtccgggagcccccggaggaggatgggctgcagacacagcaggctgagcagctgcaaacccccgaaaaaggcaatcccgccctctcttttacaaccacccttacactgtctgctgaagaacaggggatggtgtggagggctccaggttctcacccaggcctcctgagcaagggaccctcctttcctgctct

SEQ ID NO: 121128 - DNA, 2864 bp, Homo sapiens
  Payload ID: 3745
  Gene Symbol: CCDC69
  Gene Name: coiled-coil domain containing 69
  ENST ID: ENST00000518189
  CDS Start-End: 1-560
agaagcgccaagaaccagaaccagaacagccacccagaccagagccccatgaattaggtcccctcaatggggacacagctataactgtccagctctgtgcatcagaggaggctgagcggcaccagaaggatataaccagaattctccagcaacatgaggaggaaaagaagaaatgggcacaacaggtggagaaggaaagggagctagagcttcgagacagactggatgagcagcaaagggtcctggaaggaaagaatgaagaggccctgcaagtcctccgggcctcatatgaacaggagaaagaagcgcttacccactctttccgggaggccagttctacccagcaggagaccatagacagactgacctcacagctggaggctttccaggccaaaatgaagagggtggaggagtccattctgagccgaaactataagaaacatatccaggattatgggagccccagccagttctgggagcaggagctggagagcttacactttgtcatcgagatgaagaatgagcgtattcatgagctggacagaaagagaaaaatctgatattggaggaaaaaattacgaccctgcaacaggaaaatgaggacctccatgtccgaagccgcaaccaggtggtcctgtcaaggcagctgtcagaagacctgcttctcacgcgtgaggccctggagaaggaggtgcagctgcggcgacagctccagcaggagaaggaggagctgttgtaccgggtccttggggccaatgcctcgcctgccttccctctggcccctgtcactcccactgaggtctctttcctcgccacatagggtgcagggcctgggcccaccacgacgcctgaagtcacagctccttccaaggtttttctggagaagacagcaggagcctctcagttcttttccaggaaggaacgagggtgggagcgagatggagatcctgggtgtgtgcccagtgagccctggggccttgagttacatggaatcacccacagggttttggaggccccgagaagcgtcttcccttgagttggccaagggaataagcaagaggagacatttcctccctgccccagcactctgtcccaatccgagaagttccgaggctttcccaggggcagtctgtgtcacgctggccatttgacataaaggagacagcccctggtcccagcttgtcagctctgctgccgacttgctgacttatcaacttcctctaggtgtttccactccaccctggcctgctcagagcctcagtttacccctgcattaaaatggtggggggactggtcaaaggactcttatgtcactgcagtgtcccattctaggattgtctgaaggccagagtaggggttggggggagtgtggacaaaccccgcaaatcagagtggggaaggtgagtggtagagagggggtctctgaaggcccttggggctgacagggccaggcagcctccccagctgaggcatcattcctgggccagagtcgtgtccaccaagggacagtagccagagctcctcttcctttaccaggcaaggtgcatcccctcagccctcctggcccttcagtcttggtgccacctgggcacaggggcaagcttggtggttgtgagtccattcatctatcagagctggaacctcatccctgcacagatgaggaaaccaaggcatggagcagttcccagagtcgaatctagatctcatctgtcatccgggtcttatcctttgctctgtttttctcttcaggctctggaaaatcagatctgtgacttaatcttcctctccctggccctcacccacttagtttctttttcattcctgctccctgccttaactcctcctcccactgcccctgatcccaggcccaggcttttacaacctggtgctcagcttccccatcagtgaaaaggggtggctagagtaactaacctcagcaggccgtccagtcctgatagtctgtggatttcggatccttctcaggaagcttcatgtctaatggagactataattataactcctgttctgcatagagcatttgcatcaaaggctttccatacccctccctcccctggtcctcataagatccttgaagcaggttcctattcctcattggcaacatggcaaacagatcacaggagtcaaagggccttgctcaaggtccccagcttcagccccaggccctaagccagcgtcagaacagtcaatctgcatttttcatcagtcattctatagtgacatcatcccagactgccttctgtattcccctgtgtacagtctccttctgtttctaggtttagaagttcagaggtgactgtgtttctccatttccacagccaaatgggggaagaggtgaggctaggggagtgctgtgctgattctccagccatggtcagacaggtcacccaggagcctcgaggaaagccctggagggaatcacatgtgtactttttcatgaagctttttgcaaagcacatctgcgatacactagtttattgaactaatgtccaggagtagacatgattggtggccaagttatttggggacacctaaacagatcagtgacctgaatgacttctcagaacctttaatatgccaatgtgtgtggcaaacttacaagaagggagctaagtatccagcctctcccaaacctctttgaacaaagcttctgtccctcccacacctctcacctcacaggcacatcaggctgcagaatgcgctttagaaagcattgttttagtccaggcacagtggctcacgcctgtaatcccagcactttgggaggccgaggtgggtggatcacaaggttgggagattgagaccatcctggctaacacagtgaaaccctgtctctactaaaaaaa

SEQ ID NO: 121129 - DNA, 1899 bp, Homo sapiens
  Payload ID: 3746
  Gene Symbol: CCDC7
  Gene Name: coiled-coil domain containing 7
  Uniprot ID: Q96M83
  ENST ID: ENST00000277657
  CDS Start-End: 310-1770
aacggccccatccggcgccggcggcgggtgcccggcggtctttgctgccgcccgggggcgcagaggccgggccttttctttcagcacaaacgtcagtttgtaaaagggaggtgctggagtctgaggagttttcaggcttccgtctcgaaggaagtctggcaggctcggaattgtcatcttcctcaggcaaatagtttttcaccttagagccagcaaggccaaaccgcccagtcacccgacttcccacagtctcagcagggaggaataagtttttttcatctgtaatttggaagccaagtcagtaacaaaatgaaaccagtaaagcatctgttgaccaccagtaacaaatcggcaaatgttccagcattaactactaaaaaaggactacataatttaccattatcacctgagctaaaggaaaaacataatgcaaaattaattcatgataaaattgaaccaatggtcctaagatctccaccaacaggagaatccattttacggtatgctttgcccattccatcgagtaagacaaagaacttactaccagaagatgaaatgatcggaaaaattatcaaacatctgaagatggttgtttccactttggaagaaacctatggacattgcgatcagaatggagaagaaccatttgtaaagcatgaacatgaagaattatctttatctgttggggatgatatgaattcattcttgacatattgttcgcaatttgcagctcagctagaagaagcacttaaagaagaacaaaatattttggaatctctttttaagtggtttcagtggcaggtcaatcagatggaagaaataagtaaagatcaaactcttttacaagcagagcctccaaaacctgacaaaacagtcattttaaatattgcagaaatagtaaggcttgtacaaagatttgaagaactgaagaatcgccttaaacagaggtctaaatcctccgtgaaagtcatgttgtctaaaactatggataaagaaaatcgaccagaagcagtgaaaagttgtgaagctctggcacagaaaattgaagaattcttagaagcccactcaactgatgaatttaaagatgtttctgcaacagaaccacaaactgctcattcaatgactaatcgatttaatgccatgttgaaagtatttgaaaaccaggcaaatatgttggagagagctgtaaatgatcaagttttgttagatgctgaatacaaacagatgcagtgtgattttcagttgttatcagaagagaagttggtgctggaaaatgaactacaaaagttgaaggacaaagagaaaactaagcctacaaataatcgaacaaagaaagctgtgaaaacagtgaagaaaaaagacaaaggaaaatctgaggattcagaaaagaagatgtctccagaaaaagagtttaaaataaaagaagatttggatcaagtacagaaagtagcacgtctggaaattgagaacaaagtccttcaggagcaattgaaacaggctttacaggaagctgaaaaagctaagcatcaacttaactatttcctaaatcaagagaagttacttaaaagtgaggggaaaactgagacaacaatgcaagtgggtaatagtcaaacaaaagttaaaggtgaagattcaaaaaatataccattggagaaagaaacaagaaaatcactggtttcagattcaggtggacaaaggacaagtgataaaatccaagaatatccacagatcactgcccaaagcggaagactgattgaaaagagatgctaatagagtttctgaaatactttggaaaagtctcccaaaccttcagagagtggatgggagcgaagtaaggagaccccacctgagcagatacatggtattgcttacaataaagtacatttttgctctttacaa

SEQ ID NO: 121130 - DNA, 1994 bp, Homo sapiens
  Payload ID: 3746
  Gene Symbol: CCDC7
  Gene Name: coiled-coil domain containing 7
  ENST ID: ENST00000302316
  CDS Start-End: 1-1942
attgtcaaaaaccaaattacaaataaagaaacaagaaacttctacagagcaaccactcaccactcctgataaagaaccaaatgaaaatcttatacttaggcatcaagactcaatgtcaaaatcagaaatgcaagtgaaggaacaaagaactctcaaagggcaaagaattattactcatgatgaagaaccaggcaaaaatcttgtgcttgaacatcaagattcagtgtcaaaactggaaatgcaaattgaaaaaaccaaaaaacttcctagagagaaaagacatagtactcatgatgaagaatcaggtgaaaatcctatgcttaaacatcaagattcagtgtcaaaaatccaagtgcaattagagattcaagaaacttctgaaggagaaggacgtagcataccagataaaaattctatgtttgttcatcaagattcagtgtcaaaactccaaatgcaagaaaagaaaaaaataactcctggaagggaaaggcgtaataattcaaagtcaaaactccaaatgcaagaaaagaaacaaataaattctggagtggaaagacacaagacgtttcctttagaaatcaaaaaaaaggatatatcacttgaacatctgttgcctgaggagaaagttttattatcaagaagcgaatctcaaacgaagaaacttcaagctaaagtaacttcaagaaaaattaaaaatgaagcagcctcagaacttccagatacagcagaaaatcttccagcaatgtacccgtcaattagcgacctaataattcaatttgatttaaacaaagtggtcgagactgatatagaaagcttgagaggtgctttgggaagacgcttattaaatgatgaattcaagacacagtcaaagagtttccctgggcctgatatagaacaattgacagatgcatttggaagagatatactaaaggatgaattcaagacacgatcaaagagtctccctgagactgatgaacgattgcatagtacaactgagagaggtacaataaatgatgcaattaagacgcagttaaagagaaagagttaccctgagactgtcttaaaacacttgaaaggtgttaatggaaaagatataataaagcatctaatcaacatacagtcaaagagtcatggagagactgataaggaacacttagcagatgatactggaagaggtataataaagggatcaatcaatgcacaactaaagggtcaccaaaagactgataagaacttctttgcctatgctactggaagaggtctaatgaaggagtcaaccacgacacaattaaaaagtcacccagagactgataaggaattcttggcagatgctattggaagaggtataataatagggccaatcactacacaactgaagagtcaccgagagactgataaagaactcttaaaagatgctattggaagagatataataaagggaccaatcagtgcacaattaaagagtcaccaggagactgatgtagaacccttgacaaatgccattggttcaagtaaaacaattggtgagataaagacacaactaaggactcactatgatgtgaacttatttaaaaacaaagatatgtccgtacaacgtcaagaaggtatctttactaggagcattacaccaagtaaattcccaacaaaagtgatcaatttatcaccctttgaaaataaagaggaaacttatgagtactcttcaccctatgtgactgcaccttcaaaagcaatttatagaacatatagggctggtccaagcttttctaaagacatccaccttcctttactgaatcaactcccttcagggcattcgaaagttgttaccttaagccaaaaaactattgaatttactctgcctactgtgaccaatacagttggaaaacctacctataaagtgttacatgctgctgcccgaaaatctgtaccacacccatacttttgagaatgaaggaaattctgagcaagataagcaacatgacaaattcagaaatgca

SEQ ID NO: 121131 - DNA, 2133 bp, Homo sapiens
  Payload ID: 3746
  Gene Symbol: CCDC7
  Gene Name: coiled-coil domain containing 7
  Uniprot ID: Q96M83
  ENST ID: ENST00000362006
  CDS Start-End: 544-2004
aacggccccatccggcgccggcggcgggtgcccggcggtctttgctgccgcccgggggcgcagaggccgggccttttctttcagcacaaacgtcagtttgtaaaagggaggtgctggagtctgaggagttttcaggcttccgtctcgaaggaagtctggcaggctcggaattgtcatcttcctcaggcaaatagtttttcaccttagagccagcaaggccaaaccgcccagtcacccgacttcccacagtctcagcaggtacacagggcggggagcctcgggagcggctcccttagcaggacctgagggtttcgggagagtcctggctttgcacttagttttcccgctgcctggctgcctccgtggcggttgtgctgctttttatgcaggatgtaggatcgaaggcaaatcatcctttccctacgtcccctgccaacccctgccgctctcctctattttgtacactttatcattaaaggatttgaaatgaatggaggaataagtttttttcatctgtaatttggaagccaagtcagtaacaaaatgaaaccagtaaagcatctgttgaccaccagtaacaaatcggcaaatgttccagcattaactactaaaaaaggactacataatttaccattatcacctgagctaaaggaaaaacataatgcaaaattaattcatgataaaattgaaccaatggtcctaagatctccaccaacaggagaatccattttacggtatgctttgcccattccatcgagtaagacaaagaacttactaccagaagatgaaatgatcggaaaaattatcaaacatctgaagatggttgtttccactttggaagaaacctatggacattgcgatcagaatggagaagaaccatttgtaaagcatgaacatgaagaattatctttatctgttggggatgatatgaattcattcttgacatattgttcgcaatttgcagctcagctagaagaagcacttaaagaagaacaaaatattttggaatctctttttaagtggtttcagtggcaggtcaatcagatggaagaaataagtaaagatcaaactcttttacaagcagagcctccaaaacctgacaaaacagtcattttaaatattgcagaaatagtaaggcttgtacaaagatttgaagaactgaagaatcgccttaaacagaggtctaaatcctccgtgaaagtcatgttgtctaaaactatggataaagaaaatcgaccagaagcagtgaaaagttgtgaagctctggcacagaaaattgaagaattcttagaagcccactcaactgatgaatttaaagatgtttctgcaacagaaccacaaactgctcattcaatgactaatcgatttaatgccatgttgaaagtatttgaaaaccaggcaaatatgttggagagagctgtaaatgatcaagttttgttagatgctgaatacaaacagatgcagtgtgattttcagttgttatcagaagagaagttggtgctggaaaatgaactacaaaagttgaaggacaaagagaaaactaagcctacaaataatcgaacaaagaaagctgtgaaaacagtgaagaaaaaagacaaaggaaaatctgaggattcagaaaagaagatgtctccagaaaaagagtttaaaataaaagaagatttggatcaagtacagaaagtagcacgtctggaaattgagaacaaagtccttcaggagcaattgaaacaggctttacaggaagctgaaaaagctaagcatcaacttaactatttcctaaatcaagagaagttacttaaaagtgaggggaaaactgagacaacaatgcaagtgggtaatagtcaaacaaaagttaaaggtgaagattcaaaaaatataccattggagaaagaaacaagaaaatcactggtttcagattcaggtggacaaaggacaagtgataaaatccaagaatatccacagatcactgcccaaagcggaagactgattgaaaagagatgctaatagagtttctgaaatactttggaaaagtctcccaaaccttcagagagtggatgggagcgaagtaaggagaccccacctgagcagatacatggtattgcttacaataaagtacatttttgctctttacaa

SEQ ID NO: 121132 - DNA, 2729 bp, Homo sapiens
  Payload ID: 3746
  Gene Symbol: CCDC7
  Gene Name: coiled-coil domain containing 7
  Uniprot ID: Q9H943
  ENST ID: ENST00000375025
  CDS Start-End: 474-2360
acttaaaagtgaggggaaaactgagacaacaatgcaagtgggtaatagtcaaacaaaagttaaaggtgaagattcaaaaaatataccattggagaaagaaacaagaaaatcactggtttcagattcaggtggacaaaggacaagtgataaaatccaagaatatccacagctcagagaagaaacgatctagccctgctatttcagatctttcacagatccttaagtctcaagatgaatcagcatttttagagagttcaaatgaagtttcagttgctgaaaaccaatcctataaatctccatcagagacccatgataaatcacttacaacagtatcatccagcaaagaagttcaagattcactgtctgttggaacattggctcaaaaaaacgaaacagtgatatcaccattcattttacctcctgttcttacagaaagtaaaaaggctgatgtttcagaagaacaattacaaaagatgactgaagaacaaacttaccaagcagcagaaaaatctcaagctcataatgaagtaccaaatgaaaggcttgtagttgagcatcaagaatcattgtcaaaaaccaaattacaaataaagaaacaagaaacttctacagagcaaccactcaccactcctgataaagaaccaaatgaaaatcttatacttaggcatcaagactcaatgtcaaaatcagaaatgcaagtgaaggaacaaagaactctcaaagggcaaagaattattactcatgatgaagaaccaggcaaaaatcttgtgcttgaacatcaagattcagtgtcaaaactggaaatgcaaattgaaaaaaccaaaaaacttcctagagagaaaagacatagtactcatgatgaagaatcaggtgaaaatcctatgcttaaacatcaagattcagtgtcaaaaatccaagtgcaattagagattcaagaaacttctgaaggagaaggacgtagcataccagataaaaattctatgtttgttcatcaagattcagtgtcaaaactccaaatgcaagaaaagaaaaaaataactcctggaagggaaaggcgtaatactcgtattgtagtaccaaatgaaaatgtgatttctgttcatcaagattcaaagtcaaaactccaaatgcaagaaaagaaacaaataaattctggagtggaaagacacaagacgtttcctttagaaatcaaaaaaaaggatatatcacttgaacatctgttgcctgaggagaaagttttattatcaagaagcgaatctcaaacgaagaaacttcaagctaaagtaacttcaagaaaaaagactgatatagaaagcttgagaggtgctttgggaagacgcttattaaatgatgaattcaagacacagtcaaagagtttccctgggcctgatatagaacaattgacagatgcatttggaagagatatactaaaggatgaattcaagacacgatcaaagagtctccctgagactgatgaacgattgcatagtacaactgagagaggtacaataaatgatgcaattaagacgcagttaaagagaaagagttaccctgagactgtcttaaaacacttgaaaggtgttaatggaaaagatataataaagcatctaatcaacatacagtcaaagagtcatggagagactgataagaacttctttgcctatgctactggaagaggtctaatgaaggagtcaaccacgacacaattaaaaagtcacccagagactgataaggaattcttggcagatgctattggaagaggtataataatagggccaatcactacacaactgaagagtcaccgagagactgataaagaactcttaaaagatgctattggaagagatataataaagggaccaatcagtgcacaattaaagagtcaccaggagactgatgtagaacccttgacaaatgccattggttcaagtaaaacaattggtgagataaagacacaactaaggactcactatgatgtgaacttatttaaaaacaaagatatgtccgtacaacgtcaagaaggtatctttactaggagcattacaccaagtaaattcccaacaaaagtgatcaatttatcaccctttgaaaataaagaggaaacttatgagtactcttcaccctatgtgactgcaccttcaaaagcaatttatagaacatatagggctggtccaagcttttctaaagacatccaccttcctttactgaatcaactcccttcagggcattcgaaagttgttaccttaagccaaaaaactattgaatttactctgcctactgtgaccaatacagttggaaaacctacctataaagtgttacatgctgctgcccgaaaatctgtaccacacccatacttttgagaatgaaggaaattctgagcaagataagcaacatgacaaattcagaaatgcaggaaaggaaattgcaagtatagaagccttttgaaaataatactgactcgtgtggatggtgcttattgaaaaacagctggaaatacagtggatcaacagggtaggcccagatcacagaaggcctgaccaggcagtgaatgtgtctttaccatatggaacaattttgaacttctaagatcaagcctttttgttgctgagggtaagaaaggagctctgtgatgaggttccagcttacttctattcgccagtgtccctgtaatgctttctggtgtgatgtaaaatcaattaaacaaaacttgtgctctgcatgttttgaaa

SEQ ID NO: 121133 - DNA, 2129 bp, Homo sapiens
  Payload ID: 3746
  Gene Symbol: CCDC7
  Gene Name: coiled-coil domain containing 7
  ENST ID: ENST00000375028
  CDS Start-End: 71-1969
tggtttcagattcaggtggacaaaggacaagtgataaaatccaagaatatccacaggcagtacaagaaacatggtgccggcatctgcttctggcgagggcctcagggagcttctactcgtgcaggaaggtgaagtgggagcagatatgtcacacgctcataatgaagtaccaaatgaaaggcttgtagttgagcatcaagaatcattgtcaaaaaccaaattacaaataaagaaacaagaaacttctacagagcaaccactcaccactcctgataaagaaccaaatgaaaatcttatacttaggcatcaagactcaatgtcaaaatcagaaatgcaagtgaaggaacaaagaactctcaaagggcaaagaattattactcatgatgaagaatcaggtgaaaatcctatgcttaaacatcaagattcagtgtcaaaaatccaagtgcaattagagattcaagaaacttctgaaggagaaggacgtagcataccagataaaaattctatgtttgttcatcaagattcagtgtcaaaactccaaatgcaagaaaagaaaaaaataactcctggaagggaaaggcgtaatactcgtattgtagtaccaaatgaaaatgtgatttctgttcatcaagattcaaagtcaaaactccaaatgcaagaaaagaaacaaataaattctggagtggaaagacacaagacgtttcctttagaaatcaaaaaaaaggatatatcacttgaacatctgttgcctgaggagaaagttttattatcaagaagcgaatctcaaacgaagaaacttcaagctaaagtaacttcaagaaaaaagactgatatagaaagcttgagaggtgctttgggaagacgcttattaaatgatgaattcaagacacagtcaaagagtttccctgggcctgatatagaacaattgacagatgcatttggaagagatatactaaaggatgaattcaagacacgatcaaagagtctccctgagactgatgaacgattgcatagtacaactgagagaggtacaataaatgatgcaattaagacgcagttaaagagaaagagttaccctgagactgtcttaaaacacttgaaaggtgttaatggaaaagatataataaagcatctaatcaacatacagtcaaagagtcatggagagactgataaggaacacttagcagatgatactggaagaggtataataaagggatcaatcaatgcacaactaaagggtcaccaaaagactgataagaacttctttgcctatgctactggaagaggtctaatgaaggagtcaaccacgacacaattaaaaagtcacccagagactgataaggaattcttggcagatgctattggaagaggtataataatagggccaatcactacacaactgaagagtcaccgagagactgataaagaactcttaaaagatgctattggaagagatataataaagggaccaatcagtgcacaattaaagagtcaccaggagactgatgtagaacccttgacaaatgccattggttcaagtaaaacaattggtgagataaagacacaactaaggactcactatgatgtgaacttatttaaaaacaaagatatgtccgtacaacgtcaagaaggtatctttactaggagcattacaccaagtaaattcccaacaaaagtgatcaatttatcaccctttgaaaataaagaggaaacttatgagtactcttcaccctatgtgactgcaccttcaaaagcaatttatagaacatatagggctggtccaagcttttctaaagacatccaccttcctttactgaatcaactcccttcagggcattcgaaagttgttaccttaagccaaaaaactattgaatttactctgcctactgtgaccaatacagttggaaaacctacctataaagtgttacatgctgctgcccgaaaatctgtaccacacccatacttttgagaatgaaggaaattctgagcaagataagcaacatgacaaattcagaaatgcaggaaaggaaattgcaagtatagaagccttttgaaaataatactgactcgtgtggatggtgcttattgaaaaacagctggaaatacagtggatcaacagggtaggccca

SEQ ID NO: 121134 - DNA, 2542 bp, Homo sapiens
  Payload ID: 3746
  Gene Symbol: CCDC7
  Gene Name: coiled-coil domain containing 7
  ENST ID: ENST00000375030
  CDS Start-End: 619-2382
tggtttcagattcaggtggacaaaggacaagtgataaaatccaagaatatccacagatcactgcccaaagcggaagactgattgaaaagagatgctaatagagtttctgaaatactttggaaaagtctcccaaaccttcagagagtggatgggagcgaagtaaggagaccccacctgagcagatacatgctcagagaagaaacgatctagccctgctatttcagatctttcacagatccttaagtctcaagatgaatcagcatttttagagagttcaaatgaagtttcagttgctgaaaaccaatcctataaatctccatcagagacccatgataaatcacttacaacagtatcatccagcaaagaagttcaagattcactgtctgttggaacattggctcaaaaaaacgaaacagtgatatcaccattcattttacctcctgttcttacagaaagtaaaaaggctgatgtttcagaagaacaattacaaaagatgactgaagaacaaacttaccaagcagcagaaaaatctcaagaattccctttatcggacgtgaaggacctcttcaaggagaactacaaaccactgctcaatgaaataaaagaggatacaaagaaatggaagaacattccatgctcatgggaaggaagaatcaatatcgtgaaaatggccatactgcccaagctcataatgaagtaccaaatgaaaggcttgtagttgagcatcaagaatcattgtcaaaaaccaaattacaaataaagaaacaagaaacttctacagagcaaccactcaccactcctgataaagaaccaaatgaaaatcttatacttaggcatcaagactcaatgtcaaaatcagaaatgcaagtgaaggaacaaagaactctcaaagggcaaagaattattactcatgatgaagaaccaggcaaaaatcttgtgcttgaacatcaagattcagtgtcaaaactggaaatgcaaattgaaaaaaccaaaaaacttcctagagagaaaagacatagtactcatgatgaagaatcaggtgaaaatcctatgcttaaacatcaagattcagtgtcaaaaatccaagtgcaattagagattcaagaaacttctgaaggagaaggacgtagcataccagataaaaattctatgtttgttcatcaagattcagtgtcaaaactccaaatgcaagaaaagaaaaaaataactcctggaagggaaaggcgtaatactcgtattgtagtaccaaatgaaaatgtgatttctgttcatcaagattcaaagtcaaaactccaaatgcaagaaaagaaacaaataaattctggagtggaaagacacaagacgtttcctttagaaatcaaaaaaaaggatatatcacttgaacatctgttgcctgaggagaaagttttattatcaagaagcgaatctcaaacgaagaaacttcaagctaaagtaacttcaagaaaaattaaaaatgaagcagcctcagaacttccagatacagcagaaaatcttccagcaatgtacccgtcaattagcgacctaataattcaatttgatttaaacaaagtggtcgagactgtcttaaaacacttgaaaggtgttaatggaaaagatataataaagcatctaatcaacatacagtcaaagagtcatggagagactgataagaacttctttgcctatgctactggaagaggtctaatgaaggagtcaaccacgacacaattaaaaagtcacccagagactgataaggaattcttggcagatgctattggaagaggtataataatagggccaatcactacacaactgaagagtcaccgagagactgataaagaactcttaaaagatgctattggaagagatataataaagggaccaatcagtgcacaattaaagagtcaccaggagactgatgtagaacccttgacaaatgccattggttcaagtaaaacaattggtgagataaagacacaactaaggactcactatgatgtgaacttatttaaaaacaaagatatgtccgtacaacgtcaagaaggtatctttactaggagcattacaccaagtaaattcccaacaaaagtgatcaatttatcaccctttgaaaataaagaggaaacttatgagtactcttcaccctatgtgactgcaccttcaaaagcaatttatagaacatatagggctggtccaagcttttctaaagacatccaccttcctttactgaatcaactcccttcagggcattcgaaagttgttaccttaagccaaaaaactattgaatttactctgcctactgtgaccaatacagttggaaaacctacctataaagtgttacatgctgctgcccgaaaatctgtaccacacccatacttttgagaatgaaggaaattctgagcaagataagcaacatgacaaattcagaaatgcaggaaaggaaattgcaagtatagaagccttttgaaaataatactgactcgtgtggatggtgcttattgaaaaacagctggaaatacagtggatcaacagggtaggccca

SEQ ID NO: 121135 - DNA, 482 bp, Homo sapiens
  Payload ID: 3746
  Gene Symbol: CCDC7
  Gene Name: coiled-coil domain containing 7
  ENST ID: ENST00000435402
  CDS Start-End: 1-482
aaaactaagcctacaaataatcgaacaaagaaagctgtgaaaacagtgaagaaaaaagacaaaggaaaatctgaggattcagaaaagaagatgtctccagaaaaagagtttaaaataaaagaagatttggatcaagtacagaaagtagcacgtctggaaattgagaacaaagtccttcaggagcaattgaaacaggctttacaggaagctgaaaaagctaagcatcaacttaactatttcctaaatcaagagaagttacttaaaagtgaggggaaaactgagacaacaatgcaagtgggtaatagtcaaacaaaagttaaaggtgaagattcaaaaaatataccattggagaaagaaacaagaaaatcactggtttcagattcaggtggacaaaggacaagtgataaaatccaagaatatccacagatgctaatagagtttctgaaatactttggaaaagtctcccaaaccttcagagagtg

SEQ ID NO: 121136 - DNA, 1819 bp, Homo sapiens
  Payload ID: 3746
  Gene Symbol: CCDC7
  Gene Name: coiled-coil domain containing 7
  Uniprot ID: Q96M83
  ENST ID: ENST00000476558
  CDS Start-End: 310-1113
aacggccccatccggcgccggcggcgggtgcccggcggtctttgctgccgcccgggggcgcagaggccgggccttttctttcagcacaaacgtcagtttgtaaaagggaggtgctggagtctgaggagttttcaggcttccgtctcgaaggaagtctggcaggctcggaattgtcatcttcctcaggcaaatagtttttcaccttagagccagcaaggccaaaccgcccagtcacccgacttcccacagtctcagcagggaggaataagtttttttcatctgtaatttggaagccaagtcagtaacaaaatgaaaccagtaaagcatctgttgaccaccagtaacaaatcggcaaatgttccagcattaactactaaaaaaggactacataatttaccattatcacctgagctaaaggaaaaacataatgcaaaattaattcatgataaaattgaaccaatggtcctaagatctccaccaacaggagaatccattttacggtatgctttgcccattccatcgagtaagacaaagaacttactaccagaagatgaaatgatcggaaaaattatcaaacatctgaagatggttgtttccactttggaagaaacctatggacattgcgatcagaatggagaagaaccatttgtaaagcatgaacatgaagaattatctttatctgttggggatgatatgaattcattcttgacatattgttcgcaatttgcagctcagctagaagaagcacttaaagaagaacaaaatattttggaatctctttttaagtggtttcagtggcaggtcaatcagatggaagaaataagtaaagatcaaactcttttacaagcagagcctccaaaacctgacaaaacagtcattttaaatattgcagaaatagtaaggcttgtacaaagatttgaagaactgaagaatcgccttaaacagaggtctaaatcctccgtgaaagtcatgttgtctaaaactatggataaagaaaatcgaccagaagcagtgaaaagttgtgaagctctggcacagaaaattgaagaattcttagaagcccactcaactgatgaatttaaagatgtttctgcaacagaaccacagctgtaaatgatcaagttttgttagatgctgaatacaaacagatgcagtgtgattttcagttgttatcagaagagaagttggtgctggaaaatgaactacaaaagttgaaggacaaagagaaaactaagcctacaaataatcgaacaaagaaagctgtgaaaacagtgaagaaaaaagacaaaggaaaatctgaggattcagaaaagaagatgtctccagaaaaagagtttaaaataaaagaagatttggatcaagtacagaaagtagcacgtctggaaattgagaacaaagtccttcaggagcaattgaaacaggctttacaggaagctgaaaaagctaagcatcaacttaactatttcctaaatcaagagaagttacttaaaagtgaggggaaaactgagacaacaatgcaagtgggtaatagtcaaacaaaagttaaaggtgaagattcaaaaaatataccattggagaaagaaacaagaaaatcactggtttcagattcaggtggacaaaggacaagtgataaaatccaagaatatccacagatcactgcccaaagcggaagactgattgaaaagagatgctaatagagtttctgaaatactttggaaaagtctcccaaaccttcagagagtggatgggagcgaagtaaggagaccccacctgagcagatacatggtattgcttacaataaagtacatttttgctcttt

SEQ ID NO: 121137 - DNA, 3998 bp, Homo sapiens
  Payload ID: 3746
  Gene Symbol: CCDC7
  Gene Name: coiled-coil domain containing 7
  ENST ID: ENST00000545067
  CDS Start-End: 297-812
agtctcagcaggtacacagggcggggagcctcgggagcggctcccttagcaggacctgagggtttcgggagagtcctggctttgcacttagttttcccgctgcctggctgcctccgtggcggttgtgctgctttttatgcaggatgtaggatcgaaggcaaatcatcctttccctacgtcccctgccaacccctgccgctctcctctattttgtacactttatcattaaaggatttgaaatgaatggaggaataagtttttttcatctgtaatttggaagccaagtcagtaacaaaatgaaaccagtaaagcatctgttgaccaccagtaacaaatcggcaaatgttccagcattaactactaaaaaaggactacataatttaccattatcacctgagctaaaggaaaaacataatgcaaaattaattcatgataaaattgaaccaatggtcctaagatctccaccaacaggagaatccattttacggtatgctttgcccattccatcgagtaagacaaagaacttactaccagaagatgaaatgatcggaaaaattatcaaacatctgaagatggttgtttccactttggaagaaacctatggacattgcgatcagaatggagaagaaccatttgtaaagcatgaacatgaagaattatctttatctgttggggatgatatgaattcattcttgacatattgttcgcaatttgcagctcagctagaagaagcacttaaagaagaacaaaatattttggaatctctttttaagtggtttcagtggcaggtcaatcagatggaagaaggataaagaaaatcgaccagaagcagtgaaaagttgtgaagctctggcacagaaaattgaagaattcttagaagcccactcaactgatgaatttaaagatgtttctgcaacagaaccacgattaactccttgggttgccaaataaacccaaaacattgaatttaatgtgtatgcagaaaccaaatccacttttgcttgttcaagtggatccaacttctgcaacaactcatttctagaaacagacatcgtggtcttcagcatctcatccacagcaccaatggaattctcaaacgctgacaaatactcgtgaatttctactggatagtcttcattaatttcttcacctgccgttatggctgactcacggccttcgactccagcctcccggaaagcggtcgggcaacgatgacgacaatgacgcgccagctctgcccgcgccaccagcggcgctttccgatgatctcaccaatgtatagctttttatacacaaattacataccaataaagtgatttaaaagtataggataaaatatagaaactaggattttattaaattattatgcataaatttatatagtagcaggataggacaatcatgttggtctttgggggagctaatagacatattcttcaggatcttgtcagtgcattgtctagctgttcacctgtgcatattgagaaataaataaataggcatagatctagagggccttgaaattcttttgtaattgtgggacaaattgagatctcaattagatattgatttgttggatggtttgtgaagatatgattcctttttggtgaacagaatgcttagaactagtgttcagtcttagagatgaagttgttaagttagataagaacaatgtacattacctgaatcatgtggtctggacaggaaagcagtcctgttaagaattccttcatgacatttttctagggaggcatagatgttacaagtgaaggtaataggctgttttgcctttcaaagcgtctttagcccaagtgcatgcatcacaaatagtcaccttatgtcagaattggaatcataataattctaacatggcaaattcacattcgtgaatgaatttcagtgattagctagggcataggcaaggcaaaggcatccatgtggttaaaaagtaatgacagattctgaattcacatcatttaaaaaagtaacattgattacagacctaaatgtaagaaaataaaaccataaaaagggagggaattcaactcccaaaactgaaaacacctcgttcaaaattgaagcaaagttacaaggtaagcagtagactgggagaaaagatttgtgctcatacagtagaaaaaaggagtactaataagaatctataactccctaaaaacacataagaaaaataggcaaagtatataaagaggaggtaactaagggaaagacaaaaaaattggccaataaacattttaagagatgctcaatctcaccgtgatcagggaagatataagacaaagccatgacttttttgtctacaaaatttagaagttttctaatatcaactattggcagagaggtagtggaatgaatactcttaccatgctaatataatagaaatttccccctttcgaggacaatttagcacagtttagtaataacaaaagtgtatgccatgttatatagcaaatctctttttatctaccctcgggaaaggagtacaatgtgctcaagaaagcatataaaaggaattttttttgcatcagtgcgatggtagcagaactagaaagaacctgtttttgttagtaggagtatggctcaataatctatggtaaatggataataagggaatactatgaataactatgtgaccacaaattagataacttagatgatatatatctctagaaaaacccaaactaaactgtatcaagaagaacaagaacatgtgactgaacttataagtagtaaaagatttaattagtaattaacatattcccaccaagaaatgcttaggccagatgacttcactttttaatcctgtcaaatatttaaagaagagttaataccaggcctgtacaaactcttctaaaaaattaaagagttcacacttctcaattcattctatgagattagtgttactctgataccaaaattagacaatcacaagaacataaatatgatatttattttaagaagataaatatatgttatgaatatgaacatgaaaatccttaccaaaatactagcaaactgaatccaacagcatataaaaaagattatctatgatgaacatgtgagatttattttaggaatgcaaggttgatttaaaatgcaggtatcaatttacataatgtgtaatattgattaaataaaggagaaaaaattacatcagttcgctagattcagtaaatgcacttgacaaaattcaacatctttttatgatacaaagttccacaaaccaggaatagaaggaaacttccttaacctgatgaaggccatctacaaaccccatggtcaacatcatactcagtggtgagaatgaataatttctccctatgatcaggaacaagacaagacattcacttctattcatcattatagtggaggttctagcaagggcaattatggaagaaaaggaaataaaagtgtctgcattggtgaggaagaagtaaaactacctctatttgcaaatgacatgattttagatataaaaacatcctgagttctgctaaaacctattggaagtaatgaatgaattcatcaaggctgcaatatacatgatcaataaacaaaaacaatttgtatttctatacactagctgttatgggttgaattgtatcccctcaaaagatatgttgaagttctcaccccctgctacctcagggtgaccttatttggaaacagggttattcccgatattattagttgagatgaggtcatactggagtaggatgggcccttaatccaacgtgactaatgtccttataggaattggaaaagacagataaacatggaggaaatactgctaatgtaaagatagagacagagactggatttattctgccacaatccaaagaatgccagggactaacagtggctagaataggcatggtggtttccttccccagatatttcagagggagcatggctgtgccaacactttaattttggatttcaagtcatcaggctgtgagaaaataaattcttgttgtttt

SEQ ID NO: 121138 - DNA, 657 bp, Homo sapiens
  Payload ID: 3746
  Gene Symbol: CCDC7
  Gene Name: coiled-coil domain containing 7
  ENST ID: ENST00000537047
  CDS Start-End: 23-550
tggaagccaagtcagtaacaaaatgaaaccagtaaagcatctgttgaccaccagtaacaaatcggcaaatgttccagcattaactactaaaaaaggactacataatttaccattatcacctgagctaaaggaaaaacataatgcaaaattaattcatgataaaattgaaccaatggtcctaagatctccaccaacaggagaatccattttacggtatgctttgcccattccatcgagtaagacaaagaacttactaccagaagatgaaatgatcggaaaaattatcaaacatctgaagatggttgtttccactttggaagaaacctatggacattgcgatcagaatggagaagaaccatttgtaaagcatgaacatgaagaattatctttatctgttggggatgatatgaattcattcttgacatattgttcgcaatttgcagctcagctagaagaagcacttaaagaagaacaaaatattttggaatctctttttaagtggtttcagtggcaggtcaatcagatggaagaaaaactgctcattcaatgactaatcgatttaatgccatgttgaaagtatttgaaaaccaggcaaatatgttggagagagctgtaaatgatcaagttttgttagatgctgaatacaaacagatgcag

SEQ ID NO: 121139 - DNA, 581 bp, Homo sapiens
  Payload ID: 3746
  Gene Symbol: CCDC7
  Gene Name: coiled-coil domain containing 7
  ENST ID: ENST00000539197
  CDS Start-End: 23-544
tggaagccaagtcagtaacaaaatgaaaccagtaaagcatctgttgaccaccagtaacaaatcggcaaatgttccagcattaactactaaaaaaggactacataatttaccattatcacctgagctaaaggaaaaacataatgcaaaattaattcatgataaaattgaaccaatggtcctaagatctccaccaacaggagaatccattttacggtatgctttgcccattccatcgagtaagacaaagaacttactaccagaagatgaaatgatcggaaaaattatcaaacatctgaagatggttgtttccactttggaagaaacctatggacattgcgatcagaatggagaagaaccatttgtaaagcatgaacatgaagaattatctttatctgttggggatgatatgaattcattcttgacatattgttcgcaatttgcagctcagctagaagaagcacttaaagaagaacaaaatattttggaatctctttttaagtggtttcagtggcaggtcaatcagatggaagaaagctgtaaatgatcaagttttgttagatgctgaatacaaacagatgcag

SEQ ID NO: 121140 - DNA, 700 bp, Homo sapiens
  Payload ID: 3746
  Gene Symbol: CCDC7
  Gene Name: coiled-coil domain containing 7
  ENST ID: ENST00000535327
  CDS Start-End: 23-538
tggaagccaagtcagtaacaaaatgaaaccagtaaagcatctgttgaccaccagtaacaaatcggcaaatgttccagcattaactactaaaaaaggactacataatttaccattatcacctgagctaaaggaaaaacataatgcaaaattaattcatgataaaattgaaccaatggtcctaagatctccaccaacaggagaatccattttacggtatgctttgcccattccatcgagtaagacaaagaacttactaccagaagatgaaatgatcggaaaaattatcaaacatctgaagatggttgtttccactttggaagaaacctatggacattgcgatcagaatggagaagaaccatttgtaaagcatgaacatgaagaattatctttatctgttggggatgatatgaattcattcttgacatattgttcgcaatttgcagctcagctagaagaagcacttaaagaagaacaaaatattttggaatctctttttaagtggtttcagtggcaggtcaatcagatggaagaaggataaagaaaatcgaccagaagcagtgaaaagttgtgaagctctggcacagaaaattgaagaattcttagaagcccactcaactgatgaatttaaagatgtttctgcaacagaaccacagctgtaaatgatcaagttttgttagatgctgaatacaaacagatgcag

SEQ ID NO: 121141 - DNA, 1858 bp, Homo sapiens
  Payload ID: 3746
  Gene Symbol: CCDC7
  Gene Name: coiled-coil domain containing 7
  ENST ID: ENST00000623087
  CDS Start-End: 1-1500
aggcgtaatactcgtattgtagtaccaaatgaaaatgtgatttctgttcatcaagattcaaagtcaaaactccaaatgcaagaaaagaaacaaataaattctggagtggaaagacacaagacgtttcctttagaaatcaaaaaaaaggatatatcacttgaacatctgttgcctgaggagaaagttttattatcaagaagcgaatctcaaacgaagaaacttcaagctaaagtaacttcaagaaaaattaaaaatgaagcagcctcagaacttccagatacagcagaaaatcttccagcaatgtacccgtcaattagcgacctaataattcaatttgatttaaacaaagtggtcgagactgatatagaaagcttgagaggtgctttgggaagacgcttattaaatgatgaattcaagacacagtcaaagagtttccctgggcctgatatagaacaattgacagatgcatttggaagagatatactaaaggatgaattcaagacacgatcaaagagtctccctgagactgatgaacgattgcatagtacaactgagagaggtacaataaatgatgcaattaagacgcagttaaagagaaagagttaccctgagactgtcttaaaacacttgaaaggtgttaatggaaaagatataataaagcatctaatcaacatacagtcaaagagtcatggagagactgataaggaacacttagcagatgatactggaagaggtataataaagggatcaatcaatgcacaactaaagggtcaccaaaagactgataagaacttctttgcctatgctactggaagaggtctaatgaaggagtcaaccacgacacaattaaaaagtcacccagagactgataaggaattcttggcagatgctattggaagaggtataataatagggccaatcactacacaactgaagagtcaccgagagactgataaagaactcttaaaagatgctattggaagagatataataaagggaccaatcagtgcacaattaaagagtcaccaggagactgatgtagaacccttgacaaatgccattggttcaagtaaaacaattggtgagataaagacacaactaaggactcactatgatgtgaacttatttaaaaacaaagatatgtccgtacaacgtcaagaaggtatctttactaggagcattacaccaagtaaattcccaacaaaagtgatcaatttatcaccctttgaaaataaagaggaaacttatgagtactcttcaccctatgtgactgcaccttcaaaagcaatttatagaacatatagggctggtccaagcttttctaaagacatccaccttcctttactgaatcaactcccttcagggcattcgaaagttgttaccttaagccaaaaaactattgaatttactctgcctactgtgaccaatacagttggaaaacctacctataaagtgttacatgctgctgcccgaaaatctgtaccacacccatacttttgagaatgaaggaaattctgagcaagataagcaacatgacaaattcagaaatgcaggaaaggaaattgcaagtatagaagccttttgaaaataatactgactcgtgtggatggtgcttattgaaaaacagctggaaatacagtggatcaacagggtaggcccagatcacagaaggcctgaccaggcagtgaatgtgtctttaccatatggaacaattttgaacttctaagatcaagcctttttgttgctgagggtaagaaaggagctctgtgatgaggttccagcttacttctattcgccagtgtccctgtaatgctttctggtgtgatgtaaaatcaattaaacaaaacttgtgctctgc

SEQ ID NO: 121142 - DNA, 1150 bp, Homo sapiens
  Payload ID: 3747
  Gene Symbol: CCDC70
  Gene Name: coiled-coil domain containing 70
  Uniprot ID: Q6NSX1
  ENST ID: ENST00000242819
  CDS Start-End: 297-998
aagtcaaagattgaagaggaactctttcaaacctttcaagtgccccctcctttccttaaagtcttttataggggtccccttcttggccatctccatcctgtgagtcaggactgaaagggcacagacaggtcactgccagcattgttggggcaagcctgcaagcacgcatcactggggatctgacatgacaatggccgcctgccccctctgagggctacaggacttaccccagtgggaagcagctaagcaggtctgaccagccgacctggacctggccaagggtcctgtcatccctcatggccaccccgccattccggctgataaggaagatgttttccttcaaggtgagcagatggatggggcttgcctgcttccggtccctggcggcatcctctcccagtattcgccagaagaaactaatgcacaagctgcaggaggaaaaggcttttcgcgaagagatgaaaatttttcgtgaaaaaatagaggacttcagggaagagatgtggactttccgaggcaagatccatgctttccggggccagatcctgggtttttgggaagaggagagacctttctgggaagaggagaaaaccttctggaaagaggaaaaatccttctgggaaatggaaaagtctttcagggaggaagagaaaactttctggaaaaagtaccgcactttctggaaggaggataaggccttctggaaagaggacaatgccttatgggaaagagaccggaaccttcttcaggaggacaaggccctgtgggaggaagaaaaggccctgtgggtagaggaaagagccctccttgagggggagaaagccctgtgggaagataaaacgtccctctgggaggaagagaatgccctctgggaggaagagagggccttctggatggagaacaatggccacattgccggagagcagatgctcgaagatgggccccacaacgccaacagagggcagcgcttgctggccttctcccgaggcagggcgtagccagcatgcaggtgcagggccctgtggtccagactcccctgggttgggattcaagtccagggtgagcccatgtgctggagaaaatacacactcattggtctccttgctttgaaagatccaataaagtcctgaggcaaggtttggaaaaccaa

SEQ ID NO: 121143 - DNA, 1781 bp, Homo sapiens
  Payload ID: 3748
  Gene Symbol: CCDC71
  Gene Name: coiled-coil domain containing 71
  Uniprot ID: Q8IV32
  ENST ID: ENST00000321895
  CDS Start-End: 108-1511
gttggagcagcggaggcggcgcagaggcgcgtcttgggtccccgcggcggcgccggtgccaagcgctggtttgcggatacccaggcagatctgcagtgcctaatgccatgagtgtggtggttcagcatgtggaggaaaaagctgtgcactcctggtcgcgcatctccacggcagggaagaaggccctggaagaggcactgcttgtctttaacccaatgagccaggatctcagtgccacagaggcccagcttgtggccttcctgcagggcctgcgagatgatggcttccaacctaccatcctgcgcagtggtgatgtctatggctatagttcatgcacagctaatcccccaagccagacgaaactgcaagctcgtgcccctaacccaactgccacatcacctccagccagtgctccccgaactgccatgcggttgcctgcaggtcgggccacactgcttcccatgccgctatctggcagactggccaaagcatccacaccagcccttgccaagcatgctaccaccaacctgctgctgagctctctgaagcaatcaagtgccagccatgcccggggtgcagcagtgggcttccccacccacctttatccaggtgtctaccctgccatgcggctctctgttgtccttgaggccctggttccacttaagactcccatgccctgcttgggtgccaagcacaaggcacagtcactgcagctctcacttgcagactctcctctgaaactgcggaaaagttcagggaagggtccggggaaccctcggcccaaagctcccagaaaaaccacaagcaagggccccaagtgtctgactcgcaaaggccctggggctggaccccgacgaggctctgggcaccagagcaaaaccaacagagccactgggtcccccagtgtccggcgaatgaaagggggctctgccctgggcaccaaaacagcccaggccaaggtagctcgaacactggccaaagctgctcgtgcccaagccaaggtggctcgaacacaggccaaggctgctaaggcccgggccaaggccaaggcagcacaggtcaaggctaaggccaaagctaaggcagcacaggtcaaggccaaggccaaagtcatggcagcatgggccaaggccaaggctaaagccaaggcagtacgggccaaggccaaggtggctcggacccagcccaggggcagaggcaggccaaagggatctgctaaggccagaactacaaggaagggccagaaaaaccgccctgagactgttgggcagaagaggaaaagggctgaggaggcaaaagatcttcctcccaagaagagaacacggcttgggccccgatctcctaaggcatggctagggcctggaacagcaaagctgctgaagttccgtgccataaaggtagataggcggtcctcggatgatgaggtgcggcagcgggctcagcggatcctccgcgtgaacctgtcacctgtaatacggctccagccattgctgccatattcagcagtctgattccttcacacggcaatgtttggggaaactaagcccagctgtctgtgtggctagtggcacagtgtgctatgtccgtggactccacaatcttgaggactcccggtgcctctctagggccctggtgaccaccagcctcctttcagaaaccagagtgggtggggtacggtggggtgggtgggcgggaggggtgttttcatggcgcgatgcactgtgacttgttattcaagttgtatgtctactgttccatctatcacgttttatacctttcca

SEQ ID NO: 121144 - DNA, 4232 bp, Homo sapiens
  Payload ID: 3749
  Gene Symbol: CCDC71L
  Gene Name: coiled-coil domain containing 71-like
  Uniprot ID: Q8N9Z2
  ENST ID: ENST00000523505
  CDS Start-End: 101-808
gagacgccagcagcagccgccgccgcggagccaacgcggactgggacggcggcggcagtagtgggacccggcgagcgtgagtggcccggagcggccttcgatgcggcgcagtatgaagaggcggcggcgccggcgcccggtcgccccggccacggccgcccggggcggcgactttagggcagaagacggggctgggttggaggcgcgggaggagaaggtggtgtactcgcggtcgcaactgtcgctggctgacagcaccaaggcgctgggcgacgccttcaagctcttcatgccccgcagcacggagttcatgagctcggacgcggagctctggagcttcctctgcagcctcaagcaccagttctccccgcacatcctgcgcagcaaggacgtctacggctactcctcctgccgggccctggtacccgaccccccggggccccctacagcccgcggccaggcgcgccggccggttccgcgcgcagcggccaggaggaggcgccgcggagcccgggcggccgctgcccgcaggaggaagccccggccgccacccccaccgccgccgccccccgaggagagctgcccggccaagcccgtggcccccgggccctgcttcgggggccgcaccttggaggagatctggagggcggccaccccgacgctgaccaccttccccaccatccgcgtcggcagcgacgtgtggggcgagcgcagcctggcggcagcgcggcgcagggcgcgccaggtcctgcgagtgaacctggaacccatggtgaggctccgccgcttcccggtgccccgggcatgaggtgcggcctccagggcgcctcctgccggccccgaccttgggacaggccttccgcccggaggaatgaacaagtgtcagtcgagtgtttacagatccggccaggaccccggcccccaatgcactttacgcgcgaagaagttgccggatggttgtccctgtcccgggccgcggcgcggtcgtcttggacgctggggcaggtgtgccctctgctgcctcccgtacccggcctgcggagggaggggacagctggacccgcaggggaggtccctttcttcctgaccaccgattgagacgtctccaggaccttaggggcagatccgttttctcactgttggactctacctcactggtctggaagtcctccgaagacattatttttccaaaggaatttggtttcgtgcttgtgtaataaagccagaatttacttgttctttatctccccctttttctatttcactgtcacccctctttgtggacagaagttcgaacatgtggtgttgcactagtttgtgctcagggtattctgaagcccactcgtttcctaatttttactggattccaaagctttgatcgaggatattttttaagaggttcaagcttgtgactgttagtagtgcaaggatttgtatgggctcagtgattacaaacaaagacatgcaaaatacaactgtttaaacattttcaaggtatttttaaaggttttgtattgaaacaatgtttatatttactgagctcctaaaaatggtagaatacacatgaaaacttttgtttaggaaaagttaacttgttaaattcttttgaattgaataaaaaaatgcattgaaaccatatggtgtgtgattaaaaaaaatgaataaattgtgaagaactggttttggttacaggagtcactggaatccgactggagatgatttggccccctgtcctggtctaacatacaaatctaggaatattatgcgttaaagtattttaaaatacattatccttgtaatgtattttacaaggataatgtattttaaaatgggagttgcataggagagatggatgtgtgtaaacattatcactaaaatgataaacagaatacccattagaattcttagaactattaatgatcaagaggggtggaggcatttcttggtatcaaataactggttaaggttactttgggcgaaatctatttcctttttgtttttgttgttggataacaagaaatgtctagactaatattcatcagttttacaaacataatgaaaattagttgatttttagttgatttttttgtcccaacattttttttaacctttttgccactcattatatgtttgcagttctaggtctttgacagctgaagaccacaggaatcaaacaggcgagacacacagaatactgacccttctttacgcttttatagtgtttataccatatggcccagtgtggaattcttgattatccaagtgcctttggtcatttgtggcaggaaaacttaatagtttttagccagcagtgccacagccagcttttactgcaatacctaaagggtcaagtagtgtttttgtaccactattatttcaaatttaagtattctgccatgaaacgatccatactgggctggaacttgacatgtgaaatctttaatactaaagcttatctctgcttggcagctttttaggagaataatgagagttacaattttgactcttgcgttcctagaattcaaatggcatagctttctgaaatgagtatttcaagtttagtagtccgtataggagtgttgtgacttcaatttcagtgttcttgttaaaagaaataatatgatatatatatacacacatatatataacttgatgccagttttctagtaagcctcagtcttttattcactactcaatgataatgcattgtacaaacactgtcacatgagtaaataaaaatgaataattccttagaagatggagagtgttaaattatatttgtgataggaagcttagacatatcttttggttattagcttccattgccaattgtatttcagatgcatagggttttcttcccaaaaatatattgttaacttttatagctaactagcacctggaaaaaatgtatttgtacaactttactattgtatatagttttataataatgaaaaataaacccaatggccatattagaatgcaatttcgacatacagcttatctagatagttttccagaggattttgaaatttggcttaactgggaggataactgctcagcacaccactgaaacataaccactgacaccattcatttattttaactgagattcttgacatttttctctcctatgccttgttactttagcatacttgaactcacataaatgcttctttggattacatgggctatctgattccattttggatctgattgtccatcttgaattcaatatggtattcatctggactattcaaaaattatgccatttctagtctgtgaaataagatgtaaaaaatctttatttttgccctttggtaaaaacctatgtgacaacttttaaaatgtgaagcaacatctaatatagttgactggtatactaataggaaagtgaaagtatttcatgggtactttgtcacagaatgtgaaaagaaacttggcatagtggcctttataatgaggcatccacttactcctctgaagtgaagtctgtagcttagcttgtgtatagtttttgaaagaaatctcatgatcttcgttcattctcttgccttctcttttatctcatatggcacaagtagagggggaagccaggaggaaattcatcacctcgctatgcttttatttgatttttaattcctgagtgcctaaatgtggtgaccggcacctcacataactttttgagattcttgatgtcatttttatccttcctgtcaaccagcaatgtatttttatgttactaaaaccagtaacgtcataattgttgagggcaagcttcattgttgatagtgcaaagtgtcgctgttgtgatgtgtgtttattttattcaagtttgaatattgacaagtgtaacttaagctggtgactgacacctattgatctgctgtgtgcaaatgatagtactattttttagaaaactcttaagtaaattttaaaaatatttgaatacaaaatatctgagcaattttgaactcaaaagtttttcattgttttaaggattgccacaggactctttaatggtttttaatggacatacatgcctaatatttattggtgtgtttaaaatattttttgatagagtgttatgtcttaagcgcattagaaaacaattgtttgtaatggaatcaaagtgtttccctggacagtttgatgtgcttatggttgagatttataatctgcttgtactttgctttttaacttattaactgtaaataaattttagagaatacata

SEQ ID NO: 121145 - DNA, 1575 bp, Homo sapiens
  Payload ID: 3749
  Gene Symbol: CCDC71L
  Gene Name: coiled-coil domain containing 71-like
  ENST ID: ENST00000315965
  CDS Start-End: 43-993
gcgagcgtgagtggcccggagcggccttcgatgcggcgcagtatgaagaggcggcggcgccggcgcccggtcgccccggccacggccgcccggggcggcgactttagggcagaagacggggctgggttggaggcgcgggaggagaaggtggtgtactcgcggtcgcaactgtcgctggctgacagcaccaaggcgctgggcgacgccttcaagctcttcatgccccgcagcacggagttcatgagctcggacgcggagctctggagcttcctctgcagcctcaagcaccagttctccccgcacatcctgcgcagcaaggacgtctacggctactcgccctacagcccgcggccaggcgcgccggccggttccgcgcgcagcggccaggaggaggcgccgcggagcccgggcggccgctgcccgcaggaggaagccccggccgccacccccaccgccgccgccccccgaggagagctgcccggccaagcccgtggcccccgggccctgcttcgggggccgcaccttggaggagatctggagggcggccaccccgacgctgaccaccttccccaccatccgcgtcggcagcgacgtgtggggcgagcgcagcctggcggcagcgcggcgcagggcgcgccaggtcctgcgagtgaacctggaacccatggtgaggctccgccgcttcccggtgccccgggcatgaggtgcggcctccagggcgcctcctgccggccccgaccttgggacaggccttccgcccggaggaatgaacaagtgtcagtcgagtgtttacagatccggccaggaccccggcccccaatgcactttacgcgcgaagaagttgccggatggttgtccctgtcccgggccgcggcgcggtcgtcttggacgctggggcaggtgtgccctctgctgcctcccgtacccggcctgcggagggaggggacagctggacccgcaggggaggtccctttcttcctgaccaccgattgagacgtctccaggaccttaggggcagatccgttttctcactgttggactctacctcactggtctggaagtcctccgaagacattatttttccaaaggaatttggtttcgtgcttgtgtaataaagccagaatttacttgttctttatctccccctttttctatttcactgtcacccctctttgtggacagaagttcgaacatgtggtgttgcactagtttgtgctcagggtattctgaagcccactcgtttcctaatttttactggattccaaagctttgatcgaggatattttttaagaggttcaagcttgtgactgttagtagtgcaaggatttgtatgggctcagtgattacaaacaaagacatgcaaaatacaactgtttaaacattttcaaggtatttttaaaggttttgtattgaaacaatgtttatatttactgagctcctaaaaatggtagaatacacatgaaaacttttgtttaggaaaagttaacttgttaaattcttttgaattgaataaaaaaatgcattgaaaccatatggtgtgtgattaaaaaaaatgaataaattgtgaagaactgg

SEQ ID NO: 121146 - DNA, 3849 bp, Homo sapiens
  Payload ID: 3750
  Gene Symbol: CCDC73
  Gene Name: coiled-coil domain containing 73
  Uniprot ID: Q6ZRK6
  ENST ID: ENST00000335185
  CDS Start-End: 45-3284
aacaggagctagaggcgcgcttcgctgaggaaataaatattaatatggaaagcaacttcaatactgagtcatcatctacttttactcttcaaagttcttcagagacattgttttctattcagctattagatttcaaaacaagtttactggaggcattagaagaattgcgtatgagaagggaagcagaaattcattatgaagagcagattggtaaaattattgtggagacacaggaacttaaatggcaaaaggaaactcttcagaatcaaaaggaaacattggcagagcaacacaaggaagcaatggcagtttttaaaaagcagttgcagatgaagatgtgtgccctggaagaagaaaagggaaaatatcaacttgctacagaaataaaggaaaaagaaatagaaggattgaaggaaacattaaaagcactacaggtttctaaatactctttacagaagaaagtgagtgaaatggaacaaaaggtccagttacatcttctggctaaagaagactatcataagcaactgagtgaaattgagaaatattatgccacaataacaggtcaatttggattggtaaaagagaatcatgaaaagttagaacaaaatgtacgggaagcaatacaatcaaacaaaagactttcagctttaaataaaaaacaagaagctgaaatatgcagtttaaagaaggaactaaaaaaagcagcctcagacttgataaagtccaaagtcacatgtcaatataagatgggagaagaaaacatcaatctaacaattaaagaacaaaaatttcaagaacttcaagaaagactcaacatggaattggaattaaatgagaagattaatgaagagattacccatattcaagaagaaaaacaggatatcatcatttctttccaacatatgcagcagttacttcggcaacaaattcaagctaatactgaaatggaggcagaattgaaggtgctaaaagaaaataatcagacccttgaaagagataatgagctgcaaagggagaaggtaaaagaaaatgaagaaaagtttcttaatcttcaaaatgagcatgaaaaagcactaggaacttggaaaagacatgctgaagaacttaatggagaaattaataagattaaaaatgaattatcatcccttaaagaaactcatattaagttacaagaacattataacaaattatgcaatcaaaaaacatttgaggaagacaaaaagtttcagaatgttccagaagtaaataatgaaaacagtgaaatgtcaactgaaaaatcagaaaacaccattatacagaaatataatactgagcaagaaataagggaagaaaatatggagaatttttgttcagatactgaatacagagaaaaagaagaaaaaaaagaaggctcatttatagaggaaataattatagatgatttacagctttttgaaaaaagcttcaagaatgaaattgatactgttgtttctcaggatgaaaatcaaagtgaaatctccttaagcaaaaccctctccttagataaagaagtaattagtcaaggacaaacctcgaatgttacggacaacagaaaatcagttactacagaaataaaagacaagatatgcttggaaaaagacaatggatgtacagaatttaaatcaccaaataatcattttgtagtgttagatacagcaatagaaacagaaaaaatacatctagaaagaaccagaggattagatgttcaccatacagatgtaaatctggaggttgaaaataacaaaacatcatttaacagtattttaaatgagacagcacacaatacatatcacaataataataaagatgtttctgaaaatgagccattcaaacaattcagattgcttccagggactcgagaacatgctctagagaaggaaattacaaatagtgaccaaaccaaagcagatttggactcgtctctagatataaaaaaaaatcctgttccatgtcagaaatatagtttacggaattcaagtaatgttatgttagatgataaacaatgtaaaataaaacaaatacaactgttaactaaaaaaagtgagtgcagcatattactttctaaacaaacttcagattttctgcaagtctgtaatgatactttagagaaatctgaactaactgttccctgtgatatagtaatcgaccaccatgtttcatatgctgcttttagtgctaattcaaaactacttctgaagaactcagataaaaatgtccatagtatgtctatgttggtgaaacctaactcaagccctgggggaaaaactatgtgtaaaaatatgagtgatatgcaaaacagtcaatttaataactgtttgggatacttagaaaacactaatgtgaacatttcccatcttcatcttaacaatgagaatagtcatgcttcacaagccaaagatgtgaaaactgctgttcacatgaaaacttgcacagaaacagagttttccaataaaaagaatcagattgatgagaatcaggtaactgaagccacaaaaaatgacctcttcctttttgtgagcattaatgaaagacagcatacattgttaaataatacagagaaaacagaatcattaaatgacattgtttcaggaaaaatgttcagtgaaggacagctggaggaatcacattcatttcacatagagccatctggagatttagtaaacagaagcggaaggtcaacctttgatctttcaacttcagataaaaaaactgagaaaactccagtatacatgaatttttcagaccccggtccttggtcaaaagtaaatcacattgaaagtcaaacagcgagcagttcgaccccttgcatttctttgttgctgaaggagagaccactagatccatcagaaaacaaaaagatcatttcaatggctctttgtaaaaatattggtgtggatgatgttggaaaggatattggaccagatactaccagcattaacagagttgctgacactttgaataactggagtatccatccagatcccaagggagaacccagtgaagagaagaatgcaatggcaaagactttttatgattcctcttttcccacagaacatgtgaaaacaaagcctctgatatcaactccactacaaagccatttgcaggcaatcaagacgactaaaaatacttctggtgatgatgactggcagagcctcattacgaatcaactaaataaaagtgaaaatttactaagtttagaaaatgacaaccagccaaagaaaagaaaagcagaagagacgttggaaaaaaacaacagattaaaataatgtagataagtgctttcagtagtgaaattatgtaactgaaattctggtatagtttttactagaataaaatgactgttgtatttaaagctctacagtttgtctttgcttttccaagtttttctaatgtgaagaaattgtattactctacttctgtcttctctctgtatattatcctttctttaaagtgctcattgcttcttcaatatccttttttaaagaacagaatttatgtattgtatgacagacattgtgaccccttgtaatttattacttcatatcctctggagtttgtgattttagtataaatttgagacaataactgtccagactaggcaaatttttttagtttataatgttttactatgatttagggcttttttttcaaagaacaaaaattataagcataaaaactcaggtatcagaaagactcaaaaggctgtttttcactttgttcagattttgtttccaggcattaagtgtgtcatacagttgttgccactgctgttttccaaatgtccgatgtgtgctatgactaaaaattgaaaaattaaacacagtgttagtc

SEQ ID NO: 121147 - DNA, 433 bp, Homo sapiens
  Payload ID: 3750
  Gene Symbol: CCDC73
  Gene Name: coiled-coil domain containing 73
  ENST ID: ENST00000528333
  CDS Start-End: 1-347
aggctgaagaacttaatggagaaattaataagattaaaaatgaattatcatcccttaaagaaactcatattaagttacaagaacattataacaaattatgcaatcaaaaaacatttgaggaagacaaaaagtttcaggtgaaaacaaagcctctgatatcaactccactacaaagccatttgcaggcaatcaagacgactaaaaatacttctggtgatgatgactggcagagcctcattacgaatcaactaaataaaagtgaaaatttactaagtttagaaaatgacaaccagccaaagaaaagaaaagcagaagagacgttggaaaaaaacaacagattaaaataatgtagataagtgctttcagtagtgaaattatgtaactgaaattctggtatagtttttactagaataaaatgactgttgtatttaaa

SEQ ID NO: 121148 - DNA, 4381 bp, Homo sapiens
  Payload ID: 3750
  Gene Symbol: CCDC73
  Gene Name: coiled-coil domain containing 73
  ENST ID: ENST00000531481
  CDS Start-End: 278-754
aagtcggagcagtcacaagcgtgtagttgggctgtttaggaagcagccctaatcttttcatgcagggtccacttacgggtttgccctgcacctccagctgcgtaacctacccttccttgctctggttgccaaggggctgctttggcctggagcctcctgactgctgggctgtgtctagaatcttccacgctcccgacccaggagaagcagccacactgaggcatccatctggatctctgcttgggcaggattgagactgcgggaaataaatattaatatggaaagcaacttcaatactgagtcatcatctacttttactcttcaaagttcttcagagacattgttttctattcagctattagatttcaaaacaagtttactggaggcattagaagaattgcgtatgagaagggaagcagaaattcattatgaagagcagattggtaaaattattgtggagacacaggaacttaaatggcaaaaggaaactcttcagaatcaaaaggaaacattggcagagcaacacaaggaagcaatggcagtttttaaaaagcagttgcagatgaagatgtgtgccctggaagaagaaaagggaaaatatcaacttgctacagaaataaaggaaaaagaaatagaaggattgaaggaaacattaaaagcactacaggtttctaaatactctttacagaagaaagtgagtgaaatggtaaggaaattacaaaacatattttcccccatctggattagtacttagggggattggtgtttttgggaataaaatgtgacatttatagtgaaaaaattaattgttgaaactgaatattactgtctccagtaatatgaaaggggatatttgcaatttcacatgttgcataaatgaattatttcacaaatttatttcgagattacatagtacttatacaggttgagcatcccaaatctgaaaactcaaaatttgaaatgcttcaaaattggaaactttttgagtgtcaacatgatgctctaagaaaatgctcattggagtattttggactttagatttttgcatttgagatgcttaacccgtaggtataatgcaaatattccaaaatcccaaaatatcccaaatatgaaacacttctggtcccagcatttctgattagagatattcaacctatatgtttaaaataaattttacacagttcccaaattattgttagggtcttatagtaaaaacaaataacaaaactctaaaacctcttattttaatggtatcttttctagatatttatgtaaacatgtaattattaattatagtgtgaaaaaattgaaatgtatgaagtagtatttaggatataatatttatcccttatcagtgtacacttgggatatggtactgatcctatattgttcaacaaatatttatttactgtgcattcctcttttatagtctgttaaaaactaatgtttttgctttttacagcataacattttagggaatatttactttgatatttttcccttctagctctattttattcagaaggatttttttttctgtgtttttggttgagcaaaattttcctatatccactcaaattgtcaaagggctttttgggtggggctatgctattcagtcttcattctttggagcagactgtaaagcaagtaaaattaatttttgagtaaggcttatatattatatacatgagaagtaagaaatgaactatcaccccttctgacattacatagaaaaacataaagtattttgcttcttgaaattgtttggtgtgttagaaaataagagtcatagactgctaagcttgattgaataaaagatgtgaaaattctgttgctattcaactggaaagaataaaaataatattgtcagactattttaaaccatgattttaattaagaagctgaaaaactagattctggtttagctttaagtaccatgacatttgtactgaaagtcatcttcaacgctacagtggttttacacaaaatatagtgaaattgaataatgtgccctttgacctgggagataaggctacaagttaaagatcaaaggcaacataaaatgtgttttattttattccactttcaaatttcatcaaacagatacttacaatctttaaaaaaaaacatggaaacatgtatatacttattctagtttttggtcacttctaagctttttgttattgtgaattacaacatttatacttactaaaatgatatttcagttatagtcataatattttttctgacagtttaaagcattgcatcacttttaatttaaaaagttttatatgttggtatatatatttaatattttatattcattctggcagaacatttatattttggatttaaaagttagaagtacccctttttctaagcattcttacttatattcattttacattattcctgttacattattattatataattcagatgacttgttctttattcaaagtgcggtatagtattcagtaattcagttaatcttattttattccaagcagtacattattcttttatgttatttggttctatgggcaagacaggaaacaagatagccactagtgtgaaggcacgactttggggagcaataaagttagggtcctaaaagaaataacttgaaaaatactattaagaaaatttcaagtttatgagctcctataggtaagtccttaactactagtaagtttctgtcttctgtgattcagtaagctgattttcttttagaggtggtgataggttctgagataaattaacataatcacaaatcaaacgatttttccatccctaaaagtacctcccctttgaaaaaatcacgatcattaccaattaaaaggatgcaataaaaacatgtgagagagaaatcttaggacattacattcaccatcattgtgatctggtcattgatacaaatttttcctgctgtgtttagtgattactacatagatgaccatgttgggtaataattgaatttatcggtgtctgtgttgtaaaactgaatagctaatatagcttaatgaaggaagtaaacttatcaaaccattgtcgtattgtttttctcttctgtatatcattttcctctaaataaaagatttacaagaaagcctttttctttatgaagttaaagcaatttcaatattgaaagttttgatagattaagaataaccacatactttctttcccagtagaatatttttaaactgaagacttatctggaagtaacttcataatcataaatattatgtatatatgtacacacatatattagcagcatgactttaggtttttaaagtaatctatgcctcatatttgcaactgaaaaggtaaggatatcttaagaaagatgccatagatttttgaaaattgagttttataactccattgatttagtttgggttcatattgaagaaattagaagattagttacaaaattgtaaatgagtgtgttaaatttatattttgattgttatcttttcctctaaagtttactcttaacaaactgattgttttaagggaaactaattttatctccagaagttttcaaatcagtctccttaagtaaataggaaaagggagaaatgtgaagctgtgcattttatcagtaaatatatttctaaaaagttgtgtgtaaatatttttacattattcccattttaaatgcttcaaggctttaaagtaagcttttagactacacacatacatataattatggatatgctatttttccgctaatcttgactttcatagattagatttgtttaaaatgaggtgtacatgtgtttaggaagcaatgaatgctgacattttttgtagactgtgtttgcatttgatagtaaaactacgtaaaagaaaaaataatttgagtcgattcatgcagatagaaaaaccaaacaatatgtacttaactatttcttaatcatctcaataaaatagccttataatacattaaagttttaatagtaaaaatcaatttatttgtattctttaaaatattcttacatctctaaagtgttattaccacttactttttgttgttgcttttcagagaatttaaaccatttgttgatagtcatgaaattagtggcaaactggacaatggacctcttcatctcattttcaaaactaaatcagggtagtaaactacgttcatataggcatatatgggctaatatgctgtaggtgcctatgtgatttagaagtcttaatgttatatatcatggccattgaataggctaatgtgtttgaaaatcagaattatgtcatgcaaacaaatgcaatgaaactgcattttcattaaattcaatttttgccccaaagaatgttggaagagtgtatcagaaattactctaatgtatataaagctctatgcatgaaa

SEQ ID NO: 121149 - DNA, 1543 bp, Homo sapiens
  Payload ID: 3751
  Gene Symbol: CCDC74A
  Gene Name: coiled-coil domain containing 74A
  Uniprot ID: Q96AQ1
  ENST ID: ENST00000295171
  CDS Start-End: 139-1275
cagcgacaggccccgcccccgccaaccgcctcgcgccttccgtcgcccggtttccatggtgacggggcgccaggctagggcggcctggccactgagccggggtgcagtggcagcgggagagtacctggcgatggcgatatgagcggtgcgggggtggcggctgggacgcggccccccagctcgccgaccccgggctctcggcgccggcgccagcgcccctctgtgggcgtccagtccttgaggccgcagagcccgcagctcaggcagagcgacccgcagaaacggaacctggacctggagaaaagcctgcagttcctgcagcagcagcactcggagatgctggccaagctccatgaggagatcgagcatctgaagcgggaaaacaaggatctccattacaagctcataatgaatcagacatcacagaagaaagatggcccctcaggaaaccacctttccagggcctctgctcccttgggcgctcgctgggtctgcatcaacggagtgtgggtagagccgggaggacccagccctgccaggctgaaggagggctcctcacggacacacaggccaggaggcaagcgtgggcgtcttgcgggcggtagcgccgacactgtgcgctctcctgcagacagcctctccatgtcaagcttccagtctgtcaagtccatctctaattcaggcaaggccaggccccagcccggctccttcaacaagcaagattcaaaagctgacgtctcccagaaggcggacctggaagaggagcccctacttcacaacagcaagctggacaaagttcctggggtacaagggcaggccagaaaggagaaagcagaggcctctaatgcaggagctgcctgtatggggaacagccagcaccagggcaggcagatgggggcgggggcacaccccccaatgatcctgccccttcccctgcgaaagcccaccacacttaggcagtgcgaagtgctcatccgcgagctgtggaataccaacctcctgcagacccaagagctgcggcacctcaagtccctcctggaagggagccagaggccccaggcagccccggaggaagctagctttcccagggaccaagaagccacgcatttccccaaggtctccaccaagagcctctccaagaaatgcctgagcccacctgtggcggagcgtgccatcctgcccgcactgaagcagaccccgaagaacaactttgccgagaggcagaagaggctgcaggcaatgcagaaacggcgcctgcatcgctcagtgctttgagccaccccaatctggtcagtgccaggcccaccaacctgcagctggagactggctctctatagcatttcctgatacttccgctacttttaggcctggctaaattccaagacagataacactcaagatagataaagtacttgatctccaaactgacaaactgtttattttctagctgttattttgctatttggcatttacataaaagcacacgatgaagcaggtatcgccttacctgttgaaactgaaaataaagcttgtttatttccaa

SEQ ID NO: 121150 - DNA, 1298 bp, Homo sapiens
  Payload ID: 3751
  Gene Symbol: CCDC74A
  Gene Name: coiled-coil domain containing 74A
  Uniprot ID: Q96AQ1
  ENST ID: ENST00000409856
  CDS Start-End: 92-1030
cggtttccatggtgacggggcgccaggctagggcggcctggccactgagccggggtgcagtggcagcgggagagtacctggcgatggcgatatgagcggtgcgggggtggcggctgggacgcggccccccagctcgccgaccccgggctctcggcgccggcgccagcgcccctctgtgggcgtccagtccttgaggccgcagagcccgcagctcaggcagagcgacccgcagaaacggaacctggacctggagaaaagcctgcagttcctgcagcagcagcactcggagatgctggccaagctccatgaggagatcgagcatctgaagcgggaaaacaaggatctccattacaagctcataatgaatcagacatcacagaagaaagacagcctctccatgtcaagcttccagtctgtcaagtccatctctaattcaggcaaggccaggccccagcccggctccttcaacaagcaagattcaaaagctgacgtctcccagaaggcggacctggaagaggagcccctacttcacaacagcaagctggacaaagttcctggggtacaagggcaggccagaaaggagaaagcagaggcctctaatgcaggagctgcctgtatggggaacagccagcaccagggcaggcagatgggggcgggggcacaccccccaatgatcctgccccttcccctgcgaaagcccaccacacttaggcagtgcgaagtgctcatccgcgagctgtggaataccaacctcctgcagacccaagagctgcggcacctcaagtccctcctggaagggagccagaggccccaggcagccccggaggaagctagctttcccagggaccaagaagccacgcatttccccaaggtctccaccaagagcctctccaagaaatgcctgagcccacctgtggcggagcgtgccatcctgcccgcactgaagcagaccccgaagaacaactttgccgagaggcagaagaggctgcaggcaatgcagaaacggcgcctgcatcgctcagtgctttgagccaccccaatctggtcagtgccaggcccaccaacctgcagctggagactggctctctatagcatttcctgatacttccgctacttttaggcctggctaaattccaagacagataacactcaagatagataaagtacttgatctccaaactgacaaactgtttattttctagctgttattttgctatttggcatttacataaaagcacacgatgaagcaggtatcgccttacctgttgaaactgaaaataaagcttgtttatttccaa

SEQ ID NO: 121151 - DNA, 930 bp, Homo sapiens
  Payload ID: 3751
  Gene Symbol: CCDC74A
  Gene Name: coiled-coil domain containing 74A
  ENST ID: ENST00000454549
  CDS Start-End: 116-523
aaccgcctcgcgccttccgtcgcccggtttccatggtgacggggcgccaggctagggcggcctggccactgagccggggtgcagtggcagcgggagagtacctggcgatggcgatatgagcggtgcgggggtggcggctgggacgcggccccccagctcgccgaccccgggctctcggcgccggcgccagcgcccctctgtgggcgtccagtccttgaggccgcagagcccgcagctcaggcagagcgacccgcagaaacggaacctggacctggagaaaagcctgcagttcctgcagcagcagcactcggagatgctggccaagctccatgaggagatcgagcatctgaagcgggaaaacaagggtgagccggcgcggggccctaggccggccctgcctccccaggcacactcaacactgccgctcccgcagcacagaaacacagccatcaactccagcacacgcctgggctcagggggaacacaggacgggtcagacacacctctgttaaaaactttatagaggggcccgggcgcggcggctcacgcctgtaattccagcactttgggaggccgagacgggcggatcacgaggtcaggagatcgagaccatcctggctaacacgatctccattacaagctcataatgaatcagacatcacagaagaaagatggcccctcaggaaaccacctttccagggcctctgctcccttgggcgctcgctgggtctgcatcaacggagtgtgggtagagccgggaggacccagccctgccaggctgaaggagggctcctcacggacacacaggccaggaggcaagcgtgggcgtcttgcgggcggtagcgccgacactgtgcgctctcctgcagacagcctctccatgtcaagcttccagtctgtcaagtccatctctaattcaggtgagcaggc

SEQ ID NO: 121152 - DNA, 851 bp, Homo sapiens
  Payload ID: 3751
  Gene Symbol: CCDC74A
  Gene Name: coiled-coil domain containing 74A
  ENST ID: ENST00000434330
  CDS Start-End: 232-851
ctgagtgccgagtatcccatcaccaggcgtctgttttgtcaggaccccgcttccccatgtcttcttgagcctcaggacgcccagttcctaatgtcttcttgagcctcccccgcagtccctgatccccacgggatcatgacactgccatagccaggggttccggagttcacctctgtacccctaaagcccaggccctgcctgggcagtgtggatgccctccagtcatctcagatggatgaggccgatatgcccggtgggctctgcctagggaacaggcagggccattcctggcctgacacccacgacgaaggcgtggtggagagcgggatccatggggcagggcccaatcagccagtgggggggcaggacttttgggctcagcagccaggagaggacaggccaggcttcttctctcagaatagctgtggtttcacaagtgctgaggagagcgtgtgcttgctttcagatctccattacaagctcataatgaatcagacatcacagaagaaagacagcctctccatgtcaagcttccagtctgtcaagtccatctctaattcaggcaaggccaggccccagcccggctccttcaacaagcaagattcaaaagctgacgtctcccagaaggcggacctggaagaggagcccctacttcacaacagcaagctggacaaagttcctggggtacaagggcaggccagcccaccacacttaggcagtgcgaagtgctcatccgcgagctgtggaataccaacctcctgcagacccaagagctgcggcacctcaagtccctcctggaagggagccagaggccccaggcagccccggaggaagctagctttcccaggtga

SEQ ID NO: 121153 - DNA, 1347 bp, Homo sapiens
  Payload ID: 3751
  Gene Symbol: CCDC74A
  Gene Name: coiled-coil domain containing 74A
  ENST ID: ENST00000467992
  CDS Start-End: 138-956
agcgacaggccccgcccccgccaaccgcctcgcgccttccgtcgcccggtttccatggtgacggggcgccaggctagggcggcctggccactgagccggggtgcagtggcagcgggagagtacctggcgatggcgatatgagcggtgcgggggtggcggctgggacgcggccccccagctcgccgaccccgggctctcggcgccggcgccagcgcccctctgtgggcgtccagtccttgaggccgcagagcccgcagctcaggcagagcgacccgcagaaacggaacctggacctggagaaaagcctgcagttcctgcagcagcagcactcggagatgctggccaagctccatgaggagatcgagcatctgaagcgggaaaacaaggatctccattacaagctcataatgaatcagacatcacagaagaaagatggcccctcaggaaaccacctttccagggcctctgctcccttgggcgctcgctgggtctgcatcaacggagtgtgggtagagccgggaggacccagccctgccaggctgaaggagggctcctcacggacacacaggccaggaggcaagcgtgggcgtcttgcgggcggtagcgccgacactgtgcgctctcctgcagacagcctctccatgtcaagcttccagtctgtcaagtccatctctaattcaggcaaggccaggccccagcccggctccttcaacaagcaagattcaaaagctgacgtctcccagaaggcggacctggaagaggagcccctacttcacaacagcaagctggacaaagttcctggggtacaagggcaggccagctgcggcacctcaagtccctcctggaagggagccagaggccccaggcagccccggaggaagctagctttcccagggaccaagaagccacgcatttccccaaggtctccaccaagagcctctccaagaaatgcctgagcccacctgtggcggagcgtgccatcctgcccgcactgaagcagaccccgaagaacaactttgccgagaggcagaagaggctgcaggcaatgcagaaacggcgcctgcatcgctcagtgctttgagccaccccaatctggtcagtgccaggcccaccaacctgcagctggagactggctctctatagcatttcctgatacttccgctacttttaggcctggctaaattccaagacagataacactcaagatagataaagtacttgatctccaaactgacaaactgtttattttctagctgttattttgctatttggcatttacataaaagcacacgatgaagcaggtatcgccttacctgttgaaactgaaaataaagcttgtttatttcc

SEQ ID NO: 121154 - DNA, 1549 bp, Homo sapiens
  Payload ID: 3752
  Gene Symbol: CCDC74B
  Gene Name: coiled-coil domain containing 74B
  Uniprot ID: Q96LY2
  ENST ID: ENST00000310463
  CDS Start-End: 139-1281
cagcgacaggccccgcccccgccaaacgcctggcgccctccgtcgcccggtttccatggtgacggggcgccaggctagggcggcctggccactgagccggggtgcagtggcagcgggagagtacctggcgatggcgatatgagcggtgcgggggtggcggctgggacgcggccccccagctcgccgaccccgggctctcggcgccggcgccagcgcccctctgtgggcgtccagtccttgaggccgcagagcccgcagctcaggcagagcgacccgcagaaacggaacctggacctggagaagagcctacagttcctgcagcagcagcactcggagatgctggccaagctccatgaggagatcgagcatctgaagcgggaaaacaaggatctccgttacaagctcataatgaatcagacatcacagaagaaagatggcccctcaggaaaccacctttccagggcctctgctcccttgggcgctcgctgggtctgcatcaacggagtgtgggtagagccgggaggacccagccctgccaggctgaaggagggctcctcacggacacacaggccaggaggcaagcatgggcgtcttgcgggcggtagcgccgacactgtgcgctctcctgcagacagcctctccacgtcaagcttccagtctgtcaagtccatctctaattcaggcaaggccaggccccagcccggctccttcaacaagcaagattcaaaagctgacgtcccccagaaggcggacctggaagaggagcccctacttcacaacagcaagctggacaaggttcctggggtacaagggcaggccagaaaggagaaagcagaggcctctaacgcaggagctgcctgtatggggaacagccagcaccagggcaggcagatgggggcggcggcacaccccccaatgatcctgccccttcccctgcgaaagcccaccacacttaggcagtgcgaagtgctcatccgcgagctgtggaataccaacctcctgcagacccaagagctgcagcacctcaagtccctcctggaagggagccagaggccccaggcagtcccggaggaagctagctttcccagggaccaagaagccacgcatttccccaaggtctccaccaagagcctctccaagaaatgcctgcttctgagcccacctgtggcggagcgtgccatcctgcccgcactgaagcagaccccgaagaacaactttgccgagaggcagaagaggctgcaggcaatgcagaaacggcgcctgcatcgctcggtgctttgagctacccgcatctggtcagtgccaggcccaccaacctgcagctggagattggctctctatagcatttcctgacacttccgctacttttaggcctggctaaattccaagatagataacactcaagatagataaagtacttgatctccaaactgacaaactgtttattttctagctgttattttgctatttggcatttacataaaagcacacgatgaagcaggtatcgccttacctgttgaaactgaaaataaagcttgtttatttccaa

SEQ ID NO: 121155 - DNA, 1353 bp, Homo sapiens
  Payload ID: 3752
  Gene Symbol: CCDC74B
  Gene Name: coiled-coil domain containing 74B
  ENST ID: ENST00000392984
  CDS Start-End: 138-962
agcgacaggccccgcccccgccaaacgcctggcgccctccgtcgcccggtttccatggtgacggggcgccaggctagggcggcctggccactgagccggggtgcagtggcagcgggagagtacctggcgatggcgatatgagcggtgcgggggtggcggctgggacgcggccccccagctcgccgaccccgggctctcggcgccggcgccagcgcccctctgtgggcgtccagtccttgaggccgcagagcccgcagctcaggcagagcgacccgcagaaacggaacctggacctggagaagagcctacagttcctgcagcagcagcactcggagatgctggccaagctccatgaggagatcgagcatctgaagcgggaaaacaaggatctccgttacaagctcataatgaatcagacatcacagaagaaagatggcccctcaggaaaccacctttccagggcctctgctcccttgggcgctcgctgggtctgcatcaacggagtgtgggtagagccgggaggacccagccctgccaggctgaaggagggctcctcacggacacacaggccaggaggcaagcatgggcgtcttgcgggcggtagcgccgacactgtgcgctctcctgcagacagcctctccacgtcaagcttccagtctgtcaagtccatctctaattcaggcaaggccaggccccagcccggctccttcaacaagcaagattcaaaagctgacgtcccccagaaggcggacctggaagaggagcccctacttcacaacagcaagctggacaaggttcctggggtacaagggcaggccagctgcagcacctcaagtccctcctggaagggagccagaggccccaggcagtcccggaggaagctagctttcccagggaccaagaagccacgcatttccccaaggtctccaccaagagcctctccaagaaatgcctgcttctgagcccacctgtggcggagcgtgccatcctgcccgcactgaagcagaccccgaagaacaactttgccgagaggcagaagaggctgcaggcaatgcagaaacggcgcctgcatcgctcggtgctttgagctacccgcatctggtcagtgccaggcccaccaacctgcagctggagattggctctctatagcatttcctgacacttccgctacttttaggcctggctaaattccaagatagataacactcaagatagataaagtacttgatctccaaactgacaaactgtttattttctagctgttattttgctatttggcatttacataaaagcacacgatgaagcaggtatcgccttacctgttgaaactgaaaataaagcttgtttatttcc

SEQ ID NO: 121156 - DNA, 1296 bp, Homo sapiens
  Payload ID: 3752
  Gene Symbol: CCDC74B
  Gene Name: coiled-coil domain containing 74B
  Uniprot ID: Q96LY2
  ENST ID: ENST00000409943
  CDS Start-End: 84-1028
atggtgacggggcgccaggctagggcggcctggccactgagccggggtgcagtggcagcgggagagtacctggcgatggcgatatgagcggtgcgggggtggcggctgggacgcggccccccagctcgccgaccccgggctctcggcgccggcgccagcgcccctctgtgggcgtccagtccttgaggccgcagagcccgcagctcaggcagagcgacccgcagaaacggaacctggacctggagaagagcctacagttcctgcagcagcagcactcggagatgctggccaagctccatgaggagatcgagcatctgaagcgggaaaacaaggatctccgttacaagctcataatgaatcagacatcacagaagaaagacagcctctccacgtcaagcttccagtctgtcaagtccatctctaattcaggcaaggccaggccccagcccggctccttcaacaagcaagattcaaaagctgacgtcccccagaaggcggacctggaagaggagcccctacttcacaacagcaagctggacaaggttcctggggtacaagggcaggccagaaaggagaaagcagaggcctctaacgcaggagctgcctgtatggggaacagccagcaccagggcaggcagatgggggcggcggcacaccccccaatgatcctgccccttcccctgcgaaagcccaccacacttaggcagtgcgaagtgctcatccgcgagctgtggaataccaacctcctgcagacccaagagctgcagcacctcaagtccctcctggaagggagccagaggccccaggcagtcccggaggaagctagctttcccagggaccaagaagccacgcatttccccaaggtctccaccaagagcctctccaagaaatgcctgcttctgagcccacctgtggcggagcgtgccatcctgcccgcactgaagcagaccccgaagaacaactttgccgagaggcagaagaggctgcaggcaatgcagaaacggcgcctgcatcgctcggtgctttgagctacccgcatctggtcagtgccaggcccaccaacctgcagctggagattggctctctatagcatttcctgacacttccgctacttttaggcctggctaaattccaagatagataacactcaagatagataaagtacttgatctccaaactgacaaactgtttattttctagctgttattttgctatttggcatttacataaaagcacacgatgaagcaggtatcgccttacctgttgaaactgaaaataaagcttgtttatttccaa

SEQ ID NO: 121157 - DNA, 871 bp, Homo sapiens
  Payload ID: 3752
  Gene Symbol: CCDC74B
  Gene Name: coiled-coil domain containing 74B
  ENST ID: ENST00000409234
  CDS Start-End: 88-765
ttccatggtgacggggcgccaggctagggcggcctggccactgagccggggtgcagtggcagcgggagagtacctggcgatggcgatatgagcggtgcgggggtggcggctgggacgcggccccccagctcgccgaccccgggctctcggcgccggcgccagcgcccctctgtgggcgtccagtccttgaggccgcagagcccgcagctcaggcagagcgacccgcagaaacggaacctggacctggagaagagcctacagttcctgcagcagcagcactcggagatgctggccaagctccatgaggagatcgagcatctgaagcgggaaaacaaggatctccgttacaagctcataatgaatcagacatcacagaagaaaggtgagaactgggcccttcagttcctgatgggatgctcttgccacccaggggagcccctccagactgtccttgcccacctggctgcactggcccctgtatgccaacccagtggggacaggttctgggggacctggacagatgccgctacctctagccgtggctggatgatgttacgcagccaagcacagcacgtgctgctctcaggaagcccagggcctgaggtcattgcagtggggaggtgggcacagggtgctccccagacctccctcctccaagtagagctgaaatgggaaggaacccctgggacagcccctgccctgctagatctttgcctcagattgctgctgtggccaggcccaggatctccagccctatggctctgagtcctgacatgctgggggcccaggggctctggacacactccatccagggatcccttcctgccatctgggcagcaaccatggggacaaagggaggaagcagagtcct

SEQ ID NO: 121158 - DNA, 789 bp, Homo sapiens
  Payload ID: 3752
  Gene Symbol: CCDC74B
  Gene Name: coiled-coil domain containing 74B
  ENST ID: ENST00000409128
  CDS Start-End: 38-652
gtgcagtggcagcgggagagtacctggcgatggcgatatgagcggtgcgggggtggcggctgggacgcggccccccagctcgccgaccccgggctctcggcgccggcgccagcgcccctctgtgggcgtccagtccttgaggccgcagagcccgcagctcaggcagagcgacccgcagaaacggaacctggacctggagaagagcctacagttcctgcagcagcagcactcggagatgctggccaagctccatgaggagatcgagcatctgaagcgggaaaacaagggtgagccggcgcggggccctaggccggccctgcctccccaggcacactcaacactgccgctcccgcagcacagaaacacagccatcaactccagcacacgcctgggctcagggggaacacaggacgatctccgttacaagctcataatgaatcagacatcacagaagaaagacagcctctccacgtcaagcttccagtctgtcaagtccatctctaattcaggcaaggccaggccccagcccggctccttcaacaagcaagattcaaaagctgacgtcccccagaaggcggacctggaagaggagcccctacttcacaacagcaagctggacaaggttcctggggtacaagggcaggccaggtaaggcttgggtgttcctggggtgcaagggcaggccaggtaagtcttgcctgcaccctaagggccccatgactacatttactaggctcacgccctgcagtcagccaactgctctgcccctagctccaggggcctgtctcc

SEQ ID NO: 121159 - DNA, 561 bp, Homo sapiens
  Payload ID: 3752
  Gene Symbol: CCDC74B
  Gene Name: coiled-coil domain containing 74B
  ENST ID: ENST00000441670
  CDS Start-End: 83-561
tggtgacggggcgccaggctagggcggcctggccactgagccggggtgcagtggcagcgggagagtacctggcgatggcgatatgagcggtgcgggggtggcggctgggacgcggccccccagctcgccgaccccgggctctcggcgccggcgccagcgcccctctgtgggcgtccagtccttgaggccgcagagcccgcagctcaggcagagcgacccgcagaaacggaacctggacctggagaagagcctacagttcctgcagcagcagcactcggagatgctggccaagctccatgaggagatcgagcatctgaagcgggaaaacaagggtgagccggcgcggggccctaggccggccctgcctccccaggcacactcaacactgccgctcccgcagcacagaaacacagccatcaactccagcacacgcctgggctcagggggaacacaggacgatctccgttacaagctcataatgaatcagacatcacagaagaaaggtgagaactgggcccttcagttcctgatgggatgctcttgccacccaggggagcccct

SEQ ID NO: 121160 - DNA, 613 bp, Homo sapiens
  Payload ID: 3752
  Gene Symbol: CCDC74B
  Gene Name: coiled-coil domain containing 74B
  ENST ID: ENST00000457413
  CDS Start-End: 1-613
gagcggtgcgggggtggcggctgggacgcggccccccagctcgccgaccccgggctctcggcgccggcgccagcgcccctctgtgggcgtccagtccttgaggccgcagagcccgcagctcaggcagagcgacccgcagaaacggaacctggacctggagaagagcctacagttcctgcagcagcagcactcggagatgctggccaagctccatgaggagatcgagcatctgaagcgggaaaacaagggtgagccggcgcggggccctaggccggccctgcctccccaggcacactcaacactgccgctcccgcagcacagaaacacagccatcaactccagcacacgcctgggctcagggggaacacaggacgatctccgttacaagctcataatgaatcagacatcacagaagaaagatggcccctcaggaaaccacctttccagggcctctgctcccttgggcgctcgctgggtctgcatcaacggagtgtgggtagagccgggaggacccagccctgccaggctgaaggagggctcctcacggacacacaggccaggaggcaagcatgggcgtcttgcgggcggtagcgccgacactgtgcgctctcct

SEQ ID NO: 121161 - DNA, 806 bp, Homo sapiens
  Payload ID: 3752
  Gene Symbol: CCDC74B
  Gene Name: coiled-coil domain containing 74B
  ENST ID: ENST00000434929
  CDS Start-End: 21-302
gagtacctggcgatggcgatatgagcggtgcgggggtggcggctgggacgcggccccccagctcgccgaccccgggctctcggcgccggcgccagcgcccctctgtgggcgtccagtccttgaggccgcagagcccgcagctcaggcagagcgacccgcagaaacggaacctggacctggagaagagcctacagttcctgcagcagcagcactcggagatgctggccaagctccatgaggagatcgagcatctgaagcgggaaaacaaggggtcagacacacctctgttaaaaactttatagaggggcccgggcgcggcggctcacgcctgtaattccagcactttgggagaccgagacgggcggatcgcgagatctccgttacaagctcataatgaatcagacatcacagaagaaagatggcccctcaggaaaccacctttccagggcctctgctcccttgggcgctcgctgggtctgcatcaacggagtgtgggtagagccgggaggacccagccctgccaggctgaaggagggctcctcacggacacacaggccaggaggcaagcatgggcgtcttgcgggcggtagcgccgacactgtgcgctctcctgcagacagcctctccacgtcaagcttccagtctgtcaagtccatctctaattcaggcaaggccaggccccagcccggctccttcaacaagcaagattcaaaagctgacgtcccccagaaggcggacctggaagaggagcccctacttcacaacagcaagctggacaaggttcctggggtacaagggcaggccag

SEQ ID NO: 121162 - DNA, 824 bp, Homo sapiens
  Payload ID: 3752
  Gene Symbol: CCDC74B
  Gene Name: coiled-coil domain containing 74B
  ENST ID: ENST00000423263
  CDS Start-End: 81-428
gtgacggggcgccaggctagggcggcctggccactgagccggggtgcagtggcagcgggagagtacctggcgatggcgatatgagcggtgcgggggtggcggctgggacgcggccccccagctcgccgaccccgggctctcggcgccggcgccagcgcccctctgtgggcgtccagtccttgaggccgcagagcccgcagctcaggcagagcgacccgcagaaacggaacctggacctggagaagagcctacagttcctgcagcagcagcactcggagatgctggccaagctccatgaggagatcgagcatctgaagcgggaaaacaaggatctccgttacaagctcataatgaatcagacatcacagaagaaagggcctctgctcccttgggcgctcgctgggtctgcatcaacggagtgtgggtagagccgggaggacccagccctgccaggctgaaggagggctcctcacggacacacaggccaggaggcaagcatgggcgtcttgcgggcggtagcgccgacactgtgcgctctcctgcagacagcctctccacgtcaagcttccagtctgtcaagtccatctctaattcaggcaaggccaggccccagcccggctccttcaacaagcaagattcaaaagctgacgtcccccagaaggcggacctggaagaggagcccctacttcacaacagcaagctggacaaggttcctggggtacaagggcaggccagaaaggagaaagcagaggcctctaacgcaggagctgcctgtatggggaacagccagcaccagggcaggcagatgggggcggcggcacacc

SEQ ID NO: 121163 - DNA, 2371 bp, Homo sapiens
  Payload ID: 3753
  Gene Symbol: CCDC77
  Gene Name: coiled-coil domain containing 77
  Uniprot ID: Q9BR77
  ENST ID: ENST00000239830
  CDS Start-End: 180-1646
aacttcttcgcgattgcacggattcagggacgctcagtggcgccgcgccgctccttggtttgacttttgtttttcagttgcgttccctgactcggagtcttagtgtgtcgttatttggacaagaggcacattgacccaatttggagacgtattttggaaggaggtgtgaaaaagacagcatgaactttaccccaacacacacccctgtctgcagaaagcgaacagttgtctccaaacgtggtgttgccgtcagtggtcccaccaagaggaggggaatggcagattcactggagtcaacccccttgccttcccccgaagatcgtctggccaaactccatccttctaaggagctcctggaatattatcaaaagaagatggctgagtgtgaggcagaaaatgaggacttgctgaagaaactggaactctacaaagaagcttgtgaaggacagcataaacttgaatgtgatttgcagcagagggaggaagagattgctgaattgcagaaagctctaagtgatatgcaggtctgcctcttccaggaacgggaacatgttttacgcctctactcagaaaatgaccgactgagaatcagggagctagaagacaagaaaaagattcagaatctcttggctcttgtgggaacagatgctggagaagtgacctatttttgtaaggagcctcctcacaaagtcaccattctccaaaagactatccaggctgtaggtgaatgtgagcagagtgaatcttcagctttcaaagcagatcctaaaataagcaaaagaagaccatcgagagagagaaaagaaagttctgagcattaccaaagagacatacagacactcatcctacaggtggaagcactgcaggctcagctgggagagcagaccaaactttctcgagaacaaattgaagggctcatcgaggacagacggattcaccttgaggaaatacaagttcagcaccagagaaatcagaacaaaatcaaagagctaaccaaaaatcttcaccacacccaagaactgctctatgagagcaccaaagattttctgcaactcagatctgaaaaccaaaataaagagaagtcatggatgcttgaaaaagataatttgatgtcaaagattaagcaatatagggtgcagtgtaagaagaaagaagataaaattggaaaagtgttgcccgttatgcatgagagtcaccatgctcaaagtgaatatattaagtccctaaaagataagttagtacaagagaaaaagctgtccaatatgtaccaagagcagtgcatttccttagaagaagaacttgcccgaattcgtgaggaagagggaatgaggagagagatcttcaaggatcgcactaacaagatggggaagcgtttacagataatgacaaaacgctatgaggcattggagcgtcgacgtatcctggaagtagaaggctttaagacagatattaaagttctccgacagaaactgaaagacttggagcaaatgttgtataaggcaacagttaatgcccgggcaaaccaggatcttgcccttctgtgtgaggtccgtgacagcaatagacgggcacataagatacaaggagaactgaagaatcttaagtcgaaagtgtttggtctggagaatgaacttagactctgttaatgtctacttttggaaatggcccccatttagaagaggtgtgcttcttgaaacctgaggacaaggtcatctgctgccagaaaatgtaaacctgagttgactagagtggtggtattcattattgtaaagacagcttgaagaatcggggaccactaggaaagcttttcttgcatactcagcttgctttatcatttttgctgtccttttaacacttgcgaggagtaggggcctggtcctgaatgacttggaggctttcattatttatcctgtctgtattgaccggtttttgttttttcagaaggcagtgatgatgaaaacttaggaagaaggtattttgcaataagcttggctgagtgtccatgggaagaatactttccctaaagagagagaagcactcacagaggctgcctttctcctgagctcggggagaaggcagcacatcacaacctgtcacattgaaataggcgctcattctgctatttcaccttccgtcctgagcagagcctgaattacgtttttgggcaatttcatggtgtttcaccagagggcgctagagactcaaacgaaatgtccatctggaaagattcgggagacactttgccgaggggatgaagctgagatgatgcttgtatggaaagtttgatatttttatcagtcacatggcttttgaaaaatgatgtatatattttaaattaactattttcaataaaatatttcactcaaaagat

SEQ ID NO: 121164 - DNA, 2338 bp, Homo sapiens
  Payload ID: 3753
  Gene Symbol: CCDC77
  Gene Name: coiled-coil domain containing 77
  Uniprot ID: Q9BR77
  ENST ID: ENST00000422000
  CDS Start-End: 250-1620
atccttccgcagctgcacgacgcctgtgtgtctggcctttccttcttcttctcttccccggcagcacagtgtggctgtttgtctccttgcccgccaaagttctgcccagtccaacgactccacgcagctcgcccttggttatttggacaagaggcacattgacccaatttggagacgtattttggaaggaggcgaacagttgtctccaaacgtggtgttgccgtcagtggtcccaccaagaggaggggaatggcagattcactggagtcaacccccttgccttcccccgaagatcgtctggccaaactccatccttctaaggagctcctggaatattatcaaaagaagatggctgagtgtgaggcagaaaatgaggacttgctgaagaaactggaactctacaaagaagcttgtgaaggacagcataaacttgaatgtgatttgcagcagagggaggaagagattgctgaattgcagaaagctctaagtgatatgcaggtctgcctcttccaggaacgggaacatgttttacgcctctactcagaaaatgaccgactgagaatcagggagctagaagacaagaaaaagattcagaatctcttggctcttgtgggaacagatgctggagaagtgacctatttttgtaaggagcctcctcacaaagtcaccattctccaaaagactatccaggctgtaggtgaatgtgagcagagtgaatcttcagctttcaaagcagatcctaaaataagcaaaagaagaccatcgagagagagaaaagaaagttctgagcattaccaaagagacatacagacactcatcctacaggtggaagcactgcaggctcagctgggagagcagaccaaactttctcgagaacaaattgaagggctcatcgaggacagacggattcaccttgaggaaatacaagttcagcaccagagaaatcagaacaaaatcaaagagctaaccaaaaatcttcaccacacccaagaactgctctatgagagcaccaaagattttctgcaactcagatctgaaaaccaaaataaagagaagtcatggatgcttgaaaaagataatttgatgtcaaagattaagcaatatagggtgcagtgtaagaagaaagaagataaaattggaaaagtgttgcccgttatgcatgagagtcaccatgctcaaagtgaatatattaagtccctaaaagataagttagtacaagagaaaaagctgtccaatatgtaccaagagcagtgcatttccttagaagaagaacttgcccgaattcgtgaggaagagggaatgaggagagagatcttcaaggatcgcactaacaagatggggaagcgtttacagataatgacaaaacgctatgaggcattggagcgtcgacgtatcctggaagtagaaggctttaagacagatattaaagttctccgacagaaactgaaagacttggagcaaatgttgtataaggcaacagttaatgcccgggcaaaccaggatcttgcccttctgtgtgaggtccgtgacagcaatagacgggcacataagatacaaggagaactgaagaatcttaagtcgaaagtgtttggtctggagaatgaacttagactctgttaatgtctacttttggaaatggcccccatttagaagaggtgtgcttcttgaaacctgaggacaaggtcatctgctgccagaaaatgtaaacctgagttgactagagtggtggtattcattattgtaaagacagcttgaagaatcggggaccactaggaaagcttttcttgcatactcagcttgctttatcatttttgctgtccttttaacacttgcgaggagtaggggcctggtcctgaatgacttggaggctttcattatttatcctgtctgtattgaccggtttttgttttttcagaaggcagtgatgatgaaaacttaggaagaaggtattttgcaataagcttggctgagtgtccatgggaagaatactttccctaaagagagagaagcactcacagaggctgcctttctcctgagctcggggagaaggcagcacatcacaacctgtcacattgaaataggcgctcattctgctatttcaccttccgtcctgagcagagcctgaattacgtttttgggcaatttcatggtgtttcaccagagggcgctagagactcaaacgaaatgtccatctggaaagattcgggagacactttgccgaggggatgaagctgagatgatgcttgtatggaaagtttgatatttttatcagtcacatggcttttgaaaaatgatgtatatattttaaattaactattttcaataaaatatttcactc

SEQ ID NO: 121165 - DNA, 2253 bp, Homo sapiens
  Payload ID: 3753
  Gene Symbol: CCDC77
  Gene Name: coiled-coil domain containing 77
  Uniprot ID: Q9BR77
  ENST ID: ENST00000412006
  CDS Start-End: 161-1531
gacttttgtttttcagttgcgttccctgactcggagtcttagtgtgtcgttatttggacaagaggcacattgacccaatttggagacgtattttggaaggaggcgaacagttgtctccaaacgtggtgttgccgtcagtggtcccaccaagaggaggggaatggcagattcactggagtcaacccccttgccttcccccgaagatcgtctggccaaactccatccttctaaggagctcctggaatattatcaaaagaagatggctgagtgtgaggcagaaaatgaggacttgctgaagaaactggaactctacaaagaagcttgtgaaggacagcataaacttgaatgtgatttgcagcagagggaggaagagattgctgaattgcagaaagctctaagtgatatgcaggtctgcctcttccaggaacgggaacatgttttacgcctctactcagaaaatgaccgactgagaatcagggagctagaagacaagaaaaagattcagaatctcttggctcttgtgggaacagatgctggagaagtgacctatttttgtaaggagcctcctcacaaagtcaccattctccaaaagactatccaggctgtaggtgaatgtgagcagagtgaatcttcagctttcaaagcagatcctaaaataagcaaaagaagaccatcgagagagagaaaagaaagttctgagcattaccaaagagacatacagacactcatcctacaggtggaagcactgcaggctcagctgggagagcagaccaaactttctcgagaacaaattgaagggctcatcgaggacagacggattcaccttgaggaaatacaagttcagcaccagagaaatcagaacaaaatcaaagagctaaccaaaaatcttcaccacacccaagaactgctctatgagagcaccaaagattttctgcaactcagatctgaaaaccaaaataaagagaagtcatggatgcttgaaaaagataatttgatgtcaaagattaagcaatatagggtgcagtgtaagaagaaagaagataaaattggaaaagtgttgcccgttatgcatgagagtcaccatgctcaaagtgaatatattaagtccctaaaagataagttagtacaagagaaaaagctgtccaatatgtaccaagagcagtgcatttccttagaagaagaacttgcccgaattcgtgaggaagagggaatgaggagagagatcttcaaggatcgcactaacaagatggggaagcgtttacagataatgacaaaacgctatgaggcattggagcgtcgacgtatcctggaagtagaaggctttaagacagatattaaagttctccgacagaaactgaaagacttggagcaaatgttgtataaggcaacagttaatgcccgggcaaaccaggatcttgcccttctgtgtgaggtccgtgacagcaatagacgggcacataagatacaaggagaactgaagaatcttaagtcgaaagtgtttggtctggagaatgaacttagactctgttaatgtctacttttggaaatggcccccatttagaagaggtgtgcttcttgaaacctgaggacaaggtcatctgctgccagaaaatgtaaacctgagttgactagagtggtggtattcattattgtaaagacagcttgaagaatcggggaccactaggaaagcttttcttgcatactcagcttgctttatcatttttgctgtccttttaacacttgcgaggagtaggggcctggtcctgaatgacttggaggctttcattatttatcctgtctgtattgaccggtttttgttttttcagaaggcagtgatgatgaaaacttaggaagaaggtattttgcaataagcttggctgagtgtccatgggaagaatactttccctaaagagagagaagcactcacagaggctgcctttctcctgagctcggggagaaggcagcacatcacaacctgtcacattgaaataggcgctcattctgctatttcaccttccgtcctgagcagagcctgaattacgtttttgggcaatttcatggtgtttcaccagagggcgctagagactcaaacgaaatgtccatctggaaagattcgggagacactttgccgaggggatgaagctgagatgatgcttgtatggaaagtttgatatttttatcagtcacatggcttttgaaaaatgatgtatatattttaaattaactattttcaataaaatatttcactcaaaa

SEQ ID NO: 121166 - DNA, 1652 bp, Homo sapiens
  Payload ID: 3753
  Gene Symbol: CCDC77
  Gene Name: coiled-coil domain containing 77
  Uniprot ID: Q9BR77
  ENST ID: ENST00000540180
  CDS Start-End: 198-1568
gaatccttccgcagctgcacgacgcctgtgtgtctggcctttccttcttcttctcttccccggcagcacagtgtggctgtttgtctccttgcccgccaaagttctgcccagtccaacgactccacgcagctcgcccttggcgaacagttgtctccaaacgtggtgttgccgtcagtggtcccaccaagaggaggggaatggcagattcactggagtcaacccccttgccttcccccgaagatcgtctggccaaactccatccttctaaggagctcctggaatattatcaaaagaagatggctgagtgtgaggcagaaaatgaggacttgctgaagaaactggaactctacaaagaagcttgtgaaggacagcataaacttgaatgtgatttgcagcagagggaggaagagattgctgaattgcagaaagctctaagtgatatgcaggtctgcctcttccaggaacgggaacatgttttacgcctctactcagaaaatgaccgactgagaatcagggagctagaagacaagaaaaagattcagaatctcttggctcttgtgggaacagatgctggagaagtgacctatttttgtaaggagcctcctcacaaagtcaccattctccaaaagactatccaggctgtaggtgaatgtgagcagagtgaatcttcagctttcaaagcagatcctaaaataagcaaaagaagaccatcgagagagagaaaagaaagttctgagcattaccaaagagacatacagacactcatcctacaggtggaagcactgcaggctcagctgggagagcagaccaaactttctcgagaacaaattgaagggctcatcgaggacagacggattcaccttgaggaaatacaagttcagcaccagagaaatcagaacaaaatcaaagagctaaccaaaaatcttcaccacacccaagaactgctctatgagagcaccaaagattttctgcaactcagatctgaaaaccaaaataaagagaagtcatggatgcttgaaaaagataatttgatgtcaaagattaagcaatatagggtgcagtgtaagaagaaagaagataaaattggaaaagtgttgcccgttatgcatgagagtcaccatgctcaaagtgaatatattaagtccctaaaagataagttagtacaagagaaaaagctgtccaatatgtaccaagagcagtgcatttccttagaagaagaacttgcccgaattcgtgaggaagagggaatgaggagagagatcttcaaggatcgcactaacaagatggggaagcgtttacagataatgacaaaacgctatgaggcattggagcgtcgacgtatcctggaagtagaaggctttaagacagatattaaagttctccgacagaaactgaaagacttggagcaaatgttgtataaggcaacagttaatgcccgggcaaaccaggatcttgcccttctgtgtgaggtccgtgacagcaatagacgggcacataagatacaaggagaactgaagaatcttaagtcgaaagtgtttggtctggagaatgaacttagactctgttaatgtctacttttggaaatggcccccatttagaagaggtgtgcttcttgaaacctgaggacaaggtcatctgctgccagaaaatgt

SEQ ID NO: 121167 - DNA, 556 bp, Homo sapiens
  Payload ID: 3753
  Gene Symbol: CCDC77
  Gene Name: coiled-coil domain containing 77
  ENST ID: ENST00000535052
  CDS Start-End: 281-556
ctgcacgacgcctgtgtgtctggcctttccttcttcttctcttccccggcagcacagtgtggctgtttgtctccttgcccgccaaagttctgcccagtccaacgactccacgcagctcgcccttggtaaggggtcggggaggggcacaagctcttctttactagaggttggagtgcaatggcattatcttggctcactgtaacctcaaacttctgggctgaagcgatcctcctccctcagcctcctgagtagctaggactacaggtgtgaaaaagacagcatgaactttaccccaacacacacccctgtctgcagaaagcgaacagttgtctccaaacgtggtgttgccgtcagtggtcccaccaagaggaggggaatggcagattcactggagtcaacccccttgccttcccccgaagatcgtctggccaaactccatccttctaaggagctcctggaatattatcaaaagaagatggctgagtgtgaggcagaaaatgaggacttgctgaagaaactggaactctacaaagaagcttgtgaaggacagcataaa

SEQ ID NO: 121168 - DNA, 1362 bp, Homo sapiens
  Payload ID: 3753
  Gene Symbol: CCDC77
  Gene Name: coiled-coil domain containing 77
  ENST ID: ENST00000543504
  CDS Start-End: 205-1362
ttcttctcttccccggcagcacagtgtggctgtttgtctccttgcccgccaaagttctgcccagtccaacgactccacgcagctcgcccttggttatttggacaagaggcacattgacccaatttggagacgtattttggaaggaggcgaacagttgtctccaaacgtggtgttgccgtcagtggtcccaccaagaggaggggaatggcagattcactggagtcaacccccttgccttcccccgaagatcgtctggccaaactccatccttctaaggagctcctggaatattatcaaaagaagatggctgagtgtgaggcagaaaatgaggacttgctgaagaaactggaactctacaaagaagcttgtgaaggacagcataaacttgaatgtgatttgcagcagagggaggaagagattgctgaattgcagaaagctctaagtgatatgcaggtctgcctcttccaggaacgggaacatgttttacgcctctactcagaaaatgaccgactgagaatcagggagctagaagacaagaaaaagattcagaatctcttggctcttgtgggaacagatgctggagaagtgacctatttttgtaaggagcctcctcacaaagtcaccattctccaaaagactatccaggctgtaggtgaatgtgagcagagtgaatcttcagctttcaaagcagatcctaaaataagcaaaagaagaccatcgagagagagaaaagaaagttctgagcattaccaaagagacatacagacactcatcctacaggtggaagcactgcaggctcagctgggagagcagaccaaactttctcgagaacaaattgaagggctcatcgaggacagacggattcaccttgaggaaatacaagttcagcaccagagaaatcagaacaaaatcaaagagctaaccaaaaatcttcaccacacccaagaactgctctatgagagcaccaaagattttctgcaactcagatctgaaaaccaaaataaagagaagtcatggatgcttgaaaaagataatttgatgtcaaagattaagcaatatagggtgcagtgtaagaagaaagaagataaaattggaaaagtgttgcccgttatgcatgagagtcaccatgctcaaagtgaatatattaagtccctaaaagataagttagtacaagagaaaaagctgtccaatatgtaccaagagcagtgcatttccttagaagaagaacttgcccgaattcgtgaggaagagggaatgaggagagagatcttcaaggatcgcactaacaagatggggaagcgtttacagataatgacaaaacgctatgaggcattggagcgtcgacgtatcctggaagtagaa

SEQ ID NO: 121169 - DNA, 1611 bp, Homo sapiens
  Payload ID: 3754
  Gene Symbol: CCDC78
  Gene Name: coiled-coil domain containing 78
  Uniprot ID: A2IDD5
  ENST ID: ENST00000293889
  CDS Start-End: 107-1423
agaggccttggcaacgcacttagcagtgccagtggcagcagcagccatggggaagccgggcgtggaggcagcaccgggctcggagctggccagggttccctagcctatggagcacgcagccaccacaggccccaggcctggacctccctctcggcgggtggagaatgttgtgctacgagccaaggactggctgccaggagctcctgggggcaccgcagtgtgggccaccagcttggaagcagaggtcccaccagatctagcgctcaataaggagcagcagctgcagatctccaaggagctggtcgacattcagatcacaacccaccacctacatgagcagcatgaggctgaaatcttccagctgaagagtgagatccttcggctggagagccgggtactggagctggagctgcgaggagatggcaccagccagggctgtgcagtcccagtggagtctgaccccaggcatccccgggcagcagcccaagagctcagacacaaagcccaggtgcctggacactctgatgaccacagattccaggtgcagcccaagaacaccatgaaccccgagaatgagcagcacaggctggggagcggcctgcagggggaagtgaagtgggcgctggagcatcaggaggcccggcagcaggcactggtgacgcgtgtggcaaccctgggccggcagctgcagggagcccgagaggaggccagggcagccgggcagcgactggccacacaggctgtggtgctgtgcagctgccaaggccagctccgtcaggcagaggctgaaaatgcccggctgcagctgcagctcaagaaactgaaggatgagtacgtcctacggctgcaacactgcgcctggcaggcagtggagcacgcagatggtgcaggccaagcgccagccaccacggccctccggacattcctggaggcgactctggaggacatccgggcagcgcaccgcagccgtgagcagcagctggcccgggctgcccgcagctaccacaagaggctggtggatctgagccgcaggcatgaagagctactggttgcctacagggcacctgggaacccccaagctatttttgacatagccagcttggacctggaaccattgcccgtgcccctggtcactgacttcagccatcgggaggaccagcacggcgggcctggggcactgctctcatccccaaaaaagagacccggtggagcctcccaggggggaacatcagagccacagggcctggacgctgcatcctgggcccagatccaccagaagctccgggacttctcccgcagcacccagagctggaacgggagcgggcacagctgctggtccgggccacgatggctgaagagcaactttctgagctacaggagtacgtggaccagcacctgggcaggtacaagcacgaaatcctgaggctgaggaagctggcaggtgcaggggacccctggaaagtgggggctgtgcctccagccaagccccagcatccaaggaccggcagccactaggccgtctcccaaggagcagagcagagcagagctcctcagccagcacagaaccctcccacccagccccccataaaacatgagtcaggatagaaccca

SEQ ID NO: 121170 - DNA, 1055 bp, Homo sapiens
  Payload ID: 3754
  Gene Symbol: CCDC78
  Gene Name: coiled-coil domain containing 78
  ENST ID: ENST00000345165
  CDS Start-End: 1-959
tgaaccccgagaatgagcagcacaggctggggagcggcctgcagggggaagtgaagtgggcgctggagcatcaggaggcccggcagcaggcactggtgacgcgtgtggcaaccctgggccggcagctgcagggagcccgagaggaggccagggcagccgggcagcgactggccacacaggctgtggtgctgtgcagctgccaaggccagctccgtcaggcagaggctgaaaatgcccggctgcagctgcagctcaagaaactgaaggatgagtacgtcctacggctgcaacactgcgcctggcaggcagtggagcacgcagatggtgcaggccaagcgccagccaccacggccctccggacattcctggaggcgactctggaggacatccgggcagcgcaccgcagccgtgagcagcagctggcccgggctgcccgcagctaccacaagaggctggtggatctgagccgcaggcatgaagagctactggttgcctacagggcacctgggaacccccaagctatttttgacatagccagcttggacctggaaccattgcccgtgcccctggtcactgacttcagccatcgggaggaccagcacggcgggcctggggcactgctctcatccccaaaaaagagacccggtggagcctcccaggggggaacatcagagccacagggcctggacgctgcatcctgggcccagatccaccagaagctccgggacttctcccgcagcacccaggcagagctggaacgggagcgggcacagctgctggtccgggccacgatggctgaagagcaactttctgagctacaggagtacgtggaccagcacctgggcaggtacaagcacgaaatcctgaggctgaggaagctggcaggtgcaggggacccctggaaagtgggggctgtgcctccagccaagccccagcatccaaggaccggcagccactaggccgtctcccaaggagcagagcagagcagagctcctcagccagcacagaaccctcccacccagccccccataaaacatgagtcaggatagaaccca

SEQ ID NO: 121171 - DNA, 621 bp, Homo sapiens
  Payload ID: 3754
  Gene Symbol: CCDC78
  Gene Name: coiled-coil domain containing 78
  ENST ID: ENST00000423653
  CDS Start-End: 452-621
gtttccgagttctccggcccctgatggggacgtctgcgcccctcttctcaggccagaggttgtgctacgagccaaggactggctgccaggagctcctgggggcaccgcagtgtgggccaccagcttggaagcagaggtcccaccagatctagcgctcaataaggagcagcagctgcagatctccaaggagctggtcgacattcagatcacaacccaccacctacatgagcagcatgaggctgaaatcttccagctgaagagtgagatccttcggctggagagccgggtactggagctggagctgcgaggagatggcaccagccagggctgtgcagtcccagtggagtctgaccccaggcatccccgggcagcagcccaagagctcagacacaaagcccaggtgcctggacactctgatgaccacagattccaggtgcagcccaagaacaccatgaaccccgagaatgagcagcacaggctggggagcggcctgcagggggaagtgaagtgggcgctggagcatcaggaggcccggcagcaggcactggtgacgcgtgtggcaaccctgggccggcagctgcagggagcccgagaggaggccagggcagccgggcagcgact

SEQ ID NO: 121172 - DNA, 479 bp, Homo sapiens
  Payload ID: 3755
  Gene Symbol: CCDC79
  Gene Name: coiled-coil domain containing 79
  ENST ID: ENST00000559050
  CDS Start-End: 150-479
gtgcgtcgtggcaggtgagcggtgatgaagaaagggcggaagctcccgcttgagggtagacgccacggcctccgctcccgcgcgttgttgtcctgccttaccgcgcttggaaactctacaaaatataaggaaaaagaatatagacaagcatggaaagtgaagacacaaagaaaacacaagaaatgaagactgacctgaacttattattggagtgtctaaagtatcaaatggacaatgctttttcacaaaaggaagctttggtcactattcattcaatttgtcaacaaaacagtaatgcaagtgtttattttcgggaaattggtggtttgatgtttgtaaaaaatcttgcaaagtcaagtgaacatagcatggtaaaagaagcagccttatatacattaggagctattgcagagaaaaatgtttactgtcagcagactttgtgtacttcagagttgtttgaagacttaacttggttctta

SEQ ID NO: 121173 - DNA, 629 bp, Homo sapiens
  Payload ID: 3755
  Gene Symbol: CCDC79
  Gene Name: coiled-coil domain containing 79
  ENST ID: ENST00000559403
  CDS Start-End: 1-76
caaagtcattgtggaagctgaagacagatataaaagtgaactaaggaaatcacttatctgtaacaaaagtaattaattcagcagctttaaaattaaattctgctgaccccacgtagaagacaacgactcagtaatgaatctactacccctggaggaataagtgaatatatttaatttaattttttttttcttgagacagggtctggctctgttacccaggatggagtgcagtggagcaatctcggctcactgcagcctccgcctcccaggttcaagtgattctcctgcctcagcctcctaagtagctgggattacagacatgtgccaccacaccctgctggtttttgtatttttagtagagatggggtttcaccatgttggccaggctggtctcaaactcctgacctcaagtgatccacccaccttggcctcccaaagtgctgggatttcaggcatgagccattgcacctggctgaatatatttaatttttaaatgaacttaaatttcatatatttctgagaaagaacagctgagtggttgttctcagtcttattattaatggatcttaaatgataaaccttgcctctgatgagggtcagaccttctaataaaagagactttcctcttc

SEQ ID NO: 121174 - DNA, 2257 bp, Homo sapiens
  Payload ID: 3755
  Gene Symbol: CCDC79
  Gene Name: coiled-coil domain containing 79
  Uniprot ID: Q8NA31
  ENST ID: ENST00000558713
  CDS Start-End: 74-2257
ctggtcggctgggcgggaaaccctgtcgtgcgtcgtggcagacaaaatataaggaaaaagaatatagacaagcatggaaagtgaagacacaaagaaaacacaagaaatgaagactgacctgaacttattattggagtgtctaaagtatcaaatggacaatgctttttcacaaaaggaagctttggtcactattcattcaatttgtcaacaaaacagtaatgcaagtgtttattttcgggaaattggtggtttgatgtttgtaaaaaatcttgcaaagtcaagtgaacatagcatggtaaaagaagcagccttatatacattaggagctattgcagagaaaaatgtttactgtcagcagactttgtgtacttcagagttgtttgaagacttaacttggttcttatctaatgattcaaacataaatttgaaaagaatgtctgtttatgttattttggttctggtttcaaataataggaccggacaaacacttgtgagagaaacaggttgtattacagttctgtcacggttattcaggacagttatttcaaaacatgagttggatttgtcagataaaaatgttttccagagttatcagttgtggtcttcagtgtgtagtactctgtgtgtctgtgtcaacaatcctcaaaatgatgagaatcaaatgttttgctgttccctttttccacatgctaatgaatggctaaaaaattgcacgacacctgagataattcgccctatttgctcatttattggactcactcttgcaaataacacatatgttcagaaatacttcgtatctgtgggcggactggatgtattgtctcaagttctcatgcagctggaatctgattcacatgagactctttccagtgctaaacttgcagtggttgtgacgaagactgtggatgcatgcattgctgataatcctacttttgggatagtactctccaagtaccacattgtttctaaacttctggcattactgcttcatgaaagtctggattcaggagaaaaatttagcatcatgcttactcttggtcattgcacagaggattgtgaggaaaatcagtatgacctttttaaaaacaatgggcttccactcatgattcaagccttaactgaatcgcagaatgaggaactgaacaaagctgccacatttgtgcttcacaactgcaaaaaaattactgagaaattatctctaagtctaggagaatatccttttgatgaaaatgaaacacagcaattaaaggacataagtgtgaaggagaataatcttgaagagcactggaggaaagcaaaggaaattctacacagaatagaacagcttgaaagagaaggaaatgaggaagaaatacaaagagaaaactatcaggataatatttcatctatgaacataagtattcagaatacatggaaacatctccatgcagatcggattggtcgaggtagcaaagcagaagatgaggataaaagccattctagacagttacagagttataagtcccatggagtcatgtctaaagcatgtacaaatgatgaccaaatgaagacaccgttaaagagcgcaaatccagtccatgcttgttacagggagagtgagcaaaataagactttatataaagccaagtcaagctgcaatcaaaacttacatgaagaaactacttttgaaaagaattttgtttctcaatcaagtgaccatgtttttaaacacccagttcacattgccaaaaatataaagcagcagttaccagtaacagatccatttacattatgttcagatataataaataaagaagtagtcagttttctagcaactcccagttgttccgaaatgttgacgtataggtgctcaggttgcatagcagtagaaaaatccctgaatagccgaaactttagcaagctcttgcactcttgcccataccaatgtgatcgtcacaaagtcattgtggaagctgaagacagatataaaagtgaactaaggaaatcacttatctgtaacaaaaaaattctgctgaccccacgtagaagacaacgactcagtaatgaatctactacccctggaggaataaaaaaaagaagaattcgcaaaaactttactgaagaagaagtaaattaccttttcaatggagttaagaaaatgggaaatcactggaattcaattttgtggtctttcccctttcagcaaggacggaaggctgtggaccttgctcacaaataccacaagctgaccaaacaccccacgtgtgcagcttcttga

SEQ ID NO: 121175 - DNA, 2446 bp, Homo sapiens
  Payload ID: 3755
  Gene Symbol: CCDC79
  Gene Name: coiled-coil domain containing 79
  Uniprot ID: Q8NA31
  ENST ID: ENST00000433154
  CDS Start-End: 263-2446
gacgtgagcctggtcggctgggcgggaaaccctgtcgtgcgtcgtggcaggtgagcggtgatgaagaaagggcggaagctcccgcttgagggtagacgccacggcctccgctcccgcgcgttgttgtcctgccttaccgcgcttggaaactctgacttgcgagccctggtcagagaggagcctggaggggccacctaagctctgcacaaggaattcatccaactctgtagacaaaatataaggaaaaagaatatagacaagcatggaaagtgaagacacaaagaaaacacaagaaatgaagactgacctgaacttattattggagtgtctaaagtatcaaatggacaatgctttttcacaaaaggaagctttggtcactattcattcaatttgtcaacaaaacagtaatgcaagtgtttattttcgggaaattggtggtttgatgtttgtaaaaaatcttgcaaagtcaagtgaacatagcatggtaaaagaagcagccttatatacattaggagctattgcagagaaaaatgtttactgtcagcagactttgtgtacttcagagttgtttgaagacttaacttggttcttatctaatgattcaaacataaatttgaaaagaatgtctgtttatgttattttggttctggtttcaaataataggaccggacaaacacttgtgagagaaacaggttgtattacagttctgtcacggttattcaggacagttatttcaaaacatgagttggatttgtcagataaaaatgttttccagagttatcagttgtggtcttcagtgtgtagtactctgtgtgtctgtgtcaacaatcctcaaaatgatgagaatcaaatgttttgctgttccctttttccacatgctaatgaatggctaaaaaattgcacgacacctgagataattcgccctatttgctcatttattggactcactcttgcaaataacacatatgttcagaaatacttcgtatctgtgggcggactggatgtattgtctcaagttctcatgcagctggaatctgattcacatgagactctttccagtgctaaacttgcagtggttgtgacgaagactgtggatgcatgcattgctgataatcctacttttgggatagtactctccaagtaccacattgtttctaaacttctggcattactgcttcatgaaagtctggattcaggagaaaaatttagcatcatgcttactcttggtcattgcacagaggattgtgaggaaaatcagtatgacctttttaaaaacaatgggcttccactcatgattcaagccttaactgaatcgcagaatgaggaactgaacaaagctgccacatttgtgcttcacaactgcaaaaaaattactgagaaattatctctaagtctaggagaatatccttttgatgaaaatgaaacacagcaattaaaggacataagtgtgaaggagaataatcttgaagagcactggaggaaagcaaaggaaattctacacagaatagaacagcttgaaagagaaggaaatgaggaagaaatacaaagagaaaactatcaggataatatttcatctatgaacataagtattcagaatacatggaaacatctccatgcagatcggattggtcgaggtagcaaagcagaagatgaggataaaagccattctagacagttacagagttataagtcccatggagtcatgtctaaagcatgtacaaatgatgaccaaatgaagacaccgttaaagagcgcaaatccagtccatgcttgttacagggagagtgagcaaaataagactttatataaagccaagtcaagctgcaatcaaaacttacatgaagaaactacttttgaaaagaattttgtttctcaatcaagtgaccatgtttttaaacacccagttcacattgccaaaaatataaagcagcagttaccagtaacagatccatttacattatgttcagatataataaataaagaagtagtcagttttctagcaactcccagttgttccgaaatgttgacgtataggtgctcaggttgcatagcagtagaaaaatccctgaatagccgaaactttagcaagctcttgcactcttgcccataccaatgtgatcgtcacaaagtcattgtggaagctgaagacagatataaaagtgaactaaggaaatcacttatctgtaacaaaaaaattctgctgaccccacgtagaagacaacgactcagtaatgaatctactacccctggaggaataaaaaaaagaagaattcgcaaaaactttactgaagaagaagtaaattaccttttcaatggagttaagaaaatgggaaatcactggaattcaattttgtggtctttcccctttcagcaaggacggaaggctgtggaccttgctcacaaataccacaagctgaccaaacaccccacgtgtgcagcttcttga

SEQ ID NO: 121176 - DNA, 2541 bp, Homo sapiens
  Payload ID: 3755
  Gene Symbol: CCDC79
  Gene Name: coiled-coil domain containing 79
  Uniprot ID: Q8NA31
  ENST ID: ENST00000313294
  CDS Start-End: 263-1789
gacgtgagcctggtcggctgggcgggaaaccctgtcgtgcgtcgtggcaggtgagcggtgatgaagaaagggcggaagctcccgcttgagggtagacgccacggcctccgctcccgcgcgttgttgtcctgccttaccgcgcttggaaactctgacttgcgagccctggtcagagaggagcctggaggggccacctaagctctgcacaaggaattcatccaactctgtagacaaaatataaggaaaaagaatatagacaagcatggaaagtgaagacacaaagaaaacacaagaaatgaagactgacctgaacttattattggagtgtctaaagtatcaaatggacaatgctttttcacaaaaggaagctttggtcactattcattcaatttgtcaacaaaacagtaatgcaagtgtttattttcgggaaattggtggtttgatgtttgtaaaaaatcttgcaaagtcaagtgaacatagcatggtaaaagaagcagccttatatacattaggagctattgcagagaaaaatgtttactgtcagcagactttgtgtacttcagagttgtttgaagacttaacttggttcttatctaatgattcaaacataaatttgaaaagaatgtctgtttatgttattttggttctggtttcaaataataggaccggacaaacacttgtgagagaaacaggttgtattacagttctgtcacggttattcaggacagttatttcaaaacatgagttggatttgtcagataaaaatgttttccagagttatcagttgtggtcttcagtgtgtagtactctgtgtgtctgtgtcaacaatcctcaaaatgatgagaatcaaatgttttgctgttccctttttccacatgctaatgaatggctaaaaaattgcacgacacctgagataattcgccctatttgctcatttattggactcactcttgcaaataacacatatgttcagaaatacttcgtatctgtgggcggactggatgtattgtctcaagttctcatgcagctggaatctgattcacatgagactctttccagtgctaaacttgcagtggttgtgacgaagactgtggatgcatgcattgctgataatcctacttttgggatagtactctccaagtaccacattgtttctaaacttctggcattactgcttcatgaaagtctggattcaggagaaaaatttagcatcatgcttactcttggtcattgcacagaggattgtgctgagaaattatctctaagtctaggagaatatccttttgatgaaaatgaaacacagcaattaaaggacataagtgtgaaggagaataatcttgaagagcactggaggaaagcaaaggaaattctacacagaatagaacagcttgaaagagaaggaaatgaggaagaaatacaaagagaaaactatcaggataatatttcatctatgaacataagtattcagaatacatggaaacatctccatgcagatcggattggtcgaggtagcaaagcagaagatgaggataaaagccattctagacagttacagagttataagtcccatggagtcatgtctaaagcatgtacaaatgatgaccaaatgaagacaccgttaaagagcgcaaatccagtccatgcttgttacagggagagtgagcaaaataagactttatataaagccaagtcaagctgcaatcaaaacttacatgaagaaactacttttgaaaagaattttgtttctcaatcaagatccatttacattatgttcagatataataaataaagaagtagtcagttttctagcaactcccagttgttccgaaatgttgacgtataggtgctcaggttgcatagcagtagaaaaatccctgaatagccgaaactttagcaagctcttgcactcttgcccataccaatgtgatcgtcacaaagtcattgtggaagctgaagacagatataaaagtgaactaaggaaatcacttatctgtaacaaaaaaattctgctgaccccacgtagaagacaacgactcagtaatgaatctactacccctggaggaataagtgaatatatttaatttaattttttttttcttgagacagggtctggctctgttacccaggatggagtgcagtggagcaatctcggctcactgcagcctccgcctcccaggttcaagtgattctcctgcctcagcctcctaagtagctgggattacagacatgtgccaccacaccctgctggtttttgtatttttagtagagatggggtttcaccatgttggccaggctggtctcaaactcctgacctcaagtgatccacccaccttggcctcccaaagtgctgggatttcaggcatgagccattgcacctggctgaatatatttaatttttaaatgaacttaaatttcatatatttctgagaaagaacagctgagtggttgttctcagtcttattattaatggatcttaaatgataaaccttgcctctgatgagggtcagaccttctaataaaagagactttcctcttcccttc

SEQ ID NO: 121177 - DNA, 3213 bp, Homo sapiens
  Payload ID: 3756
  Gene Symbol: CCDC8
  Gene Name: coiled-coil domain containing 8
  Uniprot ID: Q9H0W5
  ENST ID: ENST00000307522
  CDS Start-End: 775-2391
ctgcccgcgcgctccacggtgcagagctctaagcgcgcgggctggcaggctgcggcgcgtcaaggtcagcctggagctgggtggcggcctgcctgggggcgggggaccctactggaggcccgggctggggcctcccagcgcctcggccatattgaatagcttcgactggaccgtctttgtctgcgaagtcctgtcccaagttccagccgcgtccctggggcctggggcaggaagagtcgctggcagcccgcgcgccccaacttggagctgggacaccacgtttccagcttggagtgggccttgagccttgggactgacctcgcccccggctcacgtaggcatcctggaaattgattcccccaagtccttggtgggggagccggacttggtcaagactgtacttgttgcaggcgaagagattggaggcgtttggctcgtccctggctagggaggtgagactctccggtcagcgttgctggaactccccccatccagtccctccctcaagactaagggctacagtagtttgttggggctcattgccccctcaccccagatatcaccctggagatcttaaagactctcgagaaaagccacgtggggggctggttcccctggggcttcctgccgtcccccgactgcctcattctttggagcgtccccgatgtctgcaaagatgtggatttggacgtcctcgtggaagccctaaagcccgtggggacatttaagaagatcggcaaggtgttccgcaaggaggaggactccacggtggggatgctgcagatcggggaggacgtcgactatttgctcatcccccgggaggtcaggctggctgggggcgtctggagagtcatctctaagcccgccaccaaggaagcagaatttcgggagcggctgacccagttcctggaagaagagggccgcaccctggaggacgtggcccgcatcatggagaagagcaccccgcacccgccccagccccccaaaaagcccaaggagccccgagtgaggaggagagtgcagcagatggtgactcctccgccccggctggtcgtgggcacgtacgacagcagcaacgccagcgacagcgagttcagcgacttcgagacctccagagacaagagccgccagggcccgcggcggggcaagaaggtgcgcaaaatgcccgtcagctacctgggcagcaagttcctgggaagcgacctggagagtgaggatgatgaggaactggtcgaggccttcctccggcgacaggagaagcagcccagcgcgccgcctgcccgccgccgcgtcaacctgccagtgcccatgtttgaggacaacctggggcctcagctgtccaaagcggacaggtggcgggagtatgtcagccaggtgtcctgggggaagctgaagcggagggtgaagggttgggcgccgagggcgggccccggggtgggcgaggcccggctggcctccaccgcagtggagagcgcaggggtatcatcggcgccagagggcaccagcccgggggatcgcttgggaaacgcgggagatgtttgtgtgccccaggcttcccctaggcgatggaggcccaagatcaactgggcctcctttcggcgccgcaggaaggagcagacagcacccacaggtcagggggcagacatcgaggctgatcaggggggagaggctgcagatagtcaaagggaagaggccatagctgaccagcgggaaggggctgcaggtaatcagagggcaggggccccagctgaccagggggcagaggctgcagataatcagagggaagaggctgcagataatcagagggcaggggccccagctgaggagggggcagaggctgcagataaccagagggaagaggctgcagataatcagagggcagaggccccagctgaccagaggtcacagggcacagataaccacagggaagaggctgcagataatcagagggcggaggccccagctgaccaggggtcagaggttacagataatcaaagggaagaggccgtacatgaccagagggaaagggccccagctgtccagggtgcagataatcagagggcacaggcccgggctggccagagggcagaggctgcacataatcagagggcaggggccccaggtatccaggaagctgaagtctcagctgcccaagggaccacaggaacagctccaggagccagggcccggaaacaggtcaagacagtgaggttccagacccctggacgcttttcgtggttttgcaagcgccggagagccttctggcacactccccggttgccaaccctgcccaagagagtccccagggcaggagaggccaggaacctcagggtgctgagggccgaggccagagcagaagctgagcagggagagcaagaagaccagctgtgaggtgagggctagagacagcccacgggccctccctccaagtgtgggagggagagatgctctgcctctgaacttcaaagtggaggtggagtgctggccacgtctccacctaacaaccctctttattctcttgttaaagttttgttcatgctttgatttttttttaaattttttagagacagggtctcactctgttgcccaggctggagtgcagtggcatgatcataactcactgcagcctcaaacttctggcctcaagtgatcctcctgcctcggcctcccaaaatgctgggattacagatgtgagccaccacacacaccatctgattaaaaaaaaaaaatactgattccttgtagcaacccaaaaaatgtaaagaaagaattcgacacaatggggttgcgtcacctatagttttcatttcctcaaatgcaactcaaggtgctcagcttgataaagggagagagggagggcaggggagaaactgactcctttttccatctcttttttgcctgcacacttaatgtggactgcctccttggacttaaaaagagttgagccaacatgcaaatcaaaaaacatttatgaactgatttcttagctttggacttgacaactgacgaatgctctgggggtgacctggcccttgctgtccgttccactcccatccttgatgatggagacacctgtgtttatgttgtcacttcgcttgccatcctcatgccccgggctctgctggtttggaggggacagggcccttggtttgcacacctcacccgatcttggttataaggtacagtaaaagcgtctgaaaaatgcattcaaaa

SEQ ID NO: 121178 - DNA, 12430 bp, Homo sapiens
  Payload ID: 3757
  Gene Symbol: CCDC80
  Gene Name: coiled-coil domain containing 80
  Uniprot ID: Q76M96
  ENST ID: ENST00000206423
  CDS Start-End: 955-3807
gaacagactggaagagaagttaccccgatgacttggtttggaaggggttaaggcaccagtcatcctcttctaaagtgatttatgatgatgtgtggagtttaaaaactttaccccaccccaaagaacagccttctcactcctcactgagtccactctgaacgtgctaaaatgggaaggaggcggtgttttgctgatctgttaaattcttagtgaagtttccttgatttccagtggctgctgttgtttgagtttggtttggagcaaaactgaggtagtcctaacatttctgggactgaatccaggcaagagaaagaagaaaaagaagaagaaaaagaggaggaaaaaggtagggagaaataaagggaggagagaagcacagtgaaagaaaaaaaaagtcccttttcgacatcacattcctgtgttttccctcagcctggaaaacatattaatcccagtgcttttacgcccggaaacaaagagactaagccagactatgggggaaagggagataagaaggatcctggaactttaaagagggaaagagtgagattcagaaatcgccaggactggactttaagggacgtcctgtgtcagcacaagggactggcacacacagacacacgagaccgaggagaaactgcagacaaatggagatacaaagacttagaaggacagctcctttcacctcatcctacttgtccagaaggtaaaaagacacagccagaaagaaaaggcatcggctcagctctcagatcaggacaggctgtggatctgtggcggtactctgaaagctggagctgcagcacaccccttttgtattgctcaccctcggtaaagagagagagggctgggaggaaaagtagttcatctaggaaactgtcctgggaaccaaacttctgatttcttttgcaaccctctgcattccatctctatgagccaccattggattacacaatgacatggagaatgggaccccgtttcactatgctgttggccatgtggctagtgtgtggatcagaaccccacccccatgccactattagaggcagccacggaggacggaaagtgcctttggtttctccggacagcagtaggccagctcggtttctgaggcacactgggaggtctcgcggaattgagagatccactctggaggaaccaaaccttcagcctctccagagaaggaggagtgtgcccgtgttgagactagctcgcccaacagagccgccagcccgctcggacatcaatggggccgccgtgagacctgagcaaagaccagcagccaggggctctccgcgtgagatgatcagagatgaggggtcctcagctcggtcaagaatgttgcgtttcccttcggggtccagctctcccaacatccttgccagctttgcagggaagaacagagtatgggtcatctcagcccctcatgcctcggaaggctactaccgcctcatgatgagcctgctgaaggacgatgtgtactgtgagctggcggagaggcacatccaacagattgtgctcttccaccaggcaggtgaggaaggaggcaaggtgagaaggatcaccagcgagggccagatcctggagcagcccctggaccctagcctcatccctaagctgatgagcttcctgaagctggagaagggcaagtttggcatggtgctgctgaagaagacgctgcaggtggaggagcgctatccatatcccgttaggctggaagccatgtacgaggtcatcgaccaaggccccatccgtaggatcgagaagatcaggcagaagggctttgtccagaaatgtaaggcctctggtgtagagggccaggtggtggcggaggggaatgacggtggagggggagcaggaaggccaagcctgggcagcgagaagaagaaagaggacccaaggagagcacaagtcccaccaaccagagagagtcgggtgaaggtcctgagaaaactggccgccactgcaccagctttgccccaacctccctcaacccccagagccaccacccttcctcctgccccagccacaacagtgactcggtccacgtcccgggcggtaacagttgctgcaagacctatgaccaccactgcctttcccaccacgcagaggccctggaccccctcaccctcccacaggccccctacaaccactgaggtgatcactgccaggagaccctcagtttcagagaatctttaccctccatcccggaaggatcagcacagggagaggccacagacaaccaggaggcccagcaaggccaccagcttggagagcttcacaaatgcccctcccaccaccatctcagaacccagcacaagggctgctggcccaggccgtttccgggacaaccgcatggacaggcgggaacatggccaccgagacccaaatgtggtgccaggtcctcccaagccagcaaaggagaaacctcccaaaaagaaggcccaggacaaaattcttagtaatgagtatgaggagaagtatgacctcagccggcctactgcctctcagctggaggacgagctgcaggtggggaatgttccccttaaaaaagcaaaggagtctaaaaagcatgaaaagcttgagaaaccagagaaggagaagaaaaaaaagatgaagaatgagaacgcagacaagttacttaagagtgaaaagcaaatgaagaagtctgagaaaaagagcaagcaagagaaagagaagagcaagaagaaaaaaggaggtaaaacagaacaggatggctatcagaaacccaccaacaaacacttcacgcagagtcccaagaagtcagtggccgacctgctggggtcctttgaaggcaaacgaagactccttctgatcactgctcccaaggctgagaacaatatgtatgtgcaacaacgtgatgaatatctggaaagtttctgcaagatggctaccaggaaaatctctgtgatcaccatcttcggccctgtcaacaacagcaccatgaaaatcgaccactttcagctagataatgagaagcccatgcgagtggtggatgatgaagacttggtagaccagcgtctcatcagcgagctgaggaaagagtacggaatgacctacaatgacttcttcatggtgctaacagatgtggatctgagagtcaagcaatactatgaggtaccaataacaatgaagtctgtgtttgatctgatcgatactttccagtcccgaatcaaagatatggagaagcagaagaaggagggcattgtttgcaaagaggacaaaaagcagtccctggagaacttcctatccaggttccggtggaggaggaggttgctggtgatctctgctcctaacgatgaagactgggcctattcacagcagctctctgccctcagtggtcaggcgtgcaattttggtctgcgccacataaccattctgaagcttttaggcgttggagaggaagttgggggagtgttagaactgttcccaattaatgggagctctgttgttgagcgagaagacgtaccagcccatttggtgaaagacattcgtaactattttcaagtgagcccggagtacttctccatgcttctagtcggaaaagacggaaatgtcaaatcctggtatccttccccaatgtggtccatggtgattgtgtacgatttaattgattcgatgcaacttcggagacaggaaatggcgattcagcagtcactggggatgcgctgcccagaagatgagtatgcaggctatggttaccatagttaccaccaaggataccaggatggttaccaggatgactaccgtcatcatgagagttatcaccatggatacccttactgagcagaaatatgtaaccttagactcagccagtttcctctgcagctgctaaaactacatgtggccagctccattcttccacactgcgtactacatttcctgcctttttctttcagtgtttttctaagactaaataaatagcaaactttcacctattcatgagttattattgaaacctcaaatcataaagacatttaaaagaattgtttttctaactggaggggctctagtgctaaataatagtactgaaaattgatattattttccttttcttatatgaaggaccttatttggcatataaaattttataaaatatgtatttaaagctttttcttattttttgtattaattggtaagtgaaaactctgttaaagatcacaccacaatgttttcaagaaacatctgaaaagataaaacaaagaacaaataacttataatacttacttaaattgacactttttgaaatgccagtctgaaaataattaagatatctctgctttgtatgagtttcttttatgaaacttgataccacgggagtccagtaatattggccacaaaagccagagaaagtaccaagcccagctttgttatcatagccacttcctgccctgcttctgttatttttagtgttttttcagatataaatcggggtccaggaaatcctcaccagaatctggcactgcagccaaaggcgatacttccagagttctagtaggctgctatggaatttctggcatgaaaattcttgacccctcacactttaccccctgtacagcacaggcataccatggagatattacaggatcagttccagaccaccataataaagtggatatcgcaataaagtgagtcacacaaaatttttggtttctcagtgcatataaaagttatgtttacactctttagtagtctattaagtgtataatagctttatgtccaaaaaatgtacatgttttattttaaaaatactttattgctaaaaattgctaatgatcataatctttttgcattgatgttgatggctgctgaatgatcagggtggtggttactgaaggttgggggtgatggtggcaatttcttaaaataagacagcaatgaagtttgccacttcgattgactttttcttcatgaaagatttctctgcagcatgtgatgctgtatgatagcattttaccagtagtacaacttcttttgaaattggagccaatcctctcaaaccctgttgctgctttattaatgaaatttatgtaatgttgtaaatcctttgttgtcatttcaataatgtacatagcaacttacgcgagtagattccatctcaagaaatcactttcttcgttcattcataagaagcaagtcttcatctattaaacttttgtaatgagattgcagcaattcagtcacatcttcaggctccacttctaattccagttctcttgctatttccactatgtctatagcagagcttcctccaatgaagtcttgggcctcttaaaatcatccatgagggatggaatcagtttccgaactcattgatcttcctattttgaccttctcccatgaatcacgatgttcttaacagcatctagaatggtgaatcctttccaggtttttaatttgctttgcccagatccattagcgggatcacaatctgtgacagttatagtcttacgaaaagtgcaaatgactccttgattcctgtgctgcacaataggtattgtgttagcaggcacgaaaatattaatctccttgtatatctctatccaagttcttgggtgactgggtatattgtcagtgaacagctatatatatatatattatagtggtctggaactgatcatttatatatatattttatatacatatataaaatatataatatatattatatatatatatatttttttcgagatggagtctcgctctgtcacccaggctggagtgcagtggtgcgatcttggctcactgcaacctctgcctccggggttcaagtgattctcctgcctcagacccctgagtagctggatttacaggcgcccaccactacacccagcttatttttgtatttttagtagagatggggtttcaccatgttagtcagggtggtctcgaactactgactttggcctcggcctcccaaagtgctgggattacaggcatgagccactgcgcccggcccgaacagcaatatttttaaaagattctttttttttctgagcagtaagactcaaaaagtgagcttaaaatgtccagtaaaccatgctgtccatagacatgctgtcattcaggctttgttgctccatttatagagcacaggcagattagatttagcataattctgaaaagtcgtaggatttggggaaatggtaaatgagcattgatttcaacttaaaatcaccagctgcgttaacttctaacaaggagtaagcctgttggttgaagctttgaagtgaggcattgactactcctctctagatacgtaagtctgagatggcatcttcttccaatataaggctgtttcatctcttttgaaaatctattgtttagtgtagccactttcattaattatcttaactagatcttctggataacttactgcagcttctacatcaacatttgctgctttactttgcacttttatggatgcacaaggcttcttttcttcaaactcatgaaccagactctgctaccttcaaactttttttctgaagcttcctcacctccctttagctttcatagaattgaagagagttagggccttgctctgaactaggctttggcttaagggaattttgtggctggcttgatcttctattcagatgactcaaagtttctccatatcagcagtaaggctgttttacttttttatcattcatgcattcacaaagtagcacttttaatttccttcaagaacttttcctttgcatttacaacttggttgtttggcataagaggcttagctttcagcctgtctcagcttttgacacaccttcctcactaagcttattcatttctagcttttgatttaaagtgaaagattgcaacttcctctcacttgaaatacctggaggctattttagggttattaattgatctactttcaatattgtgtctcagggactaaggaggcctgagaagaaggagaaagattggagaaaggttggttgttggagcaatcagaacatacacacatttattaagtttactgtgttatataagtgtggttcatggtgcccccagtaattataatagcaacatcaaagatcgttgactacagattttaataacagagataataatgaaacagtgtgaaatatggcaagaattaccaaaatgtgacacagagacataaagtgagtacatactattgcaaaaatgatgtcaacagacttccttgatgcagggttgccacaaaccttcaatttgtaaaaaatgcagtatctgagaagtataataaaataagatgtgcctgtacttacttgctaatggacctattaccatactggcatcttataaaaaaaattacaaggaaggagattatatccagggattctttttgttttcaaggcaaaggttaccaagttacaatggaccaaagtagctggaatgcaaaggagtataatccttgtctttgaaaaaagagcatttgtttcaatcatatggcatatcaaagtaaactttctcccttcctccctcctttcgttgctgctgcttcttttttttctctttttttttttctttttttggagagggtctcactctgtcacccaggctgcagtgcagtagtgcaatcttggctcactgcaaactcagcttccctcaaacaatcctcccacctcagcatcccaagttagctgggaccacagccatgctccaccatgcccagccatccttgcttctttactacatttcttttttcaacaaatatttatcaagtaatattgtcaagtaatatttatgagcttcccctcagataggcatttagcatcatgatggcaccatcctctaacaataatgggaaggctattttccactgttattaatcattaattctccaaatcattttagtattattattaattctaataagtacagagattaataaatgcattcaaaccacatgtgaatatttgctataggtttatctgtgcctactgtatgttcagatttttctttatatctgaactttgttataaataaatgacagtaaaaatggaatttatagttcaatgaacttgacaaatcacttattctgccattcattttccataaagaccattcattcttccttgttttacaggtaactgagctccagaaagctcaagtgactttagaactcagttcttagtgtgtgaattatgctcccatctcatccctcttccttgatggagcactttcctcctcattttttcttggatagtctgtacaagctgcctgaggtgtgcaggaaagtgagccacgtcgaagtgtactgcttttaaatttttgccaggatgaagcatagcccaaagttgccaataaaaatggatttctttacctttctgaaattgtgtgatgacaatttctaagtaaaggacccaaatcatgtcaacttcaggaaatataataatgagggagccaggagcagtgaggggctcacacctgtaatcccagcactttgggaggccaaggtgagcgggtcgcttgagcccaggacttcgagaccagcctgggcaacacggcaaaaccctgtctctacaaaaaaatacaaaaaattagctgggtaaggtggtgtgtgtctgtggtcccagctattcaggaggctgaagtgagagaatcgcttgagcctaggaggtcgaggcttcagtgtgccgtgatcgtgccacagcactccatcatcatcatcctgggtgacaaagtgagaccctgtctccccaccaaaaaaaagagggagtttcatctcccaagaaaatgaattagataggaataatagaaaatttactctcagaataatagggttctagctcctgcaaccaaaaaaagatagttcttttttacaacctgagattactttttcaagcatttctccagttccactggcattgaaataatagttagcaatgcatctgagcttttcttcctctaatgagcaggcagagaagtcatagatcatcatttggaggactataaaataagacatagcttagcaaaaggaccaaaatacattcagaggaggatgctattggtgaatgtcctcaaagcctataatctggaaaaatacaaggcatatctctgaaactgtgaggattagcaaactagctaacctgaatctctgtcttctggtagtataaactaggtagtttcaaatctgagtagtttctccataaaagcatttcttcccaaacgtttcttaccaaactcccaaataaatgagaaaaataaaatacagttttataatttttgagaaagattatgggattatggtatttaaaaagaaaagcattctgtagagttggggaaatctggaagactcttgaggacatagctttgccgaaattgctggttgtcacaagactcttcaaaaactacttttcatcagacatctcccagggctctgaggtgaatattaattcagcagaaagatccttttctgctacataggcaggaggtccagacacaggggagtgggtgcaacccagctggtcccattttctgtaatataattaacaatgaagctcatactttctcaacttctagaagcctggaggatggaagcagcccgagagtagggtgaatgatggcctcagtgggcccttcttaatgtgtctcagtactgaatgtgtggagattgtagaaaaatagaaggcccttggaaaaaacctctgttcgtttctctgttcgtttcgctccctgatctccctgccggattgcttttctttcctttctcttccttggctgtcctttacctcatggtgtggggtgtgcagatagcaggttgtggcttggtgagtgctcttcacttcaggtcaaggtgaggcacagttaacatgctaactactttcctcagttctctctgagttgtgtaaagctcccgatgccagacttcctcttaattttgcacattattaaagtccaaagagttaagatttggtgatgaggggcaaagggccagctgtcacagaaatcaatgaaatgatacacagaaatgggtatcatgaaaaggccactggacttgggaaaactgggtgcctgtccttgccctgccatgtacttacctgtgtgactggaggtgagatgttttacctatgggcctcagtttctcattacaaaatgacagagaagactagatacctaagttcctaagtttgtgacatttgtgaatttttcttggccctctgtgagtagagtgctaaatttagaggcttcctgtggttgaactgatgtccaattctcagggaacccagacttctcagttcagaacccagttccagatttttgtgggaatagggaaaggtattaaataactccattgaattctttcctgcataatgccctgctgtggctgagactcaatgaggtcatcacctccaacacacagaacccctcatcatctccttacagccagactggagcttccaaggacatcaggttggcaaggattgtgagtaccctaaacatctaaagaggccctctaataagggacatatttgttcttcaacagtttcctaacttgagaccacaaatgcgtaatctctctaatatcctaaagcttggacaaactgggcagcccctgagcagaccgcacagagcttaaatgtcagtgctttccttccagaaagaaaaagaatggtcctacacctcccaatccatgggctgatacatatgccaagggagccggatgaagaagtgggtgattttaaatagctaagactgcccatgggcaaacgttctttggcttttctcctctgcaataagtataccttcctctctcctggtccttttctcctttcccaggcccctctatcaataataattctggctctcagatgactacagttgattaggtggaactgataggataaaggtgacacccttcccaaggctatctataatgcaaaaagatatccaagaaaaagagaggtagggaacaccttgggaaaccatttctggaagacagccagtccctgctgtagacaagcctcattttccttcccccaaatgttaaagagtaaattcctcctgtagccttagctctcttttctatctttggcttgctttttatgaactatctttagagtgccaaattagaacagggtaggcagaggcaggaatatgcccaaatttgggaagacctggttgggaatagtcgaaagccttgatatgtgcaaagaaagaaccatttgatcaacccagttcttaatacaggatactaacttaaaatttagactcaagttatacgataattcaaacatttattgtatttatactattctatatgtacttttccaggaaccaggaatacaaaactgacatttctctgtacagaggctcagactagtagagaacagttaggtacgccgttaattataaactaatatgtatcatcaattatgggtttttatgggggtttggcaggtggaagggaccagggagagatgatgagtgatgatggttatgtagtctttaggaggatgcaattataacattgctcttcctttcacgcaccacatgatttagcaagtacttcatattggctccaccattaacatggtcaatggcttctggatactcacagttcaggcacagtttctcctgaagattttttacctctcccatctttaagaaattgtctggatgtccatgaaagatgctgacacttgtattaattcattaaaaaacaccaccccctccctgaaataaactaaaaagtaatgaattcatagaaaaaaatttcaccaagattgaaactagagaatatacctagacttgcactttgagctttgagaaatgtgtacctattcaccattccaacgtgaagaagctctgcagtaggaaaaataattaacacacttatagtctactgcccatgtaaggatcagctccggctaagaggccaaagatgggtgacatcgttatgctctgcctttattttttctttcttacccacttagcttcctaattggaggaaggaggcgtggtaaaggtatatgaagactatggtttaattagaccagaaaacactgtcataatctctggggtcatcagaatgtccagttttgtctttgggccaagataagggcagtgggatttatgatgtgttgtttatagtctgaaactactctggtgatcaccagggtcagtttctttaatgatggtttccaactggcctaatacattaagtaagactggctgataacatgaccagacagacataaagaccctgttgggaatgacattgaactctcaaagtcaagatttcttacacaaatctatcagctggagaaaatgaaggcagtgtggtatatgtgtgcaaataaggacattatgaagcttaaatatggaatgtctcttggacccccgatgtcatctgtattctctttttcttcttgtactatatcctttgcctgtaaataaaaggtttatttgatta

SEQ ID NO: 121179 - DNA, 3557 bp, Homo sapiens
  Payload ID: 3757
  Gene Symbol: CCDC80
  Gene Name: coiled-coil domain containing 80
  Uniprot ID: Q76M96
  ENST ID: ENST00000439685
  CDS Start-End: 389-3241
gagaattttctccttccaaagtacagtgtaagaacagactggaagagaagttaccccgatgacttggtttggaaggggttaaggcaccagtcatcctcttctaaagtgatttatgatgatgtgtggagtttaaaaactttaccccaccccaaagaacagccttctcactcctcactgagtccactctgaacgtgctaaaatgggaaggaggcggtgttttgctgatctgttaaattcttagtgaagtttccttgatttccagtggctgctgttgtttgagtttggtttggagcaaaactgaggtagtcctaacatttctgggactgaatccaggcaagagaaagaagaaaaagaagaagaaaaagaggaggaaaaagtggattacacaatgacatggagaatgggaccccgtttcactatgctgttggccatgtggctagtgtgtggatcagaaccccacccccatgccactattagaggcagccacggaggacggaaagtgcctttggtttctccggacagcagtaggccagctcggtttctgaggcacactgggaggtctcgcggaattgagagatccactctggaggaaccaaaccttcagcctctccagagaaggaggagtgtgcccgtgttgagactagctcgcccaacagagccgccagcccgctcggacatcaatggggccgccgtgagacctgagcaaagaccagcagccaggggctctccgcgtgagatgatcagagatgaggggtcctcagctcggtcaagaatgttgcgtttcccttcggggtccagctctcccaacatccttgccagctttgcagggaagaacagagtatgggtcatctcagcccctcatgcctcggaaggctactaccgcctcatgatgagcctgctgaaggacgatgtgtactgtgagctggcggagaggcacatccaacagattgtgctcttccaccaggcaggtgaggaaggaggcaaggtgagaaggatcaccagcgagggccagatcctggagcagcccctggaccctagcctcatccctaagctgatgagcttcctgaagctggagaagggcaagtttggcatggtgctgctgaagaagacgctgcaggtggaggagcgctatccatatcccgttaggctggaagccatgtacgaggtcatcgaccaaggccccatccgtaggatcgagaagatcaggcagaagggctttgtccagaaatgtaaggcctctggtgtagagggccaggtggtggcggaggggaatgacggtggagggggagcaggaaggccaagcctgggcagcgagaagaagaaagaggacccaaggagagcacaagtcccaccaaccagagagagtcgggtgaaggtcctgagaaaactggccgccactgcaccagctttgccccaacctccctcaacccccagagccaccacccttcctcctgccccagccacaacagtgactcggtccacgtcccgggcggtaacagttgctgcaagacctatgaccaccactgcctttcccaccacgcagaggccctggaccccctcaccctcccacaggccccctacaaccactgaggtgatcactgccaggagaccctcagtttcagagaatctttaccctccatcccggaaggatcagcacagggagaggccacagacaaccaggaggcccagcaaggccaccagcttggagagcttcacaaatgcccctcccaccaccatctcagaacccagcacaagggctgctggcccaggccgtttccgggacaaccgcatggacaggcgggaacatggccaccgagacccaaatgtggtgccaggtcctcccaagccagcaaaggagaaacctcccaaaaagaaggcccaggacaaaattcttagtaatgagtatgaggagaagtatgacctcagccggcctactgcctctcagctggaggacgagctgcaggtggggaatgttccccttaaaaaagcaaaggagtctaaaaagcatgaaaagcttgagaaaccagagaaggagaagaaaaaaaagatgaagaatgagaacgcagacaagttacttaagagtgaaaagcaaatgaagaagtctgagaaaaagagcaagcaagagaaagagaagagcaagaagaaaaaaggaggtaaaacagaacaggatggctatcagaaacccaccaacaaacacttcacgcagagtcccaagaagtcagtggccgacctgctggggtcctttgaaggcaaacgaagactccttctgatcactgctcccaaggctgagaacaatatgtatgtgcaacaacgtgatgaatatctggaaagtttctgcaagatggctaccaggaaaatctctgtgatcaccatcttcggccctgtcaacaacagcaccatgaaaatcgaccactttcagctagataatgagaagcccatgcgagtggtggatgatgaagacttggtagaccagcgtctcatcagcgagctgaggaaagagtacggaatgacctacaatgacttcttcatggtgctaacagatgtggatctgagagtcaagcaatactatgaggtaccaataacaatgaagtctgtgtttgatctgatcgatactttccagtcccgaatcaaagatatggagaagcagaagaaggagggcattgtttgcaaagaggacaaaaagcagtccctggagaacttcctatccaggttccggtggaggaggaggttgctggtgatctctgctcctaacgatgaagactgggcctattcacagcagctctctgccctcagtggtcaggcgtgcaattttggtctgcgccacataaccattctgaagcttttaggcgttggagaggaagttgggggagtgttagaactgttcccaattaatgggagctctgttgttgagcgagaagacgtaccagcccatttggtgaaagacattcgtaactattttcaagtgagcccggagtacttctccatgcttctagtcggaaaagacggaaatgtcaaatcctggtatccttccccaatgtggtccatggtgattgtgtacgatttaattgattcgatgcaacttcggagacaggaaatggcgattcagcagtcactggggatgcgctgcccagaagatgagtatgcaggctatggttaccatagttaccaccaaggataccaggatggttaccaggatgactaccgtcatcatgagagttatcaccatggatacccttactgagcagaaatatgtaaccttagactcagccagtttcctctgcagctgctaaaactacatgtggccagctccattcttccacactgcgtactacatttcctgcctttttctttcagtgtttttctaagactaaataaatagcaaactttcacctattcatgagttattattgaaacctcaaatcataaagacatttaaaagaattgtttttctaactggaggggctctagtgctaaataatagtactgaaaattgatattattttccttttcttatatgaaggaccttatttggcatataaaattttataaaatatgta

SEQ ID NO: 121180 - DNA, 681 bp, Homo sapiens
  Payload ID: 3757
  Gene Symbol: CCDC80
  Gene Name: coiled-coil domain containing 80
  ENST ID: ENST00000479368
  CDS Start-End: 45-681
gaagttacaacagaaaaactacaggagtgtagcaatgcagtttaatggctttgagaagcatgggacagttctctgtttttttctttttttttttctgggcacagaaaaaaattgctagcctaagtcactctggtttcctacattggtttttattgtttgaagcagtaagcagtaatggtgtcctgctttttttttccaggttccggtggaggaggaggttgctggtgatctctgctcctaacgatgaagactgggcctattcacagcagctctctgccctcagtggtcaggcgtgcaattttggtctgcgccacataaccattctgaagcttttaggcgttggagaggaagttgggggagtgttagaactgttcccaattaatgggagctctgttgttgagcgagaagacgtaccagcccatttggtgaaagacattcgtaactattttcaagtgagcccggagtacttctccatgcttctagtcggaaaagacggaaatgtcaaatcctggtatccttccccaatgtggtccatggtgattgtgtacgatttaattgattcgatgcaacttcggagacaggaaatggcgattcagcagtcactggggatgcgctgcccagaagatgagtatgcaggctatggttaccatagttaccaccaaggataccaggatggttacc

SEQ ID NO: 121181 - DNA, 781 bp, Homo sapiens
  Payload ID: 3757
  Gene Symbol: CCDC80
  Gene Name: coiled-coil domain containing 80
  ENST ID: ENST00000461431
  CDS Start-End: 1-781
cttcacgcagagtcccaagaagtcagtggccgacctgctggggtcctttgaaggcaaacgaagactccttctgatcactgctcccaaggctgagaacaatatgtatgtgcaacaacgtgatgaatatctggaaagtttctgcaagatggctaccaggaaaatctctgtgatcaccatcttcggccctgtcaacaacagcaccatgaaaatcgaccactttcagctagataatgagaagcccatgcgagtggtggatgatgaagacttggtagaccagcgtctcatcagcgagctgaggaaagagtacggaatgacctacaatgacttcttcatggtgctaacagatgtggatctgagagtcaagcaatactatgaggtaccaataacaatgaagtctgtgtttgatctgatcgatactttccagtcccgaatcaaagatatggagaagcagaagaaggagggcattgtttgcaaagaggacaaaaagcagtccctggagaacttcctatccaggttccggtggaggaggaggttgctggtgatctctgctcctaacgatgaagactgggcctattcacagcagctctctgccctcagtggtcaggcgtgcaattttgggagctctgttgttgagcgagaagacgtaccagcccatttggtgaaagacattcgtaactattttcaagtgagcccggagtacttctccatgcttctagtcggaaaagacggaaatgtcaaatcctggtatccttccccaatgtggtccatggtgattgtgtac

SEQ ID NO: 121182 - DNA, 2510 bp, Homo sapiens
  Payload ID: 3758
  Gene Symbol: CCDC81
  Gene Name: coiled-coil domain containing 81
  Uniprot ID: Q6ZN84
  ENST ID: ENST00000354755
  CDS Start-End: 429-2117
tagcaaccgagcgagcctttctcgcgtcccagcaacgcgcccttccctctgccgggcctattctccctggtgcccctcccttcctcgaggctgcagctcacccctcattgggtctctcgttggtcaggagggcgcgggtctgcacactctcactcggtgccggacatcagttcctgcggctcttgctgtgggagctgcccgagagccagagcagtggggagggacggcgagaaccaatgtttaagtttatttaagaaagaagaaaaagagtcaagaagttcaagattttcgtcactcttatttttaaggcacatccaaagctccgtggagaaggggctggagggtgggaaaattatttttgtgcacattccatataagaaagaagagacccatcgaacattcagtacggagtcacctggaaattggagatgttggatacgatcgcccgtgccctgcaggacctgggcaggcaggtgctgcccactctgccctcgctgagccaggaggaagtctctattatctgggggaatgtatcagaatttgtgagacggcagttaaccctgcacaagggggttcagattccagcatttggaactttcactttcataagacaaaagcttgaggtgggaaacaacaaatttatcttaatccagaggcctgtgtttatcatggtggagaagctagtgcagattcatggactcaaacaaaacaaaaggcctggcactgtggactcggtgttgtctagcagagaggccttgaggaagtggcccagcagtgtgcttgcgtttccaaggattgagctcaaggagatggaaaacaaactgcctatggagacccttgtagaagaatgtggagagaatagagaaaggaagtgcaagttaaaagaccagtcagacaaagaagaaggcaccagagatatctcatcacccaaaagacttcgagatagacaagctttgttccctgccaaagtgacaaatgtcagcttgctggaaaagtttgaacgaagtgagagtggtgggaagattatgacccctgaaagcttatcatatccaagttgtctgaaacacgacagtgagatgaagccccaaacatctccagcttgccaggatcataacaaggcaggacaggaaatgtgctatgtatgtttgcaacgagcacaacgaaattccctgttgtactacagtgaggaaaggaggagagagatagaagatgagagactcatacagcagtatcagatgttaaaggatcaggaggctctcttcagacaccagatgaaaagtctggctactagagaacagaatcagaaaaatgctgcctataatcttggagttgctgaagctataagaaaccacaagaatgagaaaccggaattttataaatccttcctatttgacaaacggccactcagtcctgcgcttaatgctcttaagcaagaggaatattcccggagtctcctgaaacaaatggataacagacaggaaaacgaaataaagcaaagacaatacagagagttgatggaccgcctggaacaagtgcaactcacagaggaacttgctgcgcaaagagcgaaatttttaaaagataagatggaagaaacacagtgttacaagagagctttggatgcacagataaagaacaaaccctctcggctgcccccctttgagccagactcctctgagcccatctttggtaagaatgagggtgaactgatggtggaaaagcaaaagcgagaacaaaattacatgaaacaccagctggaggcagctgctaaccacaagaggaaagccatcctgcatcaactagtggaccagaggcgggatttgcaaatgcttcagaggacacaaagagagcacttggcagacagaaccgctgagctggagcgagtaaatagagtcaaccaatgcttacaggaggactgggaaaggagtgctgcgatgaagaagcagcgagacctggaggacaaggcttttgaacgggcttcagacaagctgtttctcctagaccagtgtgagaagtatcggcgctgcaagcaatgccagaggcgcacctccaacgtgggcgagagcaacctgtggcccctgaacaagttcctgcctggctcccggttgcttgtgtaaaactcaaagtttggctcttcgtttcccggggaaagtttttatcttttacatgtttgggggtgattgtgaaactgcgtatttttacctcagagaaaaaaatcattgtttaggtttggtgctttcattagattgcttgttaagcccttattgaattcactcctgctttcctcccacccccaattatttcctatactagtttctgatggcagtgaaggtgtctgaatggtcctgagggctagaacctgctgcacaggggctgggaatgggatccagcttcattatggctgctggggtgctgctgacccagccctgctgctgctccatgactttgtgtacaaaacttttttcatctgtaatgaatagtggcaataataaatattttttaagcgcctg

SEQ ID NO: 121183 - DNA, 2528 bp, Homo sapiens
  Payload ID: 3758
  Gene Symbol: CCDC81
  Gene Name: coiled-coil domain containing 81
  Uniprot ID: Q6ZN84
  ENST ID: ENST00000445632
  CDS Start-End: 273-2231
gtgccggacatcagttcctgcggctcttgctgtgggagctgcccgagagccagagcagtggggagggacggcgagaaccaatgtttaagtttatttaagaaagaagaaaaagagtcaagaagttcaagattttcgtcactcttatttttaaggcacatccaaagctccgtggagaaggggctggagggtgggaaaattatttttgtgcacattccatataagaaagaagagacccatcgaacattcagtacggagtcacctggaaattggagatgttggatacgatcgcccgtgccctgcaggacctgggcaggcaggtgctgcccactctgccctcgctgagccaggaggaagtctctattatctgggggaatgtatcagaatttgtgagacggcagttaaccctgcacaagggggttcagattccagcatttggaactttcactttcataagacaaaagcttgaggtgggaaacaacaaatttatcttaatccagaggcctgtgtttatcatggtggagaagctagtgcagattcatggactcaaacaaaacaaagtatatactcctggtgaaatcccaattgttccacttaattttgtcatgatatccctggagggtccatttaacagagatgtagtggaaggatgtgtgaaggagacgttgctttttttatcgcgttccatttccatgaaacaaaatgtggagtttacattcaaaggaattggggtcctcatgatcagagacagcaaagtgaagatgaggttttataaagacttcctttgtaccatggatggaagtggggctttggcaaaggccctagcaaataggcctggcactgtggactcggtgttgtctagcagagaggccttgaggaagtggcccagcagtgtgcttgcgtttccaaggattgagctcaaggagatggaaaacaaactgcctatggagacccttgtagaagaatgtggagagaatagagaaaggaagtgcaagttaaaagaccagtcagacaaagaagaaggcaccagagatatctcatcacccaaaagacttcgagatagacaagctttgttccctgccaaagtgacaaatgtcagcttgctggaaaagtttgaacgaagtgagagtggtgggaagattatgacccctgaaagcttatcatatccaagttgtctgaaacacgacagtgagatgaagccccaaacatctccagcttgccaggatcataacaaggcaggacaggaaatgtgctatgtatgtttgcaacgagcacaacgaaattccctgttgtactacagtgaggaaaggaggagagagatagaagatgagagactcatacagcagtatcagatgttaaaggatcaggaggctctcttcagacaccagatgaaaagtctggctactagagaacagaatcagaaaaatgctgcctataatcttggagttgctgaagctataagaaaccacaagaatgagaaaccggaattttataaatccttcctatttgacaaacggccactcagtcctgcgcttaatgctcttaagcaagaggaatattcccggagtctcctgaaacaaatggataacagacaggaaaacgaaataaagcaaagacaatacagagagttgatggaccgcctggaacaagtgcaactcacagaggaacttgctgcgcaaagagcgaaatttttaaaagataagatggaagaaacacagtgttacaagagagctttggatgcacagataaagaacaaaccctctcggctgcccccctttgagccagactcctctgagcccatctttggtaagaatgagggtgaactgatggtggaaaagcaaaagcgagaacaaaattacatgaaacaccagctggaggcagctgctaaccacaagaggaaagccatcctgcatcaactagtggaccagaggcgggatttgcaaatgcttcagaggacacaaagagagcacttggcagacagaaccgctgagctggagcgagtaaatagagtcaaccaatgcttacaggaggactgggaaaggagtgctgcgatgaagaagcagcgagacctggaggacaaggcttttgaacgggcttcagacaagctgtttctcctagaccagtgtgagaagtatcggcgctgcaagcaatgccagaggcgcacctccaacgtgggcgagagcaacctgtggcccctgaacaagttcctgcctggctcccggttgcttgtgtaaaactcaaagtttggctcttcgtttcccggggaaagtttttatcttttacatgtttgggggtgattgtgaaactgcgtatttttacctcagagaaaaaaatcattgtttaggtttggtgctttcattagattgcttgttaagcccttattgaattcactcctgctttcctcccacccccaattatttcctatactagtttctgatggcagtgaaggtgtctgaatggtcctgagggctagaacctgctgcacaggggctgggaatgggatccagcttcattatggctgctggggtgct

SEQ ID NO: 121184 - DNA, 543 bp, Homo sapiens
  Payload ID: 3758
  Gene Symbol: CCDC81
  Gene Name: coiled-coil domain containing 81
  ENST ID: ENST00000531271
  CDS Start-End: 278-543
actcggtgccggacatcagttcctgcggctcttgctgtgggagctgcccgagagccagagcagtggggagggacggcgagaaccaatgtttaagtttatttaagaaagaagaaaaagagtcaagaagttcaagattttcgtcactcttatttttaaggcacatccaaagctccgtggagaaggggctggagggtgggaaaattatttttgtgcacattccatataagaaagaagagacccatcgaacattcagtacggagtcacctggaaattggagatgttggatacgatcgcccgtgccctgcaggacctgggcaggcaggtgctgcccactctgccctcgctgagccaggaggaagtctctattatctgggggaatgtatcagaatttgtgagacggcagttaaccctgcacaagaggcctggcactgtggactcggtgttgtctagcagagaggccttgaggaagtggcccagcagtgtgcttgcgtttccaaggattgagctcaaggagatggaaaacaaactgcctatggagaccct

SEQ ID NO: 121185 - DNA, 1814 bp, Homo sapiens
  Payload ID: 3758
  Gene Symbol: CCDC81
  Gene Name: coiled-coil domain containing 81
  Uniprot ID: Q6ZN84
  ENST ID: ENST00000528728
  CDS Start-End: 257-1420
attcctcattggatttttaagctctggacttataagcgcttaacataaacaacaacaagaaaagtatcgtggtagccttgcctatgagcctgcagtttttaatttgtctgagtcctggacctcagcctagatgtaaccttgctctgttgctgtcctctagaggcctggcactgtggactcggtgttgtctagcagagaggccttgaggaagtggcccagcagtgtgcttgcgtttccaaggattgagctcaaggagatggaaaacaaactgcctatggagacccttgtagaagaatgtggagagaatagagaaaggaagtgcaagttaaaagaccagtcagacaaagaagaaggcaccagagatatctcatcacccaaaagacttcgagatagacaagctttgttccctgccaaagtgacaaatgtcagcttgctggaaaagtttgaacgaagtgagagtggtgggaagattatgacccctgaaagcttatcatatccaagttgtctgaaacacgacagtgagatgaagccccaaacatctccagcttgccaggatcataacaaggcaggacagatgaaaagtctggctactagagaacagaatcagaaaaatgctgcctataatcttggagttgctgaagctataagaaaccacaagaatgagaaaccggaattttataaatccttcctatttgacaaacggccactcagtcctgcgcttaatgctcttaagcaagaggaatattcccggagtctcctgaaacaaatggataacagacaggaaaacgaaataaagcaaagacaatacagagagttgatggaccgcctggaacaagtgcaactcacagaggaacttgctgcgcaaagagcgaaatttttaaaagataagatggaagaaacacagtgttacaagagagctttggatgcacagataaagaacaaaccctctcggctgcccccctttgagccagactcctctgagcccatctttggtaagaatgagggtgaactgatggtggaaaagcaaaagcgagaacaaaattacatgaaacaccagctggaggcagctgctaaccacaagaggaaagccatcctgcatcaactagtggaccagaggcgggatttgcaaatgcttcagaggacacaaagagagcacttggcagacagaaccgctgagctggagcgagtaaatagagtcaaccaatgcttacaggaggactgggaaaggagtgctgcgatgaagaagcagcgagacctggaggacaaggcttttgaacgggcttcagacaagctgtttctcctagaccagtgtgagaagtatcggcgctgcaagcaatgccagaggcgcacctccaacgtgggcgagagcaacctgtggcccctgaacaagttcctgcctggctcccggttgcttgtgtaaaactcaaagtttggctcttcgtttcccggggaaagtttttatcttttacatgtttgggggtgattgtgaaactgcgtatttttacctcagagaaaaaaatcattgtttaggtttggtgctttcattagattgcttgttaagcccttattgaattcactcctgctttcctcccacccccaattatttcctatactagtttctgatggcagtgaaggtgtctgaatggtcctgagggctagaacctgctgcacaggggctgggaatgggatccagcttcattatggctgctggggtgctgctgacccagccctgctgctgctccatgactttgtgtacaaaacttttttcatctgtaatgaatagtggcaataataaatattttttaagcgcctga

SEQ ID NO: 121186 - DNA, 2941 bp, Homo sapiens
  Payload ID: 3759
  Gene Symbol: CCDC82
  Gene Name: coiled-coil domain containing 82
  Uniprot ID: Q8N4S0
  ENST ID: ENST00000278520
  CDS Start-End: 430-2064
ggctcactggggactcctttaaattttgcaattggtgttattaataagatgataagagggaagtctgcaaatactcttttcttgcctggtggataataatttacagaagtttctggcctaactcgtgcagtaaaattcggttacataattttttaaaaaagcatatttgtaaactctaaaccattttaatcgttatttttctgaaactaaaatacagcatgaatgagagataaaaataatgatttttaaaggcttaatttttactatcttgtacaaatgtgatattggcagccgtcattgtgtggcactggacggggaatcaagagacccggtttctaatccctgctctgtcactaacaagctgcgtgatcttcggaaaaaagtaatcctcttggaaagctggaaacatagtccgaagcttaagtgaaaatgatacatgttagaagacatgaaacaaggagaaattctaagagtcacgtgcctgagcagaaatctcgagttgattggaggcgaactaaaagaagtagtatctcacaattacttgatagtgatgaagagcttgatagtgaagaatttgatagtgatgaagagcttgatagtgatgaaagttttgaaaatgatgaagagcttgatagtaacaagggacctgattgtaataaaacaccaggaagtgaaagagagctcaacttaagtaaaattcaaagtgaaggaaatgacagtaagtgtctcattaactctggcaacggttcaacatatgaagaagaaacgaacaaaatcaaacataggaatattgacttacaagatcaggaaaaacatttaagtcaagaggataatgatctcaacaaacaaactggacaaataatagaggatgatcaggaaaaacatttaagtcaagaggataatgatctcaacaaacaaactggacaaataatagaggatgatttagaagaagaagacatcaagcgaggaaaaagaaaaaggctatcctctgtgatgtgtgacagtgatgagagtgatgacagcgatatcctagttagaaaagtaggtgttaaacgtccccgtagagtggttgaagatgaaggttcttcagtggaaatggagcaaaagactcctgaaaaaacattagctgcacaaaagcgagaaaaacttcagaagctcaaagaactctcaaaacaaagatctcgtcagagacgcagtagtggtagagattttgaggactctgaaaaggaatcttgcccaagcagtgatgaagttgatgaggaggaagaagaggataattatgaatctgatgaagatggagatgattatattatcgatgactttgtagtgcaagatgaggagggtgatgaagagaataaaaaccaacaaggagaaaaattgactacatcacaactgaaattagtaaaacagaattctctttattcttttagtgaccactatactcattttgaaagagttgtgaaggctcttctgatcaacgctttagatgaatcttttctgggaacattatatgatggcacaaggcaaaaatcatatgcaaaagatatgctaacatctcttcattatttggataaccgctttgttcagcctcgtctagagagcttggtatctagaagtcgttggaaagagcaatataaggagcgagtagaaaattattctaatgtaagtattcatttgaagaatcctgaaaactgttcctgccaggcttgtggactgcatcgctactgtaaatattcagtgcatttatcaggagagttgtataacaccaggaccatgcaaatagataatttcatgtcacatgataaacaggtgttcactgttggcagaatttgtgccagccgtaccagaatttatcataaactgaaacattttaaattcaaactataccaggaatgttgcaccattgcaatgacagaagaagttgaagatgaacaagttaaagaaacagtggaaagaattttcaggcggtcaaaagaaaatggctggattaaggagaaatatggtcaacttgaagaatatctcaattttgcggattactttcaagaagagaagtttgagttgtaacacatttccatcagagaagattttttaaattcctgtaaatgtgaagatcatgattcttgtttttctgtatcatgtgacatgtttgtacattttatctatatcttcatggcaaaatattttgtttaaaacatgattatcttaattcctgtgaagtggcactctacactctaattaaacttttatctgatgtacataaaagcattatcttaatttttaagtctgtaaatatattttaaagttatataataatggctttataacagatgactgtcaagtgaatgagctgttgatatcctgtcagtttagtcaaaatatattgtatcttaaaaatgtatttagactaacgtctacatgtatttttacggaattcctgtccagatctgtttattcttttacagtattaaatgattttcactaatatattttttactgctatcatctaaatcagtgggccatggaagaaacctcatatatcattcagttcaatcccattgcttcagaatcagatcatagcatatctattctaagtagaggaatgcttttttccttttcttgaaagtttctctttcaaatagatttcaggcctctagagtctttcaaccctcacattcaggaataattttatgtaaattttcatgctttataatgttcttacttttttctattcaattttgtctatatattgatgattaagatgtattttatttatttttatccatagctttttccatataagtatgtatcttagggtcagaactgctgaaagagacaaactcagccaaaaacacttggaaagcatattttggtatctgcattgctttgcatatctaaattttcccataaagtaataaagtaaaatggttgcagagtgaacaaa

SEQ ID NO: 121187 - DNA, 1878 bp, Homo sapiens
  Payload ID: 3759
  Gene Symbol: CCDC82
  Gene Name: coiled-coil domain containing 82
  Uniprot ID: Q8N4S0
  ENST ID: ENST00000423339
  CDS Start-End: 244-1878
cagcacaacatacaacgtaattcagagtagatgttcatataattatttcatgggcattcagtaaattatttgttaaattaatgttctaccatcttcactcagatatttcatgtgattttgtgtttgtggaccattaaataaagccaaataaatataatttataccataaatgcattcattgctctaatctggttatcactgttatattcctaacaactttattttatagaagcttaagtgaaaatgatacatgttagaagacatgaaacaaggagaaattctaagagtcacgtgcctgagcagaaatctcgagttgattggaggcgaactaaaagaagtagtatctcacaattacttgatagtgatgaagagcttgatagtgaagaatttgatagtgatgaagagcttgatagtgatgaaagttttgaaaatgatgaagagcttgatagtaacaagggacctgattgtaataaaacaccaggaagtgaaagagagctcaacttaagtaaaattcaaagtgaaggaaatgacagtaagtgtctcattaactctggcaacggttcaacatatgaagaagaaacgaacaaaatcaaacataggaatattgacttacaagatcaggaaaaacatttaagtcaagaggataatgatctcaacaaacaaactggacaaataatagaggatgatcaggaaaaacatttaagtcaagaggataatgatctcaacaaacaaactggacaaataatagaggatgatttagaagaagaagacatcaagcgaggaaaaagaaaaaggctatcctctgtgatgtgtgacagtgatgagagtgatgacagcgatatcctagttagaaaagtaggtgttaaacgtccccgtagagtggttgaagatgaaggttcttcagtggaaatggagcaaaagactcctgaaaaaacattagctgcacaaaagcgagaaaaacttcagaagctcaaagaactctcaaaacaaagatctcgtcagagacgcagtagtggtagagattttgaggactctgaaaaggaatcttgcccaagcagtgatgaagttgatgaggaggaagaagaggataattatgaatctgatgaagatggagatgattatattatcgatgactttgtagtgcaagatgaggagggtgatgaagagaataaaaaccaacaaggagaaaaattgactacatcacaactgaaattagtaaaacagaattctctttattcttttagtgaccactatactcattttgaaagagttgtgaaggctcttctgatcaacgctttagatgaatcttttctgggaacattatatgatggcacaaggcaaaaatcatatgcaaaagatatgctaacatctcttcattatttggataaccgctttgttcagcctcgtctagagagcttggtatctagaagtcgttggaaagagcaatataaggagcgagtagaaaattattctaatgtaagtattcatttgaagaatcctgaaaactgttcctgccaggcttgtggactgcatcgctactgtaaatattcagtgcatttatcaggagagttgtataacaccaggaccatgcaaatagataatttcatgtcacatgataaacaggtgttcactgttggcagaatttgtgccagccgtaccagaatttatcataaactgaaacattttaaattcaaactataccaggaatgttgcaccattgcaatgacagaagaagttgaagatgaacaagttaaagaaacagtggaaagaattttcaggcggtcaaaagaaaatggctggattaaggagaaatatggtcaacttgaagaatatctcaattttgcggattactttcaagaagagaagtttgagttgtaa

SEQ ID NO: 121188 - DNA, 236 bp, Homo sapiens
  Payload ID: 3759
  Gene Symbol: CCDC82
  Gene Name: coiled-coil domain containing 82
  ENST ID: ENST00000530203
  CDS Start-End: 147-236
atctataggaaaaaagtaatcctcttggaaagctggaaacatagtccgattttttatagtgtgtggtttatagaaagactccaggaatattctgtgctgtggtggaaatattggaataatcagcctcataagaagcttaagtgaaaatgatacatgttagaagacatgaaacaaggagaaattctaagagtcacgtgcctgagcagaaatctcgagttgattggaggcgaactaaa

SEQ ID NO: 121189 - DNA, 849 bp, Homo sapiens
  Payload ID: 3759
  Gene Symbol: CCDC82
  Gene Name: coiled-coil domain containing 82
  ENST ID: ENST00000538597
  CDS Start-End: 63-849
cggactagtgggctagcgggcgctgggttcctgcgtcccgccaaagagaagcttaagtgaaaatgatacatgttagaagacatgaaacaaggagaaattctaagagtcacgtgcctgagcagaaatctcgagttgattggaggcgaactaaaagaagtagtatctcacaattacttgatagtgatgaagagcttgatagtgaagaatttgatagtgatgaagagcttgatagtgatgaaagttttgaaaatgatgaagagcttgatagtaacaagggacctgattgtaataaaacaccaggaagtgaaagagagctcaacttaagtaaaattcaaagtgaaggaaatgacagtaagtgtctcattaactctggcaacggttcaacatatgaagaagaaacgaacaaaatcaaacataggaatattgacttacaagatcaggaaaaacatttaagtcaagaggataatgatctcaacaaacaaactggacaaataatagaggatgatcaggaaaaacatttaagtcaagaggataatgatctcaacaaacaaactggacaaataatagaggatgatttagaagaagaagacatcaagcgaggaaaaagaaaaaggctatcctctgtgatgtgtgacagtgatgagagtgatgacagcgatatcctagttagaaaagtaggtgttaaacgtccccgtagagtggttgaagatgaaggttcttcagtggaaatggagcaaaagactcctgaaaaaacattagctgcacaaaagcgagaaaaacttcagaagctcaaagaactctcaaaacaaagatctcgtcagagacgcagtagtggtagagattttgagg

SEQ ID NO: 121190 - DNA, 2358 bp, Homo sapiens
  Payload ID: 3760
  Gene Symbol: CCDC83
  Gene Name: coiled-coil domain containing 83
  Uniprot ID: Q8IWF9
  ENST ID: ENST00000280245
  CDS Start-End: 513-1847
aaatgcagggcgcagcagccgctgcagtggagccggtaggcctggccggcgggctgaaaggaagtgcgagctgtccgcccagggccgggtatccgcccctgcaggctgtggaggggatgtcaggagactggctggcctcttttcttggcccccgactccttccagtctgacactgaagactttataagcttccccccgaccaccctccacgggctccactctccacgggcctgggcttgcgccgcttcgagatcagcctgggggtcgcgccctcctggtcttgtccacgaagcgccgttcttgggccgttaggagctgctgggaagggctctgataggcccactcctcttctccacccaggagatgagaaggagggcaggcctttttaatctgatcagaatgttaacccatctctccgccttgcggtagaacccctggatacattatttgccctctcgaaaggcaggctctgaatttgattcaggtatatttcttcatagctaaccagcacaatggaaaactcagggaaagcaaataaaaaggatacacatgacgggccaccaaaagaaattaaactgcctaccagtgaagcacttctagactatcaatgtcaaataaaggaagatgccgtggagcaattcatgtttcaaataaagacacttaggaaaaagaaccaaaaatatcatgaaagaaatagccgcttaaaagaagaacagatttggcacatacggcatctactaaaggaactgagtgaagagaaggcagagggattgccagttgtaacaagagaggatgttgaagaagcgatgaaggaaaaatggaagtttgaaagagaccaggaaaaaaacttgagagatatgcgcatgcaaataagtaatgctgagaaactatttcttgagaaactcagtgaaaaggaatattgggaggagtacaagaatgtagggagtgaacgacatgctaaactcattacctccttacaaaatgacatcaacacagttaaagagaatgcagagaaaatgtcagaacactataaaatcactctggaagatactagaaagaaaataatcaaggaaactttgttgcaactggaccaaaagaaggaatgggccacacagaatgctgtaaagctcattgacaagggcagttatctagagatctgggagaatgactggctcaaaaaagaggttgcaattcacaggaaggaagttgaagaattaaaaaatgctattcatgaactggaagcagaaaatttggtgcttattgatcaactatccaactgtagacttgtggatctcaagatacccaggtatccagtgctacattcctgtcccacctctaatcctcgtcatctgctgctgctgcctttggaatcatgtctaatctctgccaggcgttgctggcgactatatcttacccaagctgctggactagaagtgccacctgaagaaatgtctttggaattgccagaaacacatatagaagagaagtcagaattgcaacccacagaagtagaaagtagagacttgatgtcctcatcagatgagagcactatcttacatcttagtcatgaaaatagcatcgaagatctccagtatgtgaagatagataaagaggaaaactcaggcacagagtttggggacactgatatgaagtacttactatatgaggatgagaaggatttcaaggattatgtaaacttgggccccctgggagtgaagcttatgagtgtggagagcaagaaaatgcccattcattttcaagagaaggaaattccagtcaaactctataaagatgtcaggagcccagaaagccacatcacatataagatgatgaagtcttttctctaagacggaaagctgcaaaggaaacacaacttttccttataaatgttctttgggaactgaagtatatccgttgcccattttacttacactttggctcatttttaaaccagctgttatttctaaaggtcatatttacatttaaaatcaaaggtattcagctattcatttacttgcatggtatgagtgaccaaaacggaagcacgctttgtatttctacactgaagtattcagaagcatgacagtgggttcaaggtagtctctgaggttccttttcacacacaaaaaattcactgattaatctgtgattccagtatgaaatagttccattagaaatgtttctaagaaaaacttagaagtttgcatagcattgtctacacatctttccctctgaggatgctcaatgtgatagacagccagtctataatgcaagccaattctccgtagtttaaccctgtgtattagtctgttctcatgctgctaataaagacataattgaaactgggtaatttataaa

SEQ ID NO: 121191 - DNA, 1969 bp, Homo sapiens
  Payload ID: 3760
  Gene Symbol: CCDC83
  Gene Name: coiled-coil domain containing 83
  Uniprot ID: Q8IWF9
  ENST ID: ENST00000342404
  CDS Start-End: 217-1458
gttcttgggccgttaggagctgctgggaagggctctgataggcccactcctcttctccacccaggagatgagaaggagggcaggcctttttaatctgatcagaatgttaacccatctctccgccttgcggtagaacccctggatacattatttgccctctcgaaaggcaggctctgaatttgattcaggtatatttcttcatagctaaccagcacaatggaaaactcagggaaagcaaataaaaaggatacacatgacgggccaccaaaagaaattaaactgcctaccagtgaagcacttctagactatcaatgtcaaataaaggaagatgccgtggagcaattcatgtttcaaataaagacacttaggaaaaagaaccaaaaatatcatgaaagaaatagccgcttaaaagaagaacagatttggcacatacggcatctactaaaggaactgagtgaagagaaggcagagggattgccagttgtaacaagagaggatgttgaagaagcgatgaaggaaaaatggaagtttgaaagagaccaggaaaaaaacttgagagatatgcgcatgcaaataagtaatgctgagaaactatttcttgagaaactcagtgaaaaggaatattgggaggagtacaagaatgtagggagtgaacgacatgctaaactcattacctccttacaaaatgacatcaacacagttaaagagaatgcagagaaaatgtcagaacactataaaatcactctggaagatactagaaagaaaataatcaaggaaactttgttgcaactggaccaaaagaaggaatgggccacacagaatgctgtaaagctcattgacaagggcagttatctagagatctgggagaatgactggctcaaaaaagaggttgcaattcacaggaaggaagttgaagaattaaaaaatgctattcatgaactggaagcagaaaatttggtgcttattgatcaactatccaactgtagacttgtggatctcaagatacccaggcgactatatcttacccaagctgctggactagaagtgccacctgaagaaatgtctttggaattgccagaaacacatatagaagagaagtcagaattgcaacccacagaagtagaaagtagagacttgatgtcctcatcagatgagagcactatcttacatcttagtcatgaaaatagcatcgaagatctccagtatgtgaagatagataaagaggaaaactcaggcacagagtttggggacactgatatgaagtacttactatatgaggatgagaaggatttcaaggattatgtaaacttgggccccctgggagtgaagcttatgagtgtggagagcaagaaaatgcccattcattttcaagagaaggaaattccagtcaaactctataaagatgtcaggagcccagaaagccacatcacatataagatgatgaagtcttttctctaagacggaaagctgcaaaggaaacacaacttttccttataaatgttctttgggaactgaagtatatccgttgcccattttacttacactttggctcatttttaaaccagctgttatttctaaaggtcatatttacatttaaaatcaaaggtattcagctattcatttacttgcatggtatgagtgaccaaaacggaagcacgctttgtatttctacactgaagtattcagaagcatgacagtgggttcaaggtagtctctgaggttccttttcacacacaaaaaattcactgattaatctgtgattccagtatgaaatagttccattagaaatgtttctaagaaaaacttagaagtttgcatagcattgtctacacatctttccctctgaggatgctcaatgtgatagacagccagtctataatgcaagccaattctccgtagtttaaccctgtgtattagtctgttctcatgctgctaataaagacataattgaaactgggtaatttataaa

SEQ ID NO: 121192 - DNA, 1029 bp, Homo sapiens
  Payload ID: 3760
  Gene Symbol: CCDC83
  Gene Name: coiled-coil domain containing 83
  ENST ID: ENST00000526729
  CDS Start-End: 1-956
ccgtggagcaattcatgtttcaaataaagacacttaggaaaaagaaccaaaaatatcatgaaagaaatagccgcttaaaagaagaacagatttggcacatacggcatctactaaaggaactgagtgaagagaaggcagagggattgccagttgtaacaagagaggatgttgaagaagcgatgaaggaaaaatggaagtttgaaagagaccaggaaaaaaacttgagagaacactataaaatcactctggaagatactagaaagaaaataatcaaggaaactttgttgcaactggaccaaaagaaggaatgggccacacagaatgctgtaaagctcattgacaagggcagttatctagagatctgggagaatgactggctcaaaaaagaggttgcaattcacaggaaggaagttgaagaattaaaaaatgctattcatgaactggaagcagaaaatttggtgcttattgatcaactatccaactgtagacttgtggatctcaagatacccaggcgactatatcttacccaagctgctggactagaagtgccacctgaagaaatgtctttggaattgccagaaacacatatagagaagtcagaattgcaacccacagaagtagaaagtagagacttgatgtcctcatcagatgagagcactatcttacatcttagtcatgaaaatagcatcgaagatctccagtatgtgaagatagataaagaggaaaactcaggcacagagtttggggacactgatatgaagtacttactatatgaggatgagaaggatttcaaggattatgtaaacttgggccccctgggagtgaagcttatgagtgtggagagcaagaaaatgcccattcattttcaagagaaggaaattccagtcaaactctataaagatgtcaggagcccagaaagccacatcacatataagatgatgaagtcttttctctaagacggaaagctgcaaaggaaacacaacttttccttataaatgttctttgggaactgaagtatatccgttgccc

SEQ ID NO: 121193 - DNA, 1202 bp, Homo sapiens
  Payload ID: 3761
  Gene Symbol: CCDC84
  Gene Name: coiled-coil domain containing 84
  Uniprot ID: Q86UT8
  ENST ID: ENST00000334418
  CDS Start-End: 57-1055
gccgccggatggcgtaggatcggccgctggtggtggtgataccgggtacccgggctatggcgccggcgcagcgctgccctctgtgccgccagaccttcttctgtggtcgcgggcacgtttacagccgcaagcaccagcggcagctgaaggaggctttggagaggctcctgccccaggtggaggcggcccgcaaggccatccgcgccgctcaggtggagcgctatgtgcccgaacacgagcgatgctgctggtgcctgtgctgcggctgtgaggtgcgggaacacctgagccatggaaacctgacggtgctgtacggggggctgctggagcatctggccagcccagagcacaagaaagcaaccaacaaattctggtgggagaacaaagctgaggtccagatgaaagagaagtttctggtcactccccaggattatgcgcgattcaagaaatccatggtgaaaggtttggattcctatgaagaaaaggaggataaagtgatcaaggagatggcagctcagatccgtgaggtggagcagagccgacaggaggtggttcggtctgtcttagagcctcaggcagtgccagacccagaagagggctcttcagcacctagaagctggaaagggatgaacagccaagtagcttccagcttacagcagccctcaaatttggacctgccaccagctccagagcttgactggatggagacaggaccatctctgacattcattggccatcaggatataccaggagttggtaacatccactcaggtgccacacctccctggatgatccaagatgaagaatacattgctgggaaccaagaaataggaccatcctatgaagaatttcttaaagaaaaggaaaaacagaagttgaaaaaactccccccagaccgagttggggccaactttgatcacagctccaggaccagtgcaggctggctgccctcttttggccgcgtctggaataatggacgccgctggcagtccagacatcaattcaaaactgaagctgcagcaatgaagaagcagtcacatacagaaaaaagctaatcatgctctctaccaactaccatgaggctaaaagcaaagtcaacaaacccctattataccttccaccaaattctttatcattgtctttcttaggaaacagacatactcattcatttgatttaataaagttttatttttccaaatgta

SEQ ID NO: 121194 - DNA, 1119 bp, Homo sapiens
  Payload ID: 3761
  Gene Symbol: CCDC84
  Gene Name: coiled-coil domain containing 84
  ENST ID: ENST00000532132
  CDS Start-End: 31-615
ctggtggtggtgataccgggtacccgggctatggcgccggcgcagcgctgccctctgtgccgccagaccttcttctgtggtcgcgggcacgtttacagccgcaagcaccagcggcagctgaaggaggctttggagaggctcctgccccaggtggaggcggcccgcaaggccatccgcgccgctcaggtggagcgctatgtgcccgaacacgagcgatgctgctggtgcctgtgctgcggctgtgaggtgcgggaacacctgagccatggaaacctgacggtgctgtacggggggctgctggagcatctggccagcccagagcacaagaaagcaaccaacaaattctggtgggagaacaaagctgaggtccagatgaaagagaagtttctggtcactccccaggattatgcgcgattcaagaaatccatggtgaaaggtttggattcctatgaagaaaaggaggataaagtgatcaaggagatggcagctcagatccgtgaggtggagcagagccgacaggaggtggttcggtctgtcttagaggttggtttccctcggaggatccagaccacctcaggcagtgccagacccagaagagggctcttcagcacctagaagctggaaagggatgaacagccaagtagcttccagcttacagcagccctcaaatttggacctgccaccagctccagagcttgactggatggagacaggaccatctctgacattcattggccatcaggatataccaggagttggtaacatccactcaggtgccacacctccctggatgatccaagatgaagaatacattgctgggaaccaagaaataggaccatcctatgaagaatttcttaaagaaatttccctatcattgtacagaggaaaaacagaagttgaaaaaactccccccagaccgagttggggccaactttgatcacagctccaggaccagtgcaggctggctgccctcttttggccgcgtctggaataatggacgccgctggcagtccagacatcaattcaaaactgaagctgcagcaatgaagaagcagtcacatacagaaaaaagctaatcatgctctctaccaactaccatgaggctaaaagcaaagtcaa

SEQ ID NO: 121195 - DNA, 1295 bp, Homo sapiens
  Payload ID: 3761
  Gene Symbol: CCDC84
  Gene Name: coiled-coil domain containing 84
  ENST ID: ENST00000526463
  CDS Start-End: 44-490
gtaggatcggccgctggtggtggtgataccgggtacccgggctatggcgccggcgcagcgctgccctctgtgccgccagaccttcttctgtggtcgcgggcacgtttacagccgcaagcaccagcggcagctgaaggaggctttggagaggctcctgccccaggtggaggcggcccgcaaggccatccgcgccgctcaggtggagcgctatgtgcccgaacacgagcgatgctgctggtgcctgtgctgcggctgtgaggtgcgggaacacctgagccatggaaacctgacggtgctgtacggggggctgctggagcatctggccagcccagagcacaagaaagcaaccaacaaattctggtgggagaacaaagctgaggtccagatgaaagagaagtttctggtcactccccaggattatgcgcggctatgtggttcatctgcaagttttttcaaattgttgcaaatctccaaaaaaattttcaagtgaactcgtgcagttcaaacttgtgctgtgcaagagtcaactgtatttgcttattttctcaaaaaggaatgcctaaaggataatcaagaaactaatgaaactgccagatgtggtggtgcacacctgtagtcctagctactcaggaggctgagattcaagaaatccatggtgaaaggtttggattcctatgaagaaaaggaggataaagtgatcaaggagatggcagctcagatccgtgaggtggagcagagccgacaggaggtggttcggtctgtcttagaggttggtttccctcggaggatccagaccacctcaggcagtgccagacccagaagagggctcttcagcacctagaagctggaaagggatgaacagccaagtagcttccagcttacagcagccctcaaatttggacctgccaccagctccagagcttgactggatggagacaggaccatctctgacattcattggccatcaggtgccacacctccctggatgatccaagatgaagaatacattgctgggaaccaagaaataggaccatcctatgaagaatttcttaaagaaaaggaaaaacagaagttgaaaaaactccccccagaccgagttggggccaactttgatcacagctccaggaccagtgcaggctggctgccctcttttggccgcgtctggaataatggacgccgctggcagtccagacatcaattcaaaactgaagctgcagcaatgaagaagcagtcacatacagaaaaaagctaatcatgctctctaccaactaccatgaggctaaaagcaaagtcaa

SEQ ID NO: 121196 - DNA, 1119 bp, Homo sapiens; identical to SEQ ID NO: 121194
  Payload ID: 3761
  Gene Symbol: CCDC84
  Gene Name: coiled-coil domain containing 84
  ENST ID: ENST00000626123
  CDS Start-End: 31-615

SEQ ID NO: 121197 - DNA, 1295 bp, Homo sapiens; identical to SEQ ID NO: 121195
  Payload ID: 3761
  Gene Symbol: CCDC84
  Gene Name: coiled-coil domain containing 84
  ENST ID: ENST00000626384
  CDS Start-End: 44-490

SEQ ID NO: 121198 - DNA, 1202 bp, Homo sapiens; identical to SEQ ID NO: 121193
  Payload ID: 3761
  Gene Symbol: CCDC84
  Gene Name: coiled-coil domain containing 84
  Uniprot ID: Q86UT8
  ENST ID: ENST00000625528
  CDS Start-End: 57-1055

SEQ ID NO: 121199 - DNA, 3982 bp, Homo sapiens
  Payload ID: 3762
  Gene Symbol: CCDC85A
  Gene Name: coiled-coil domain containing 85A
  Uniprot ID: Q96PX6
  ENST ID: ENST00000407595
  CDS Start-End: 503-2164
gcgccgcggtgcccggcgcgccctccaagctaggagaggggagaagccgggggctgcagctgggcaagggggaggaaagtgcgtgtgcgtgcacgcctgtgtgcagggcagagagtgcggggggcgacagtctcggcttagggcggaggagagggcaggggaacggcggtgcagctcccccgctgtccccgaggatttcccgcggcagccccgggctccccagtgcccctcaccatggacttgcgcggagttgggacgggcctcggcagcagcaagcggctggctgccgggccctgggggagcgcgggcgcgcgcgcggggatggcgaggtaggatggccacccagcgcgacccccgccgccccaacccagcggcccctgggcggtgccgctgactcgccggagcgcacaggggtgtgggcggaggcggcctcgccgcgcccgcgccttcgggagtcgcctcgcctcttccacccacttgcacctgccaccccgcggataccatgtcgaaggcggccggaggcgcggcggcggctgcggcggcggcggaaagttgttccccagccccggccggctcgtccgcggccccgcccgcgccggtggaggacctgtccaaagtgtcggacgaggagctgctgcagtggagcaaggaggagctgatccgcagcctgcggcgcgccgaggcggagaaggtgagcgcgatgctggaccacagcaacctcatccgcgaggtgaaccgccgcctgcagctgcacctcggcgagatccgcggcctcaaggatatcaaccagaaactccaggaagacaaccaggaactgagggacctctgctgtttcctggatgatgaccggcagaaaggcaagagggtgtctcgggagtggcagagactgggtcgctacactgccggggtgatgcacaaggaagtggccttatacctgcagaagctgaaagacctggaggtgaagcaggaggaagtggtgaaggagaacatggagctcaaggagctctgtgtgctactagatgaggagaagggtgcaggctgcgcaggcagccgctgctccatcgacagccaggccagcctgtgccaactcacagcctccaccgcaccctacgtgcgggatgtgggtgacggcagcagcacctccagcactggcagcactgacagcccggaccaccacaagcaccacgcgagcagtggcagcccggagcacctgcagaagccccggagcgagggcagcccggagcactccaagcacaggagcgccagccccgagcatccacagaaacccagagcctgtggaaccccagatcgccccaaagcactcaaaggacctagcccggagcaccacaaacccttgtgcaagggcagccccgaacagcaaaggcacccgcatccagggagcagccccgaaacgctgcccaagcacgtgctgagtgggagcccggaacacttccagaagcaccggtcagggagcagccctgaacacgccaggcacagtggagggagcccggagcatcttcagaaacacgctcttggggggagcctagagcatctccccagagccaggggcaccagcccggagcacctcaaacaacattatggagggagccctgatcacaaacacggaggaggcagtggaggaagtggaggcagcggcggaggcagcagggagggcaccctcagacggcaggcacaggaggacgggtcaccccatcaccggaatgtctacagtggcatgaacgaatcaaccttgtcctatgttaggcagctggaggcaagagtaagacagctggaggaagaaaatcgcatgctgccccaggccagccagaatagaaggcaacctccaactagaaacagctcaaatatggagaaaggctgggggtccagagcccggcgggtcttgcagtggtggcaagggtgccgaggaataggacgatgcctgcctactctcccgggttcttttaggttgtcatcaggggctgatgggagtaacagttcacccaactctgcagctagcttcagtggacatgccacaccttcccagcagcctgaacctgtggtacattctcttaaggttgtgtggaggaaacttggagatgctgcaggttcgtgtcctggaattaggcaacatttgtcaggaaaccagtacaaaggaccaatgtgagatgcactctttttcaaacaggagatcaccactgccagaaagtgatagaagacaagaagaaaaaggaaagagtgggtttccacaaacctggactcatggaataacatggagtgattgtacattgcacatatctcccctctaaaacctgtagtacaacttctcccctcaagctgatattctgtgtctctcacctcaatgtccacaacagtcaatctcaaacaaggtagctttgaacatctcaaacagagtagctttgaaaatcaacattttggtaccagtgttttcattagaaataagtgtttttaactccccagatataatattgtaattgggaaacctgaatagttttaagagtccagtggagcctcagtgttttgaatagagatgactcattacacataatggtaggagttttctaccatatcatattgaagatatgaagaggtattttccagcttcccaagtttgagagttgggcatttacctcttacacttcagtcaacaaacaaactagtaattcctaatgcataattaatttggatgcaagataagattaagtttctggagttttgttttgacttctgaggtgctaaaaaataccatgtaaattctccctaccagctagaagggtagcaagacgttgtagagtgcttatcagagagtaccatttacttcaattgatcaatataaatatatctttttttttcatcttaatgagtttctcataaagacacatcttggggcataccaaccttcatattcattcagtgtatccattggtgttaatattaacaatttcaactaaaaacaacaaacataatttttctaagtgtttcgagctgtgagatgtcaatttctacaatttagtttctagacatgctgtatatttaataaactttatgtaaactttaaaatattgcactgcatttatgaaaaaagctttctttgcctactgcagctatctaacattttatgaaactgacgcatgtccttcattattgaggctaaaagctcttgttcagattgcttgaggtttgaaaaagaggtgtgctagctttgcttagtttatttcttatttttggtatacatatacatatatataacattagaatgtgtgtactggaaatgctatgataggtattttgtgttaatccaaatgcaatgatagtttcttgtatgaatgtgcaagaggcctgtgaccgaatgctacgtttttatggtagtttaagattataaaagtagaaatgcaacaattcccagtttttggataggttctaaatttctgagatttgattcatggcagatattctctgttgttgttgttttagatgggctcattacataacgagttaattgtcactagtaggagactgtgaaggaattttgttatactttcaaaaatgttactgtgatgaaaaatcatctattttcagaaaatatttatgaattaatttactatagaattatctctctaattatcataattgggttacaatttaagctccccttttaaatgttatattttaaaatgttattactctataaaagaaaattgcttgctatatttacaccttctttcctaggaaagctttcatccttaaattgttgtattcctaccctctgaagacatttaaaataagcttttgtgcctgcagcagagcctgcagaagctaatacaagggacactggtcttttgacaaaataaacttgtgtaaattttgatactgtattaaaactatttttttaaagttctgcataaaattgagtattaagtatatgtgttcatcttagcaatggtaataaattatttaatctcac

SEQ ID NO: 121200 - DNA, 1524 bp, Homo sapiens
  Payload ID: 3763
  Gene Symbol: CCDC85B
  Gene Name: coiled-coil domain containing 85B
  Uniprot ID: Q15834
  ENST ID: ENST00000312579
  CDS Start-End: 673-1281
ttgcacataaaaaacgtttattgaacaaacgaatcctgtatgttcctccccccaggcaggaaacgctccctgggagggagggtagtctattggtgagctaggacgtttggactcagggttccgaggaaccaggagcgatccttagtgggccgagacttccgaatttgatcaaaggtaaagagggactggagagcggtccatctgacttctgtgggggatgggcaggagtcaggggcggacgcctgaatcttgtttctcagaagagccgagaggcctaggctcaagcttggggcgatccggtacttggaggttcgaagctcctagtttcgggttgagaccgatgtggagggcgatgacgcgcgggttccttgacatcgaggatcagtaacacccggagtgggtggggaacgaggggggcggcccctgagctcaggccccgcccctttccggggacgtttcaccggattggctgtccttccataacgacatgcggccccgccccggcgcgcgccccgccgcgtgcccagcccgggtagctgctgcagcctacgctgcctcggccactgcctgccgcgtgcggagccggagcccgagcctgagtggcgccgggcccgacgtggggctcctgggccgcggcggcgggcgggcgatgctccagaggcctgaccagccatggaggccgaggcaggcggcctggaggagctgacggacgaggagatggcggcgctaggcaaggaagagctagtgcggcgcctgcggcgggaggaggcggcgcgcctggcggcactggtgcagcgcggccgcctcatgcaggaggtgaatcggcagctgcagggccacctgggcgagatccgcgagctcaagcagctcaaccggcgtctgcaggcagagaaccgtgagctgcgcgacctctgctgcttcctggactcggagcgccagcgcgggcggcgcgccgcacgccagtggcagctcttcgggacccaagcatcccgggccgtgcgcgaggacctgggcggctgttggcagaagctggccgagctggagggccgccaggaggagctgctgcgggagaacctagcgcttaaggagctctgcctggcgctgggcgaagaatggggcccccgcggcggccccagcggcgccgggggatcaggagccgggccagcacccgagcttgccttgcccccgtgcgggccccgcgacctaggcgatggaagctccagcactggcagcgtgggcagtccggatcagttgcccctggcctgttcccccgatgattgaaggcactgcttcctccacgccgacgcccgcccggattgctccccgagccccgggaccgctgtggacctcgggacctggacgccgtcctggctgcgcaggaggggccgctggcatggactaagaaatcctgacaccaagaagggcccctcgctcttgctggcagggcagcagggggactgaaggctggagcggagggacttgctgggggttggattgggggtaataaacccggacggaagcgga

SEQ ID NO: 121201 - DNA, 16393 bp, Homo sapiens
  Payload ID: 3764
  Gene Symbol: CCDC85C
  Gene Name: coiled-coil domain containing 85C
  Uniprot ID: A6NKD9
  ENST ID: ENST00000380243
  CDS Start-End: 68-1327
ggagccccggcgcggggaagcgccggccgggcgagggcgagggcgatgccgcggtgacggccccgccatggctaagcccgcggcgacggcggcggcggcgtcggaggagctgagccaggtgccggacgaggagctgctgcgctggagcaaggaggagctggcgcggcggctgcggcgcgccgagggcgagaaggtgggcctcatgctggagcacggcggcctgatgcgcgacgtgaaccggcggctgcagcagcacctgctggagatccgcggcctcaaggacgtgaaccagcggctgcaggacgacaaccaggagctgcgcgagctctgctgcttcctcgacgacgaccggcagaaggggcgcaagctggcgcgcgagtggcagcgcttcgggcgccacgcggccggcgccgtgtggcacgaggtggcccgctcgcagcagaagctgcgcgagctcgaggcgcgccaggaggccctgctgcgcgagaacctggagctcaaggagctggtgctgctgctggacgaggagcgcgcggcactggcggcgacgggggccgcaagcggtggcggcggcggcgggggcggcgccggctcccgcagctccatcgacagccaggccagcctgagcgggccgctgtcgggtggcgcgcccggcgcgggggcccgcgacgtgggcgacggcagcagtacgtccagcgcgggcagcggcggcagccccgaccaccaccaccacgtcccacccccgctgctgccccccgggccgcacaaggcccccgacggcaaggcaggagccacacgtcggtccctggacgacttgtcggcgccgccgcaccaccgcagcatccccaacggcctgcacgatccctcatccacctacatcaggcaactggagagcaaagtgaggctgctggagggtgacaagctcctcgcacagcaggcaggctccggagagttccgcacgctgcggaaaggcttctcgccctaccactcggagtcccagcttgcgtccctgccgccctcctaccaggactccctgcagaacggcccggcctgccccgcacctgagctgccctcgcccccctctgctggctacagccctgcaggacagaagcccgaggctgtcgtgcatgccatgaaggtcctggaggtacacgagaatctggaccggcagctccaggacagctgtgaggaggacctgagtgagaaggagaaggccatcgttcgcgagatgtgcaacgtggtctggagaaagctgggagatgcagccagctccaagccctccatacggcagcacctgtctgggaaccagttcaaggggcctttgtagggccactcttctgtggacgtggactggccctgctgggggtccccagggggagtttcaggccccagacacgggcaggacctccagcccagcccctgtcttcttcctctgtggtgaactgtacataggacgctgcccgccctggcccagctgccatgggtccgatgcactggcccaagccgccatctcccgcctcatacaccagcaacctgggaagacgagacgctgcgactgttcctgcagcagagcggcccggacgcctcattccccctctgggccctgggctccatgagcaagaggctgcaggctgcttctgagatccagcctgggaactgtccaggctcctctgtcctgcctgggatggaggggccactcatcaaaccctctactccccggctgccacccacactggacagagaccaccactacctgggtcttgacgcaggtggcaccacttcttgcccaaatgccgtggcctggccccaggccccccaagcactgggtccccggcatgtggacaaggccactcaccacatctgtggctggctggaggctgccctgggcccttcctgtgaccctcagccttggaggtcagggtgccctcacacctggggatctgtgctcagccacccgatgcccgctgctccttgcttttggaggtcatccccctcccccccagtctctgcaatgtccccctgccaccctgtccaggctatgcccttcttgggctcctcctgccccatgcctgaggcacgtcccttttcgtggtttacatgacaggccagtaacaggaagggcctggggagagtttctgggctgagccacatgtgattttcctgatgggcagcactgggccacagctggggctctggttggctgtgacctcccccagggcctggctgcatcttgggtccctgtggacagagctgtgtaggctgcagatgagagttctgttctttttgggaaggagcgtgtctggccaggttctgcctttagtttgtggtgtgacctttagcagttcactcagcctgtctgggctcttggtggaaacaggtctctgaggttccttttcggccatgcttatggctccaggtcatccagcgccacagggcaggggtcctcactgagggggcgtgagccaacagccgacggctgagggcgggccgggtggagctgagttctgctgccttgcagtcgctgcgggtggagagttgcctccccactctgagcccgtgtcctcagtagtaaaatgggcagcataaggccctcctcacaggattctggcatcaagtgagatcttcagtgtaaatgaccatgtataaactgtaaagtgcaatagaaaactgtgtgtgtgaggaaagtaaggcctagagggggtgatgtgtggcacatgacagggattttgatcccacagctgcagcacggggacaggccgcttccccacatccgctcatgccactgtaagcagccctagctcttgggtccaggacctcaccaggtcctcgtcagactcctgtgctcttccaggggctgctcagccccacctgaagagcccagagaggctgtcttcctacccagcaggtctcatgcaggcccagggctggggatgcaggcaagaggagggagatggccgccctgtccctctccctagctggcggctctattctgagcagttcttgctgcccgtttgctctcaggggaaaggctcacgccccccatcttagccccaggggggtaagtgggtgctggtgatgggatggtgtggcgctcctgccgtgggtgttgccaggaggctctttgggaaggagtgtcgcccggtcaggtggtgcgctcccggtcactaggggtgtacacgtgaagttgggtgaacacctgctgctcatggtacccagtgattcttgcccgagtgggcagctgagcagaggcccctctgggtcttgcagtccaaagaaccgcagagtagcccaagggctgtgggtccattttgagtggcagccaagtctgggagcccgtgtgcatcatgtttgggtcaggttggcgtggccaccactgaaataagcaataagtacgggctcctggtacctgcggatctcctgcaaacaggcccagagaacagccttgaagccacctttcccctcaaggggactgaccctgtctttaatgctgcagtggcatccagggatcagtggaacattgctttgagaaccctcctgctgttacggaggcagcacaaagctggtgacccctgagccaacacggcactgggatggctttctaggacagaaccctgtcggcgactgtcacatctcaaactaatagctgattttaaaagccagcagcagcgacgccatgtacctgagtacaggtggcagttgcagagccgtgggctgtagaaggtcagatggggcttcccacaggggaaatctgggcatgctgtagctcagggtgactcccagctccgtcactagcagggcgacccccttccttctggagccttagctctgaaagcccccagtgggggtgccctttcagatgccccctttccatttcaaaggctctgactcttgatcttgaagccggacgcggcactggcactcggcttcagtttccactgtgacagatggaggtctcctttcgccccagcccaggtggccaagcccatcctggcctcagaacatgctgagcacattttgtagggtggcacctttttatccaagttactagctacacatcagtgtttaaagagaaaaaagtgacctttcattttttttttcttgaaacttgaggaaacaagatacatactactgattttttttttttcttaaaactaaatgcatgactgcagagcggtagaggtgtatatttttcatactgtggggcaaagtatttgtgctgctttttggagatggactggaacgtctggtttctgtccccgggcccggcagctacgtctattttctgtagaaggtgccacagtgagacctggagccaccccttcctgccctggcgccgtttagagctgggagcccgtggactcccggcctgtttctaccttctattcaaccactctgacgtggggagacaagaagaaatagaactttttgatagtgtggtaaaaacattgatttgaactattttagtaaaaggagtaacaaacaagattgtgatagtgtctactttgagctagataaataaaggcctctttgtgagcctcctggctgggtgctcagtgcttgtttctgtcgtgggtggcagggtcagcaggcagagacagggccaaggcccctcaagcaccgcagatgggggctcagtcggggccccttccacagacagagccgtggcccctcaaggtggacagtgaggccgctgctcctccagctgcctctgtctcatcacaggccagaagtggaaagggtttcaaatccaagcccccgggttcctgtgtgcgttctacgcagcaaggcttcaaagtttcaaactggtttggaactcaaccaggtcctccaaaggaaaccaaggcaggcacaggatgggggcaggctggcttggcaggcagctgtgcggatccacccagagtgccttgggaggcagtggggttggctgtggctgctgtgagctgcagccaggcctctcccgcgtccccagggtctggaaggagggcctctgcacattttataagccacagactgcgaaggcctggagccccaccttccacccataacaaagaaagggatagtttcagaactgcttttatttggataactgactgaaggagtctcatttgtaaccaagatggaattcacagtatgttgttacattcacacttaaaaaatatatctctatgtacaggaatttgcaaagagatgtaaacatacattaatttccaagtacatttctccccttctccctggaggaaaaaaaaaaagccatccaatgaggcaaccccttcaaaataattttaatacaaaggatgcaaacatctataaatgaaaaatgtggttcttctgccccttctgggtgtcatgggagagaatgtcaccgaatgaaaatgacaacagcttggcttcagatggaattggactatttaaaattgagtttccaggaaaaataggcactgatttctagaaggaaattaactccttaccgaagctatttattgagccaatatggctggttaacgtcctcactagtataaagtaacccagtgcaggactctcagacattagctgaaccaagtgtacacagtcagactgcaagggcactgatgaggctactctgaaagctggttgtccccgtcctctaggtgtgaggaccactctgattttatcccaggggcccggtccattcttcccatactgcaactgtcgtgcattatacaaggtaccctgctgcttacccacttcaactactctgcaagtcgattagaaaatcttgttaaaaaaacaaagagggaaaaaaggctcacgttatctcatccaggctgcccgccccagccccccaactggaggcatgccgggtgggggaatgggcgggggcacaggaggctgtcctccaggggggacggcaggaggtgggtagctggctggcggcaggcccaaccctggaggaggatgaggggggactgcgtgggtaggcgggaggcgtgggggtgggggtgggaagttggggttgtaggtgggtgggggtggggggtagccaggagtagggggtgggatggcaggtggggggaaggaggctgggggaggaggcacaggtggcgggggcgggttgggcgggtagacatgggggtggtagggcaggtgtgcaggtgggccgtaggcggggggcagggcaccgtaggagggtccctcggtcttcatcatggactgcaggctctggtagccctctccagacatgtaggagctggtggtggacatcccggtcatgtagctggaggggggtgggggcgggggccggtgtggcagcggcggtggctggtgcacaggggccgggtgggccggagggggaatctggactttggggaggtcagtggcatccacagggcccggcggctcagcctcacctaaggcagcagcgaggggaggcttccggtctgcaggagagagacgcatcagtgcccggcctccgccagcaatggttgctttttcagtgcctcctggcccttcagggccatctttacagaggagcagggagcagctgcccgcctcctctgtggcccaacgcatgggcccatgccccatgtcctgatgccaccagatgtctccccaccatctgtcaagaaggccctccaccctgtctgcgacgacctggggttttccctccctcagccctgaccacaccacctacaggcagtctcggcagcacccgaagcccccttgtgccctggccccagccccctcttcctagtgcaaaacgtgtgggggctcctctgtttttctgccttcagaaactgaccccaggggtcagggccacactgaactcctgtctgcagcagtggcattttgcagaaaacctcagagttagtcaaatgaatgtgatggcacttaaaacaattctgtacaagtctctgacattcccggtgtacccatcgaagcagcaattcaggttctattctactcaagagaggctacatcaaaccccactgtgtgctctcagatagcagcctccttgagaggagtgtgtgcatgtgtgtgcgtgtgcgtgctgcgtgcgtgctgcatgtctgtgcgtgctgcgtgtgtgtgcgtgctgcgtgtgcagcagggacaggcagcactaggtgttgagcacgcccaagatactcgtgctcagaaccagcctcaggcccctcccacagcgcctcccaacccatgagccctcacgcccccttctgccaaagccttatttaacatgttttggcctgtgatcccgggtcaccgtcagaccactggaaaatgacatcgcaacaccccaccacaggtagccaaacacacagaatgagtgtcctttcccaaggcagcccaggagacagaccacaggagcaacatttctggttccagagaacatagagaggacaaagccacgaagatgcttctggttccccaggcacttgggttaggcaaggcacagcacgacatcctggttgggtagacgtggccattggcacacaacccgtttgatcttgccaaagcgagcatgagcaggatttcatcaggtcggtaacaggtgtgccactggtgtgccacatcagcaccccgccagcctaccgggtaggaaggtcatatgtgcctggccttagataactggctttggctccaggtcagggccagatgccctgtggttctaggagctgactaaaaaagaggtgcagaaaagtgctgacacccttcaatgcctcctgtgtgtcactccacagccacctgggcccacaggcctgctcctccaccttgcagaaatcaacttttccaacactcgaccctgtagcctgaatcttcaagtcaccagtgtgcctgcccttgtgctgtgtgactgagctggaacagcaagtgggggtctctcctgggcaccccattccctctctgtacacttgctcctgaccaagtcccacacactgccaccaaactgctccctaaacatcactgctgacctgaatgcctcttcccatggcctagggcctcccaggaagcgtacttccctcccttcctcacggcccagctttactgcgcctcccaggccctgctctcttcagccatggcctcctggcagtgtatctggcacccaggtcccactcaagtcccaggcctactcctggctatctgtaatgggggagggagcagagctctgaggcctccacagcagctactcagtgccctggaggtagcagcacccctgtggctgccccaggctccccagataaaccacccatctcctcagtgaaggcacagccccaggctcggaccaggggaactgcacttggcgaggaggtgctccataaatgcttcatgagcaaccacaggcatttaagtaaggttcatattgaattgggggttttgggatttggccccaaagtggaaaatgacgcctctgttctcccaaagcacaaacactatcatgattgagtaggaacagaaatgtaatctgtggcacatctgttacgggcacacagtgctgtcagccccagtgtgagccacgtgcaccgaccaacagtgagtgtagcaggctggaggagctgctgacagaggcttggaagcctccggagtatcgaccaccttttggagagcaagcacaggtcactctggccttctctagcgcatcaccttctgaaatggtgccacaggtaaagaatgccatctactttacagcttttctcctctattgccagcggtatcagagaggctttccagcttaccatgtactacttgttgagaacttttcactctttcatttactctctgtacaattgcttattcttcagaatgcactaagacgacacactgccaataggaagcaggtgtaggggcggccggagcctagtagccacagtaaccctgcctctatctcagaaggcggggtttggctttctttcctaaaactgattctaatacaatgtgtagtttagcatttctggatgtgagaggtcggaaaatattcagatatacttaacaatttacaacattctcaaaatacctggtcaaaatcagaactttgagacacggtctccctctcacccaggctggagtacggtggtgcaatcatagctcactgcagccttgactgcccagggctcaaatgatcttcccatctcagactcctaagtagttgggactacaggtgtgtgctaccacacctggctaattttttagacagggtctcactttgttgcccaggctgacctcgaactcctggggtcaggtgattctcctgcctccgcctcccaaagtgctgggatcaaaaacacaagccattgtgcccagcccaagaacaattttgcaaagattcctgcctgtggctgacattgtcaatctgggccccagtctcccttttctaagttcccaggacctgctgcgtccaacattcagaggcgatgtgcacagctggccaagctgcttcagcagatgcttacctggaggtgggtgggctggaggcaacggtggatgagtggtctcaattttggggattttaggtggtggtggttctacaaagaaaaagcagattagaaaaccactcatacttcttcacatgaataagcatgtcataaagaaaaatgtactggcagagatttctttgggagaaaaacaacagagatgaccaaggctttaagggaacttgaagaaggtttcagctaaaccattatgcatgaatcctgttaacaaattaaatgccacctccctccaaaagacctgcgagcttcccacaggcagcccattttccatgtctacctaagtttccttgctgaccacttcactcaagtccttccgaccatgtgagaccagcagagcaacgtcttcatgagcatgtatgacctatctggagtcctccctggtacagaggacacaaagaagggtccagagtagcaacatcatgtcactgagtcccctgagggttccacaagagaatctctatcttttcattcttagacatagtttattctctctttcccaaatactgacttccagttggcagcatgtcagaagcagcacattaactggagtcagcagagctctggaggttgacacactgatggcaggaagaatgtgccgctcacaaaagcccagcagtcaggaccccttgaggtggaggaaacagcccacccttccggggtcaggcagcggcacgcagccagaatccacaatgacagcactaggtctccaaggcagcccaagggaagtccaatctcatccgtttaagaaggcagcgtgcacatcacaactgaaaaagaaccctatttttctgtttgcatgctgaggctttttcttcctgaaatgtactttcttctggcttgtacaccactcagatctgagtctcctctgccatcactggcctctttctctggatttcctccatctcaaatacaggctcaatttaagttccagggacttcctctctcttcaccctcttcctcagagtccaaagcccctctctaagtggacaactacaaacctacatttctagcgtccatcttgccaccaaaaccatggcccatccctagacccaccaatcagcacctcacactctaccttttgcctctgtatcctataactgctattactctcacctcagggacccacctcctgcctttttccacagctggtaatagttagctaaagccgtctacatcagggctgtccaacagcaatataactgagagccacatatctacaattttaaactttccaggagccattttattttttgagacagggtctcgctctgtcacccaggctggagtgtagtaatgtaatcatggctcactgcagcttcaaccaaccaggctcaagtgatcttgctgcctgagtctcccaagtagctgggaccataggtgtggcgccaccacgccgagctgatttttaagttttgtgtagtgatggggtcaccctatgtggcccagtctggcctggaactcctgggctcaaagcatgccttggcctcccaaagtgctgggattacaagtgtgccaggaaccactttaacaagaaaaaggagcactccagcctgcattaacagagcaagactctggaaataaaaggaaaaaggataaaatttatttaacccgatagatcgaaaattttatttcaacatgtaaccaatataaagctttactaatgagatgtcttacgttctcctttcttggaaatctctgtgtattttgcattgtcagtgcttcagaatttgacccagtcacatttcgagtgcttgcagccctctgcagccagtagccttcggcatggcacagtgcagctgagttcctctataaagcttcctccggatctgcccttcctgccccgcagccagcatgctgaggccaccatgtttcccatgagtgccagcaagattctccccattcctaaccacttgccctatttactgctgccaggggactccttctcaaatgaatttagactctgccattcccctgctaaatctccaatggcttcccttgcctctgccaaactcacagtcctccaggtaaactctgtgatctggtcctaacccacattttagatcctatcagaagctattgcctttcaattcatcacattccagaaagactcctctccatttcccctgattctcaattcctttgctcacttgcgtacttccaacttattgctccatcctccccctctgctctcgctgctcaaatgcaactcttccttcaaggtcatatatagtttgtttcctgcctctgacagacctgcacgtcaactcaattgcatttcatgtggcatggagtgtagcccgttcttgtgtctaacatttaatgtcggtcaatttgaagctaattaaaaaattcacctgtaggctgggcacggtggctcatgcctgtaatcgcagcactttgggaggctggggcgagcagatcacctgaggtcgggagtttgacacctgcctgaccaacatggagaaaccctgtctctactaaaaatacaaaattagccaggcctggtggtgcatgcctgtaatcccagctactcgggaggctgaggcaggagaattgcttgaacccaggaggcggaggttgtggtgagttaagattgcaccgctgcactccagcctgggcaacaagagtgaaactctgtctcaaaaaaaaaaaaaaaattcacctgtactgaactcatcattccctcaaatatactggaaaaaaaaaaaaagtagctctatcataactggaagatttcacagcagtttaatgaatggaactaagaaccgagaacatggttctaagaaccaggaactactggaactaagaaccaagtaacaaagaaagacaaatgagtcaatagggtctgtgccttcaaagagttcagtatgataggtggactgaccctgtgacaaaacatttctaactttctgttttgtaattgttccaattttgctcactccttctgtttatttccaatattgacatgaactaactttgggttctagacatgtgacagcacctcaacccaagtgtgtttcaaagaggccttgcctgcaagggcagctgggctgggccgggctggtgctgtccgggcagcacaccaccccctactgcccccccgcatctgctgtggcttggtgcttgggagaggactcctgctgctgtgatgggggtaaatagtctctaaaaataaaattgcagcaacagttctcctacagccataattatacttttatatatgttactgagtacatttttattgccagtaatgttttctgtactgatagcttcgtaagagcacaattttagaatctatgatcaggtgatgaacagaaagacaatgctgatggaaaagttttgtatgagctctaaagttaagatttaaggccaatttagatctgaaaagaaacaatgttggctaagaatttaaagttttgcatataaacacataaaactaaaaaaacatcagaacaggaaattacctgctgctttgttctcttctttgggagaaacaacctgttacaaaagaaaatacacaattgttaactgggatcctgagtatgatgagaaaaaaatggattatccaggtaccaccagaatcagcgacggcagtcactgtgaacagcctcggacaaaaattatttctagcctgaactttcagggcaaaccacggcacctaccagatcatcatttctgctcccttcctctttccatttaccaaataagacagaatgactagctttcctgaatggtgagttctgagtaaacactaagtttcaggaccacttgggtgcaggaaacggtccactgtttggggtcaggcagctgcacagaagcagcatgcacaacgacactgctaggacacggcaacgacaccgacaggcttcagaaccctggcagggatgaaacaggcagcagggctggagccgggcagagagccccctcctggttctcagaggcagcctgtccttggagcacctttgttttcaggctccccaccgacaagcagtcggactgcgagtttcggcgaacaccccctgcttccggtgttccctgtgctcgcttagaaatgggaacagtgctcaggtgttgccgccacctggaaagcctgctctacccagggcctgctttagcccactcaccacggctcgcttaacctgtcggggagaactgggctgcggagagggtttcttgggctgttgggctggctgctgctgctgggctggttgctgggggtccttctgctggggctgggatggttcggagctttgagacggctgtgactgctgtacttgcggcacttgtggtgtaggctgaagagatgggggctgttgcagctgatggggggtgtgatgaggcatctgttgttttccttgtgagtaaagatccaggatttggtggcagatgtctaaatgatagccaacaattacattttacacaaattggtattttaaataaaattttacctggataaagaatcagttatgatacccctacgaggacctaagcatgaatcacatttacaactcaccccatcttcgttgtgtgcaacactggtgtgtatttttagtttaccaaaagtatgtgtttggacaaagtggaaactattagataatttaattaatgatgcttctgaaatattgctcacatatgtctatctgggaaaatccattcttgggactcagggtacacatggaagaatcatctcaacatggaacaccctcacgagaacgcttagcatgcctggtaccttccaaaacgtcgaccgggacatcttgaacaaactgctcccaccatctcctatacatgggtttggaggtccattcttgtatttcaaatttgcacaaacgtcctgcgagatacatcactgctactgctatgatctctggttcccactgcagtgacaaggtggtgcagagactagttcaacaagaaaaaaaaaggttagataatatgatctaatatttatgattaaaccagtgcatggagatgccataactaaccattaatttgcttattctcccctaaatttaattaaagtactataaataaataaactcaagtctttactcttctaaaggtacccgactaagttactttaaccatagttagtaatttctctattccttaaagaatcagaagaattctagcacatccaaaaattgctacaccaatgaaaatgacttatgttatttaaactgttgaaatcctagccactcaactgtttcttcaaatgaaatcttatggaggaagtcaaatgtaagagaagcttcactgactgcagtgggatggggctggcagcaactccattcacaggcattctgtttcccaccacggcccctcattagatccctggcctctcaaaagagtgttaaggctctaaaactataccaggaagtatatttttgcaaaaccaaatgggctctaagtaattagttttcaaaattctccagtgtattgttttggacttatgtttcagactggtgataaaatttcagcacctcacaacaccatgacacggcagggcagaaggaaaccctctgccgggaagcagatgacctggacgtcagccccagctttgccattaactggctcctcaagccagggcaagtcagtttcttctgacacaaaatgaggggtttagatgaaatggtccataaagtctctgcctattttaaaatactgtaattaatcaacatttgaacatgtatacctgtcatttacaaatgtccatgccatttgaaccaacttttgaattttgtttttatcacctagaaatggggacaaaaaggtaaattaatagcaatagaaaaattcacaggcagcatcaagtatttattaaaaacctaccacgtgttcagcaccactcaaatacacagcaaagagcttttgcgtgggaaacaaggatgaatgatgtgggtccacatcctaccccttcttcctcctcatgacctacgctgaaccaccatgtatggaaaacctggctccaaggctaagtttattagtccatttaaaaaattctgcctcattttcctgcctctcccatcacttggcaactggatgacagagcctgtttatacataaaaggaaacagcattagcagctgcaatgctgaattgactgagcaagccatgcccttggtatttcacacatcaaactttgttttccgcttttgagaagcgtaatttgagtgtcatcaaattataaagacttgatttcagaatgaaaaaattcttctgaaaactttcttcttacctttgagttgctttgcatattttagtaggaactggtatggatgttctacctgtaaatcaaacttgatggtctgcagtaagattctctccagaaccattacttcctcctaaaaatcaatcacaaatgttaggacagtaattacaattgcaggtctcaagcagcattacaaaagtgagctttcctgtctatttattctctcttcaagttatattttagcaactgcctttccttcctttctctcccactcagacttttaacatgctcagagacactgataaattctgaaaagatctcaaacaggaagacaaagcagaggtgtaatgtaaaaaaaaatactgaaaacaaaagatccttaaaaatattattattttcaatacatacatgagtctccctttacaaaacagatctttacgttattgataatttgactaaattgtaatttctttcaagacctcaaattttaaaaatgcaatcttttaggaattttcattgaaaacattttaagcaagaaagagtttatgatagccagcctcatgaaaactcagagataaattgtaccagtgtgtgtgtatgtgtgtgtatatatactcatgtacacatatagtgtattacgtgcaaatgggggcaaatcaattttgtgtttaaatctttcatttatttgaaataaatcatcccaacaacacttactgaat

SEQ ID NO: 121202 - DNA, 930 bp, Homo sapiens
  Payload ID: 3764
  Gene Symbol: CCDC85C
  Gene Name: coiled-coil domain containing 85C
  ENST ID: ENST00000555822
  CDS Start-End: 577-771
attcattctggctcctggtcccagccccagccccaaattctgggggtcggtggtgtttgctttgctcttaagcaaagggtctaaggccaagccttcctccctccctcctgtgtgcaggagttagttacaaccccacagcttgcacgagttctcagggattcagaggcagcacccaggacctgctttaggagctccctgcccatccgatgggggaggcagcctgggcggagcatcccgagagagccccgaacccgtgggaggtgggaggcctcgcctgtggatgtggccccatctgctgccgatggctggcccaggccctgtgagtggtgccgtctgtgcagggacccaagggcaggaagttggagcggaggagccaggcaggcaggctccggagagttccgcacgctgcggaaaggcttctcgccctaccactcggagtcccagcttgcgtccctgccgccctcctaccaggactccctgcagaacggcccggcctgccccgcacctgagctgccctcgcccccctctgctggctacagccctgcaggacagaagcccgaggctgtcgtgcatgccatgaaggtcctggaggtacacgagaatctggaccggcagctccaggacagctgtgaggaggacctgagtgagaaggagaaggccatcgttcgcgagatgtgcaacgtggtctggagaaagctgggagatgcagccagctccaagccctccatacggcagcacctgtctgggaaccagttcaaggggcctttgtagggccactcttctgtggacgtggactggccctgctgggggtccccagggggagtttcaggccccagacacgggcaggacctccagcccagcccctgtcttcttcctctgtggtgaactgtacataggacgctgcccgccctggcccagctgccatgggtc

SEQ ID NO: 121203 - DNA, 3793 bp, Homo sapiens
  Payload ID: 3764
  Gene Symbol: CCDC85C
  Gene Name: coiled-coil domain containing 85C
  ENST ID: ENST00000557769
  CDS Start-End: 385-579
gtcacggggtgggagagacactctctcctcactcgctctcactggctcttcttcattcattcattcattctgtttattcagccatccaacaaatgtttacaaagcccacgttggagagtggatcgctgacatttgagctggggagagtgaagatcgattgatcccggctcgggggatggataagcgcaggcaggctccggagagttccgcacgctgcggaaaggcttctcgccctaccactcggagtcccagcttgcgtccctgccgccctcctaccaggactccctgcagaacggcccggcctgccccgcacctgagctgccctcgcccccctctgctggctacagccctgcaggacagaagcccgaggctgtcgtgcatgccatgaaggtcctggaggtacacgagaatctggaccggcagctccaggacagctgtgaggaggacctgagtgagaaggagaaggccatcgttcgcgagatgtgcaacgtggtctggagaaagctgggagatgcagccagctccaagccctccatacggcagcacctgtctgggaaccagttcaaggggcctttgtagggccactcttctgtggacgtggactggccctgctgggggtccccagggggagtttcaggccccagacacgggcaggacctccagcccagcccctgtcttcttcctctgtggtgaactgtacataggacgctgcccgccctggcccagctgccatgggtccgatgcactggcccaagccgccatctcccgcctcatacaccagcaacctgggaagacgagacgctgcgactgttcctgcagcagagcggcccggacgcctcattccccctctgggccctgggctccatgagcaagaggctgcaggctgcttctgagatccagcctgggaactgtccaggctcctctgtcctgcctgggatggaggggccactcatcaaaccctctactccccggctgccacccacactggacagagaccaccactacctgggtcttgacgcaggtggcaccacttcttgcccaaatgccgtggcctggccccaggccccccaagcactgggtccccggcatgtggacaaggccactcaccacatctgtggctggctggaggctgccctgggcccttcctgtgaccctcagccttggaggtcagggtgccctcacacctggggatctgtgctcagccacccgatgcccgctgctccttgcttttggaggtcatccccctcccccccagtctctgcaatgtccccctgccaccctgtccaggctatgcccttcttgggctcctcctgccccatgcctgaggcacgtcccttttcgtggtttacatgacaggccagtaacaggaagggcctggggagagtttctgggctgagccacatgtgattttcctgatgggcagcactgggccacagctggggctctggttggctgtgacctcccccagggcctggctgcatcttgggtccctgtggacagagctgtgtaggctgcagatgagagttctgttctttttgggaaggagcgtgtctggccaggttctgcctttagtttgtggtgtgacctttagcagttcactcagcctgtctgggctcttggtggaaacaggtctctgaggttccttttcggccatgcttatggctccaggtcatccagcgccacagggcaggggtcctcactgagggggcgtgagccaacagccgacggctgagggcgggccgggtggagctgagttctgctgccttgcagtcgctgcgggtggagagttgcctccccactctgagcccgtgtcctcagtagtaaaatgggcagcataaggccctcctcacaggattctggcatcaagtgagatcttcagtgtaaatgaccatgtataaactgtaaagtgcaatagaaaactgtgtgtgtgaggaaagtaaggcctagagggggtgatgtgtggcacatgacagggattttgatcccacagctgcagcacggggacaggccgcttccccacatccgctcatgccactgtaagcagccctagctcttgggtccaggacctcaccaggtcctcgtcagactcctgtgctcttccaggggctgctcagccccacctgaagagcccagagaggctgtcttcctacccagcaggtctcatgcaggcccagggctggggatgcaggcaagaggagggagatggccgccctgtccctctccctagctggcggctctattctgagcagttcttgctgcccgtttgctctcaggggaaaggctcacgccccccatcttagccccaggggggtaagtgggtgctggtgatgggatggtgtggcgctcctgccgtgggtgttgccaggaggctctttgggaaggagtgtcgcccggtcaggtggtgcgctcccggtcactaggggtgtacacgtgaagttgggtgaacacctgctgctcatggtacccagtgattcttgcccgagtgggcagctgagcagaggcccctctgggtcttgcagtccaaagaaccgcagagtagcccaagggctgtgggtccattttgagtggcagccaagtctgggagcccgtgtgcatcatgtttgggtcaggttggcgtggccaccactgaaataagcaataagtacgggctcctggtacctgcggatctcctgcaaacaggcccagagaacagccttgaagccacctttcccctcaaggggactgaccctgtctttaatgctgcagtggcatccagggatcagtggaacattgctttgagaaccctcctgctgttacggaggcagcacaaagctggtgacccctgagccaacacggcactgggatggctttctaggacagaaccctgtcggcgactgtcacatctcaaactaatagctgattttaaaagccagcagcagcgacgccatgtacctgagtacaggtggcagttgcagagccgtgggctgtagaaggtcagatggggcttcccacaggggaaatctgggcatgctgtagctcagggtgactcccagctccgtcactagcagggcgacccccttccttctggagccttagctctgaaagcccccagtgggggtgccctttcagatgccccctttccatttcaaaggctctgactcttgatcttgaagccggacgcggcactggcactcggcttcagtttccactgtgacagatggaggtctcctttcgccccagcccaggtggccaagcccatcctggcctcagaacatgctgagcacattttgtagggtggcacctttttatccaagttactagctacacatcagtgtttaaagagaaaaaagtgacctttcattttttttttcttgaaacttgaggaaacaagatacatactactgattttttttttttcttaaaactaaatgcatgactgcagagcggtagaggtgtatatttttcatactgtggggcaaagtatttgtgctgctttttggagatggactggaacgtctggtttctgtccccgggcccggcagctacgtctattttctgtagaaggtgccacagtgagacctggagccaccccttcctgccctggcgccgtttagagctgggagcccgtggactcccggcctgtttctaccttctattcaaccactctgacgtggggagacaagaagaaatagaactttttgatagtgtggtaaaaacattgatttgaactattttagtaaaaggagtaacaaacaagattgtgatagtgtctactttgagctagataaataaaggcctctttgtgagcctcctg

SEQ ID NO: 121204 - DNA, 619 bp, Homo sapiens
  Payload ID: 3764
  Gene Symbol: CCDC85C
  Gene Name: coiled-coil domain containing 85C
  ENST ID: ENST00000554996
  CDS Start-End: 1-573
agcagctccagccactttgctgaccgaattcctggaaggtgtctactgtttaggaatgtgagaccaagaggaaggggccagccctgcccatgtgactcactccgggatccctcatccacctacatcaggcaactggagagcaaagtgaggctgctggagggtgacaagctcctcgcacagcaggcaggctccggagagttccgcacgctgcggaaaggcttctcgccctaccactcggagtcccagcttgcgtccctgccgccctcctaccaggactccctgcagaacggcccggcctgccccgcacctgagctgccctcgcccccctctgctggctacagccctgcaggacagaagcccgaggctgtcgtgcatgccatgaaggtcctggaggtacacgagaatctggaccggcagctccaggacagctgtgaggaggacctgagtgagaaggagaaggccatcgttcgcgagatgtgcaacgtggtctggagaaagctgggagatgcagccagctccaagccctccatacggcagcacctgtctgggaaccagttcaaggggcctttgtagggccactcttctgtggacgtggactggccctgctgggggtccccag

SEQ ID NO: 121205 - DNA, 556 bp, Homo sapiens
  Payload ID: 3764
  Gene Symbol: CCDC85C
  Gene Name: coiled-coil domain containing 85C
  ENST ID: ENST00000556348
  CDS Start-End: 208-556
gctgccatcctatcttgtaggaggcgaaggcagggctcagagctaagagaaggcgctgcctcaggtccgtgcctcccaccctgcctgggacttgggcagacattccttccttagccgtttactgagcacctgttgcacaccaggccccgtttccatgctcctgggatacttccatgaagcaagacagacagaagtctcctttggaagatggataaactggcaaacaaatccatggatgggacagtttcatatcctgatccctcatccacctacatcaggcaactggagagcaaagtgaggctgctggagggtgacaagctcctcgcacagcaggcaggctccggagagttccgcacgctgcggaaaggcttctcgccctaccactcggagtcccagcttgcgtccctgccgccctcctaccaggactccctgcagaacggcccggcctgccccgcacctgagctgccctcgcccccctctgctggctacagccctgcaggacagaagcccgaggctgtcgtgcatgccatgaaggtcctggaggtacacgagaatc

SEQ ID NO: 121206 - DNA, 543 bp, Homo sapiens
  Payload ID: 3764
  Gene Symbol: CCDC85C
  Gene Name: coiled-coil domain containing 85C
  ENST ID: ENST00000554877
  CDS Start-End: 403-543
atccctgtgtggactccctgggcctcacaggttctcagctaagctgctggaccagcgaggcaggtcccactggtgtggttcatgagaagtgcgtggacagcaccatcctgtgctgggaggtgacagacagatccctcatccacctacatcaggcaactggagagcaaagtgaggctgctggagggtgacaagctcctcgcacagcaggcaggctccggagagttccgcacgctgcggaaaggcttctcgccctaccactcggagtcccagcttgcgtccctgccgccctcctaccaggactccctgcagaacggcccggcctgccccgcacctgagctgccctcgcccccctctgctggctacagccctgcaggacagaagcccgaggctgtcgtgcatgccatgaaggtcctggaggtacacgagaatctggaccggcagctccaggacagctgtgaggaggacctgagtgagaaggagaaggccatcgttcgcgagatgtgcaacgtggtctggagaaagctgggagatgcagccagctcc

SEQ ID NO: 121207 - DNA, 656 bp, Homo sapiens
  Payload ID: 3764
  Gene Symbol: CCDC85C
  Gene Name: coiled-coil domain containing 85C
  ENST ID: ENST00000557576
  CDS Start-End: 1-371
atccctcatccacctacatcaggcaactggagagcaaagtgaggctgctggagggtgacaagctcctcgcacagcaggcaggctccggagagttccgcacgctgcggaaaggcttctcgccctaccactcggagtcccagcttgcgtccctgccgccctcctaccaggactccctgcagaacgtcctggaggtacacgagaatctggaccggcagctccaggacagctgtgaggaggacctgagtgagaaggagaaggccatcgttcgcgagatgtgcaacgtggtctggagaaagctgggagatgcagccagctccaagccctccatacggcagcacctgtctgggaaccagttcaaggggcctttgtagggccactcttctgtggacgtggactggccctgctgggggtccccagggggagtttcaggccccagacacgggcaggacctccagcccagcccctgtcttcttcctctgtggtgaactgtacataggacgctgcccgccctggcccagctgccatgggtccgatgcactggcccaagccgccatctcccgcctcatacaccagcaacctgggaagacgagacgctgcgactgttcctgcagcagagcggcccggacgcctcattccccctctgggccctgggctcc

SEQ ID NO: 121208 - DNA, 1893 bp, Homo sapiens
  Payload ID: 3765
  Gene Symbol: CCDC86
  Gene Name: coiled-coil domain containing 86
  Uniprot ID: Q9H6F5
  ENST ID: ENST00000227520
  CDS Start-End: 55-1137
ggtttcggcgggggctgcacgtgcgcaggggtgtggaaacttaccggctgagccatggatacaccgttaaggcgcagccgacggctgggaggcctaaggcccgaatcccccgagagcctcacctcagtttcgcggacgagacgggcccttgtggagttcgagtcgaacccagaagaaacgagggagcccgggtctcctccgagtgtgcagcgggctggcctggggtcccccgaaaggccgccgaagacaagcccaggatcaccccgtctgcagcagggtgcaggcttggagtcaccccaagggcagccagagccaggcgcagcgtccccccagcgtcagcaagacctacacctggagtcgcctcaaagacagccagagtacagtcctgaatccccacgatgtcagccgaagccaagtgaggaggcaccaaagtgttctcaggaccagggagtactggcctcggagttggcccagaataaggaggagctgaccccgggggccccccagcatcagctaccgccggtcccaggatcaccagagccttaccccggtcagcaagctcccggtccggagccctctcagccactactggagctgacacccagggcacctggctccccccggggtcagcatgagccgagcaagccacctccagctggggagacggtgacaggcggcttcggggcaaagaagcgaaaaggttcttcatcccaggccccagcgtccaagaagttgaataaagaggagcttcctgtaatcccgaaggggaagcccaaatcggggcgagtgtggaaggaccgctccaagaaaagattctcccagatgcttcaggacaagcccctgcgcacatcgtggcagcggaagatgaaggaacgacaggagaggaagctggccaaggactttgcccgtcacctggaggaggagaaggagaggcgccgccaggagaagaaacagcgccgggctgagaacctgaaacgccgcctggagaatgagcggaaggcagaggtcgtccaagtgatccgaaaccccgccaagctcaagcgggcaaagaagaagcagctgcgctccattgagaagcgggacaccctggccctgctgcagaagcagccgccccagcagccggcagccaagatctgagctcaggacggcccgaggccttccatggccaacaaccatgtcagacacagcacctcaggccgctgctcagatgcctctgctggagctggcactccaaacccatggctccagaacagggacccccaccccgaccggggctcctcggcctttgaaggcttccaggcaggtctgtgtgggacagaagcccagagggggcctgggacctggcagagatgggggcgggaagagattcagctcccatccctccttcctctccttctccaagtgccttcaaaccaagaactgtacattcttctggttcctcagtgagctggtgactggcaggtgactccctcagcagtgtatgccctttctcagcatcctaggtccatcccaggcctggaggctgacagttgggaatccagcttcccccacaccttcccaaaggctgctctgagcacctccacaccccactgcctctgtccccagcagactgaatccggttcctctccacttttcaatactgaaagattaaaatggggaggttgcagggagcagagcttttccctagcacccactttcccaaaccagtctctgcagaagccccagagaatctaactcatgcctgtccagtctacagcaaaaatatttattgagtgcctgttgcatacaggcacaatcctaggcaccggcaaatacagacaatagaccaaagtccctgccctcgaggagctttcattctgatggagagaaaacataataaacaagcaaaatgca

SEQ ID NO: 121209 - DNA, 697 bp, Homo sapiens
  Payload ID: 3765
  Gene Symbol: CCDC86
  Gene Name: coiled-coil domain containing 86
  Uniprot ID: Q9H6F5
  ENST ID: ENST00000545580
  CDS Start-End: 162-476
ggccacctccctagggggtgagcgccccgcctccagaggcattcacacccgggccaaatgcacttggcggaagcaacagaactttacagcaggggccgcgtagcctggactctgcagtcgctgacaggattcaagtcctgactgccacaagattctcccagatgcttcaggacaagcccctgcgcacatcgtggcagcggaagatgaaggaacgacaggagaggaagctggccaaggactttgcccgtcacctggaggaggagaaggagaggcgccgccaggagaagaaacagcgccgggctgagaacctgaaacgccgcctggagaatgagcggaaggcagaggtcgtccaagtgatccgaaaccccgccaagctcaagcgggcaaagaagaagcagctgcgctccattgagaagcgggacaccctggccctgctgcagaagcagccgccccagcagccggcagccaagatctgagctcaggacggcccgaggccttccatggccaacaaccatgtcagacacagcacctcaggccgctgctcagatgcctctgctggagctggcactccaaacccatggctccagaacagggacccccaccccgaccggggctcctcggcctttgaaggcttccaggcaggtctgtgtgggacagaagcccagagggggcctgggacctggcagagatgggggcg

SEQ ID NO: 121210 - DNA, 1488 bp, Homo sapiens
  Payload ID: 3765
  Gene Symbol: CCDC86
  Gene Name: coiled-coil domain containing 86
  ENST ID: ENST00000535217
  CDS Start-End: 1-265
cagccgacggctgggaggcctaaggcccgaatcccccgagagcctcacctcagtttcgcggacgagacgggcccttgtggagttcgagtcgaacccagaagaaacgagggagcccgggtctcctccgagtgtgcagcgggctggcctggggtcccccgaaaggccgccgaagacaagcccaggatcaccccgtctgcagcagggtgcaggcttggagtcaccccaagggcagccagagccaggcgcagcgtccccccagccatgagccgagcaagccacctccagctggggagacggtgacaggcggcttcggggcaaagaagcgaaaaggttcttcatcccaggccccagcgtccaagaagttgaataaagaggagcttcctgtaatcccgaaggggaagcccaaatcggggcgagtgtggaaggaccgctccaagaaaagattctcccagatgcttcaggacaagcccctgcgcacatcgtggcagcggaagatgaaggaacgacaggagaggaagctggccaaggactttgcccgtcacctggaggaggagaaggagaggcgccgccaggagaagaaacagcgccgggctgagaacctgaaacgccgcctggagaatgagcggaaggcagaggtcgtccaagtgatccgaaaccccgccaagctcaagcgggcaaagaagaagcagctgcgctccattgagaagcgggacaccctggccctgctgcagaagcagccgccccagcagccggcagccaagatctgagctcaggacggcccgaggccttccatggccaacaaccatgtcagacacagcacctcaggccgctgctcagatgcctctgctggagctggcactccaaacccatggctccagaacagggacccccaccccgaccggggctcctcggcctttgaaggcttccaggcaggtctgtgtgggacagaagcccagagggggcctgggacctggcagagatgggggcgggaagagattcagctcccatccctccttcctctccttctccaagtgccttcaaaccaagaactgtacattcttctggttcctcagtgagctggtgactggcaggtgactccctcagcagtgtatgccctttctcagcatcctaggtccatcccaggcctggaggctgacagttgggaatccagcttcccccacaccttcccaaaggctgctctgagcacctccacaccccactgcctctgtccccagcagactgaatccggttcctctccacttttcaatactgaaagattaaaatggggaggttgcagggagcagagcttttccctagcacccactttcccaaaccagtctctgcagaagccccagagaatctaactcatgcctgtccagtctacagcaaaaatatttattgagtgcctgttgcatacaggcacaatcctaggcaccggcaaatacagacaatagaccaaagtccctgccctcgaggagctttcattct

SEQ ID NO: 121211 - DNA, 2908 bp, Homo sapiens
  Payload ID: 3766
  Gene Symbol: CCDC87
  Gene Name: coiled-coil domain containing 87
  Uniprot ID: Q9NVE4
  ENST ID: ENST00000333861
  CDS Start-End: 69-2618
gtcgggctcctggttgccttagtaacccctcggctttctgttcctggacggtggcggccgccggctctatgatggagcccccgaagcccgagcctgagctccagcggttttaccaccggctgctgcgtccgctgtcgctcttccccactaggacgacgtccccagagcctcagaagcgccccccgcaggagggccggattctgcagtccttccctctggcgaagctgacggtggcgtcgctgtgcagccaggtggccaagctgctggccggcagcgggatagcagcgggagtgcctcctgaggcccgactacgtctcatcaaggtcatcctggacgagctgaagtgcagctggcgggagccgcccgccgaacttagtctgagccacaaaaacaaccagaagctgcggaagcggctcgaggcctacgtgctgctgagcagcgagcagctcttcttgcgctacctgcacctgctggtgaccatgtcgactcccaggggggtcttcactgaatcagccaccctcacccggttggccgccagcctcgccagggactgcacactcttccttactagtcccaacgtctaccgtggcctgcttgccgacttccaggccctgctgagggcagagcaggcctctggggatgtggacaagctgcaccctgtctgccccgctgggacgttcaagctgtgccctatcccctggcctcacagcactggcttcgcccaagtgcagtgctctaacctcaacctgaactacctcatccaactcagccgtccaccagagtttctcaatgagccaggaaggatggatccagtgaaggaattgaagtccatccctcggttgaagaggaaaaagcctttccactggctgccctccataggaaagaagagagaaatcgacatcagttcctcacagatggtgtcgctgcccagctatcctgtggcccccaccagcagggcttccccctcgcctttctgccctgagctccggagaggccaatccatgccctccctgcgtgagggctggaggctggcagatgagttgggccttcctccactcccatctcgccccttaaccccgctggtcttggctacagagagcaaaccagagctgactgggctcatcgtggctgaggatctgaagcagttgataaagaagatgaagttggaggggactcgctacccaccactggactcaggcctgcctcctctcctgggggttgtgacccgtcacccagctgcagggcatcgcctggaggagctggagaagatgttgaggaacctccaggaggaagaagcctctgggcagtgggacccccagccccccaaatcctttccacttcacccacagccagtgaccattactttgaagcttagaaatgaggtcgtggtccaggcggctgccgtacgggtctctgatagaaacttcttagactctttccacattgagggggccggagccctgtataaccatctggctggtgaactggatcccaaagccattgaaaaaatggatattgataactttgttggcagtactaccagggaggtctacaaggagttgatgagccatgtctcttctgaccacttacattttgatcaagggcccctagttgagcctgcagcagataaagactggtcgaccttcctgtcctcagcctttctacgtcaagaaaaacagcctcaaatcatcaaccctgagctggttggactttactcccagagagcaaacactttacagtccaatactaagaagatgccctccctcccatcactccaagctaccaaaagctgggagaagtggtcaaacaaggcctccttgatgaactcatggaaaaccaccttgtctgtggatgactacttcaagtacctcaccaaccatgaaacagatttccttcatgtcatctttcaaatgcatgaagaagaggttcctgtggagattgtggcccctgccagagagtccctagagattcagcaccctcccccattgctagaagatgaagaaccagactttgtgccaggagagtgggattggaacactgtgctagagcacaggctaggagctgggaagacaccccacctgggagaaccccacaaaattctgagcctgcagaagcatctggaacaactgtggtctgtgcttgaggtccctgacaaggaccaggtggacatgaccattaaatatagctccaaagcccgcctgaggcagctgccttcattggtgaatgcctgggagcgggccctgaagcccattcagctgcgggaggcattgctggcgagactagagtggtttgagggacaagcttccaatcccaaccgcttcttcaaaaagaccaacttgagctccagtcacttcctggaggagaatcaggtccgaagccatctccacaggaagctcaacttaatggagtcttctttggtttccctcctggaggagatagagttaatctttggcgagccagtgatcttcaaggggcggccctacctggacaagatgaagagtgacaaagtggagatgctctattggctgcaacagcagcggcgggttcgccacctggtctcggccctgaaggatccccaccagtcaaccctgttcaggagctcagcagccagcctttagtagctcctgggaatacccctattactccttgaccaggcccagtgccctcaaatgcctccctcacccctaaatggccagcagctcatctagacctctttactgctttggaagaagaaatatttgtctatatctgggagtggagggttcaggaacattatgcttccaactatgaagggattgagactaaaactattgttttcttagtgaaattctcatgaaagaatccccaagcctagtagtcccattatgtcaagccttgcacaatacaagccaaatctcctatatcaaaa

SEQ ID NO: 121212 - DNA, 9667 bp, Homo sapiens
  Payload ID: 3767
  Gene Symbol: CCDC88A
  Gene Name: coiled-coil domain containing 88A
  Uniprot ID: Q3V6T2
  ENST ID: ENST00000263630
  CDS Start-End: 778-6309
gttactccggcttctccatagagggcggagaaggctggagcgcggcggtgattttgtgccagggattcccagagacgcgctgaaaggctggcagggcttaggaagctggggggttagggacacacattcaagcccccacccccgggaggggaagggggctggaggcgaggcttgagggcggcggaggaatggtgtctgctcggggggaaggggcgagccctgcctgttggtactgaggggctgcgggcagtggaggctccgcgggtcgaaagcggctccatgcccatcggtgggtggaacgtgtagaggtcggaacgccgaggtcgagtctggtggcgcctcggtatccttaacgtggtctctgtttaacgtatttcatttagcccccgttgggattgattcattgggagcagtttcgctggtctggatcctccaggagctggacaaccttgacgggctttttgtcttgggttccagccccctttcccttcctcctcctccagatgccttttctctgcccctcctcgcccggtacagacatttccagcgcaggctgctgctcgtggtgtccgtcgtcgaagccacttcttgggatttcggctcgtttcactctggggtgttttttgaggagggagagtgcccccctcctccacgatgggatttttctcccttgccgaaatggactttcattgatttctacttacttccacgtttagtgaccaattccctaggcgtatttttgtggtagttccttttttcaaatacatactctgtaaaatggagaacgaaatttttactccccttctggagcagttcatgaccagccctttggtcacttgggttaaaacgtttggacctctggccgcaggaaatgggaccaaccttgatgaatatgtggctttggtggatggggtattcttgaaccaggtcatgctccaaattaatcctaaattggagagtcagagagtaaataaaaaagtcaataatgatgcctcacttagaatgcacaatctatccattttggtgagacagataaaattttattaccaggagactttgcagcaattgatcatgatgtcgttgccaaatgtcttaatcattggcaaaaatcccttttctgaacaaggcacagaagaagttaaaaaactgcttttacttttattgggttgtgcagttcagtgtcagaaaaaagaggaatttattgaaagaattcaaggtttagattttgatacaaaagcagcggttgccgcacatattcaagaggtaactcataatcaggaaaatgtgtttgacctgcaatggatggaagtgactgatatgtcgcaggaggacatagaaccactcttgaaaaatatggcattgcatctaaaaagacttatagatgagagagatgaacattcagagactatcatagaactctctgaagagcgggatggtctccattttctaccccatgcctcttcatctgcacagtcaccctgtggttctccaggcatgaagcgaacagaaagtcgacaacatctgtcggtggaactggcagatgctaaagccaagataagaaggcttaggcaggaattggaggaaaagactgagcagttgttggattgtaaacaagaacttgagcaaatggaaatagaactcaaaaggctgcaacaagagaacatgaatttgctttcggatgctcgctctgccagaatgtaccgagatgaattagatgcacttcgagagaaagcagtcagagtcgataagcttgaaagtgaagtcagcagatataaagagagactacatgatattgaattttataaggcaagagttgaggaattaaaagaagacaatcaagttttattagaaacaaaaaccatgttggaagaccaactagagggaactcgtgctcgttctgataaattacatgaattagaaaaagagaacttacaactgaaagctaaacttcatgatatggaaatggaacgagatatggatagaaaaaagattgaagaattaatggaagaaaatatgactttggaaatggcacagaaacaaagtatggatgaatcattacatcttggctgggaactggaacagatatccagaactagtgaactttccgaagcaccccagaaatccctgggccatgaggtgaatgagttgacatcaagtagattattgaagctagagatggaaaatcaaagtttgacaaaaaccgtagaagagcttcggactactgtggattctgtagaaggcaatgcttccaaaatcctgaaaatggaaaaagaaaatcaaaggctcagtaaaaaggttgagattcttgaaaatgagattgttcaagaaaagcaaagtcttcagaattgtcagaatttaagcaaggatctaatgaaggagaaagctcagcttgaaaaaacaatagaaacactgagagaaaattcagagagacagattaagatactggaacaggaaaatgaacatctgaatcaaacagtgtcttccttaaggcagcggtcccagataagtgcagaagcaagagtgaaagacattgaaaaagaaaacaaaattcttcatgaatctatcaaagaaacaagtagcaagctaagcaagattgaatttgaaaaaagacaaattaaaaaagaattggaacattataaagaaaaaggagaacgagctgaagaacttgaaaatgaattgcatcatcttgaaaaagaaaatgaattattacagaaaaaaataactaatttaaaaattacttgtgaaaaaattgaggccttagaacaagaaaattcagagctagaaagagaaaatagaaaattaaaaaaaacattggatagctttaaaaatctgacctttcagttagaatccctagaaaaagagaattcccaacttgatgaggaaaacttagaactgcgaaggaatgtagaatctttgaagtgtgcaagcatgaaaatggctcagctacagctagaaaacaaagaactggaaagtgaaaaagagcaacttaagaagggtttggagctcctgaaagcatctttcaagaaaacagaacgcttagaagttagctaccagggtttagatatagaaaatcaaagactgcaaaaaactttagagaacagcaataaaaaaatccagcaattagagagtgaactacaagacttagagatggaaaatcaaacattgcagaaaaacctagaagaactaaaaatatctagcaaaagactagaacagctggaaaaagaaaataaatcattagagcaagagacttctcaactggaaaaggataagaaacaattggagaaggaaaataagagactccgacaacaagcagaaattaaagataccacattagaagaaaataatgtgaagattggaaatttggaaaaagaaaacaaaaccctatccaaagaaattggtatatataaagaatcttgtgtccgtctgaaagaactagaaaaagaaaataaggagcttgtgaaaagagcaactattgatataaaaacgttggttacactacgtgaggatttggtgagtgaaaagttgaagacccaacagatgaacaatgatctcgaaaaattaactcatgagcttgagaagatagggttaaataaggagcgactcttacatgatgaacaaagtactgatgacagtaggtataaacttttggaatcaaaattagaatccactcttaagaagtctcttgaaataaaagaagaaaaaattgctgctttagaagctcgattagaagaatccacgaattataaccagcaattgcgccaagaacttaaaacagtgaaaaaaaattatgaagctctcaaacagagacaagatgaggaaaggatggtacagagctctcctccaatatctggtgaagacaacaaatgggagcgagaaagtcaagaaacgactagagaacttctgaaagttaaagacagattaattgaagtagaaagaaataatgctacactgcaagcagagaagcaagcgttgaaaactcaactgaagcaacttgagacacagaacaataatttgcaggctcagattcttgcacttcagaggcagacagtgtcattacaagaacagaataccactcttcaaacacagaatgccaagcttcaggttgaaaattccacccttaattcccaaagtacctcactcatgaaccagaatgcccaactcctaatccagcagtcttccttagaaaatgaaaatgaatctgtaatcaaagagcgagaagacctaaaatctctctatgattctctgatcaaagatcatgaaaagctggaacttcttcatgaacgtcaggcttcagagtatgaatctcttatctctaaacatggaactctgaagtctgcccacaaaaatcttgaggtggaacatagagaccttgaagaccgttacaatcagttattaaaacagaaaggacagttggaagatttggaaaaaatgctcaaagtagaacaggaaaaaatgctgcttgaaaataaaaatcatgaaacagtagctgcagaatacaagaaactttgtggtgaaaatgataggctgaatcatacctatagtcaacttttaaaagagactgaagttttacaaactgaccataaaaatttgaaaagtcttctgaataattccaaactggaacaaacaagattagaagctgaattttcaaaactaaaggaacaataccaacaattggatattacatcaaccaagctgaataaccagtgtgagttgctaagccaacttaaaggaaatttagaagaagaaaatcggcatctactagatcaaattcagacattaatgctacagaacagaacacttttggagcagaatatggaaagcaaggatctttttcatgttgaacaaagacagtacattgataagttaaatgaattaagacgtcagaaggagaaactagaagagaaaattatggatcaatacaaattttatgacccatctcctcctagaaggagaggcaactggattactctaaaaatgagaaaattgataaagtctaagaaagatattaatcgggaacgccagaaatctctaacattaacacccacccgctcagactccagtgaaggatttcttcagctccctcatcaagacagtcaagatagttcttcagtaggttcaaactctttagaagatggccagaccttggggaccaagaaaagcagcaccatgaatgacctggtgcagtccatggtcctagcaggacagtggacaggtagtactgagaatttggaggttcctgatgatatttcaacgggtaaaaggagaaaagaattgggagctatggccttctctactacagccatcaacttttcaactgtcaactcttctgcaggcttcagatccaagcagttggttaataataaagatactacatcctttgaagacataagtccacaaggtgttagtgatgattctagtacgggatcaagagttcatgcttcaagaccagccagccttgatagtggcagaacatccactagcaatagcaataataatgcttcactacatgaagtcaaagcaggtgcagttaataaccaaagcaggccacaaagccacagcagtggagaatttagcctgcttcatgaccatgaggcttggtccagcagtggtagcagtccaatccagtacttgaaaagacagaccagatcaagcccagtgctccagcacaaaatatctgaaacactggagagtcgacatcacaagatcaaaactggttcccctggaagtgaagttgttactctacaacagtttttggaagaaagcaataagcttacctcagtacagataaagtcctcaagtcaagagaatcttttagatgaagtaatgaaaagtttgtctgtctcttctgactttttgggaaaagacaaaccagttagctgtggtctggccaggtcagtaagtggaaaaaccccaggggacttctatgatagacggacaactaagcctgagtttttgagacctggtcctcgaaaaactgaagatacctacttcattagttctgcgggaaaacctacaccaggcactcaaggaaaaataaaattagtaaaagaatcttctctgtcacgacaatcaaaagatagtaacccttatgcaactttacctcgtgcaagcagcgtgatctcaactgccgaaggaactacacgaaggacaagcatccatgattttttgaccaaggacagtagactgcctatatcagttgattcaccaccagctgctgctgacagcaacaccactgcagcatctaatgtggacaaagtacaagaaagcagaaattcaaaaagcaggtctagggagcaacaaagctcctaattctattacccactacatgacatgtgggccaagtgagagaaaagtgtccttcagtttctcagtatgaagcctttatttctgaagtaacaagacacctagcaactataggaatcatttttaaaaatctttaaggagacttttaacagtccttcgtgaatagagcaggcaagaaatacaaaccttcattccttgaatcaaggagcactactggattcaactgccaaaattttttaaaggttttaggacttactataccttgtactgttaagatctactgaataaaggacgttctctcactaaggaccaggtgttttaaggttaagtgtttaaagaagtactccaagaacaatctgcttttttcatcatttgttttatgaatttatccatgtttgcttaatgcttctgctaagtgttagccaaaatctagccatttatatttagttgtgtaaacctaaattaaatgctgtagtattttgtggaatgtactatatagcaagatacagagaaaattgttttggcatgtcagagccttatttggttagcagactgcatgtgttgatactttttttttcttaaagccaattattttgatgcaaaagaaattcagtttataagataaatctgaaaaatccataatgaaataggagttataaaaaatttatagtgatattaatctttccatatttcccattaagcaacactaagcattcataagttaacccatggtaaagagtgtttttctgaaacttttttttagtaagatggtttttcagcaaatggcattcccaagataaagctgttgtgctttaactcatttcttttctttggtattgggttatgtatgcgtgtgcatttttttaacttgagagctgactgttgcttaagaagttttcttatggcaaaaataatgtaaataagttactatgatctgcattttgccagaaactcatttataattaaggctatcatttattaatgatttttttctcctttatgatattacattaaagttgataactgttattggtacttttgaaatatttgtatgcatttgttacctttaaacatttggaagaagcacaaaaaaatagatttagttaacccagggaaacatcaatttttttagtagttccaattttatatcacagttttattttcttatgaaatcaaaaaatgcattgatactcattaatgcaaattcattatttaacatcaatatcagagtaatcttcaaggtctgaaatgagaaacatactgactttttaaaattttaacagtgtacttcttaggctttcattaccagctctgaagaactttttggaataattccatattccatagtgtgtggtttatgagttgtgggtttcatcactaacccagtaaccataagaaaagtctctctctctctctctctctctctctctttctctctccctctttctctctctctttcgtaggccagtagcaatgttgtgttcacagtctaatttccaaaagaccatcaataaaaaagagagcatgtttaaattgaaatggaacttagagaacttgagcttacttacgtacttcaatgccaccggtaacttaggttttaccaccaaatgctgttaacgttaaatcattttgaaaatcttggatgaaaggtgctatgtaaatggaaatacaaaggattcttactaacatacaaaaataatgcacaacagaaatatctaaaaccttttccgtagactttgaaacatctctctctctcataactccctggattcaagtagcacattggtaataggtatcagagcagtctagagacaattgcatgtcaaaaaatgtacattcatttttaggtggataaaagtaaacatagaaattatgttatggctaaatacagttagtgggtaacttagatttatattagctagcatctaatttgcacaactagaacacatcccagaacaattactgaaaagctgaaatttaatgggtggtgatgtagcccaatgagggcgaatgacattacagcttgacctctccagaacactaatatcctaaaatacagaacatgctgggttaagtgcattagtgcttcaagcagaaaatgctgaaaacaacgtgtaaagtactgaatctgagtaggctgaccctgagaagggacaattaaagagacaaccaagggaacacattgagactacaaaaatatgaataatctcaattatattcatcacacttttttcataccatttcaagaaacgactagacagtagtaaccacatgaatattttactttctccagtataccttgagaagcaaactttgtaggaagccactcttctcccctaaacaacttctgccaaacaataataaagccaactggaaacgaatcggagccattttcattttcctaaccggggcctgacatgctttaaattatctggctgtattctaaatcaacacctaacccctcaaggaaactgaagaatcaatatacagggtaatagctttggctcagagctccaataatgtgcttcagatctgtccatgtggaaatgctttcatccaaatttttaaattggtggttaccaaagagttcacaaaacaggtttgtatgtagcacctttcatgcaaggcatgcaaaaagcctattttaaaatcactgtgcatattatagagttgtagccacctcacaatgaagtactacagcctgtgctgtcttaatggtttatgtcaggaaatgaaaaagatactgtaccaaatctggaattacaatggggagtaataatgtatactaaatgacttttgtattttaagttactttttgtgagtggtgaatttttgtgtttttcttttcagctacacttagtcctgagatgtattttttctttaagtcttgaatgaatacaaaaggagcccattttataatataaaccttgatgtacatgttgagatatttggacaatgaaaatgccttaaaaggaatgcatatggataaagttgcacttataacacccttcaacaaaatctaattttaaattgtctttttcttttctattaagggttttctttttcagtgtctaccattgtacttataactgttattaaataccaaatcaaataatataaaagctgtaacatttcctttaaaactaatgctaataagggatttagagttgaatggcaaaatgtttattacttggcaatacctgatgtcagtcacaggcatccaactcatgacaagagataccactgtttgttttttaaaaaacatttttcattttgtttctccttcaaaaattaagttggactaacattcacgtatcaaactaatataaaaagaaataaaaccaagaggtgatttttgtaacaa

SEQ ID NO: 121213 - DNA, 9505 bp, Homo sapiens
  Payload ID: 3767
  Gene Symbol: CCDC88A
  Gene Name: coiled-coil domain containing 88A
  Uniprot ID: Q3V6T2
  ENST ID: ENST00000336838
  CDS Start-End: 535-6147
cgggcagtggaggctccgcgggtcgaaagcggctccatgcccatcggtgggtggaacgtgtagaggtcggaacgccgaggtcgagtctggtggcgcctcggtatccttaacgtggtctctgtttaacgtatttcatttagcccccgttgggattgattcattgggagcagtttcgctggtctggatcctccaggagctggacaaccttgacgggctttttgtcttgggttccagccccctttcccttcctcctcctccagatgccttttctctgcccctcctcgcccggtacagacatttccagcgcaggctgctgctcgtggtgtccgtcgtcgaagccacttcttgggatttcggctcgtttcactctggggtgttttttgaggagggagagtgcccccctcctccacgatgggatttttctcccttgccgaaatggactttcattgatttctacttacttccacgtttagtgaccaattccctaggcgtatttttgtggtagttccttttttcaaatacatactctgtaaaatggagaacgaaatttttactccccttctggagcagttcatgaccagccctttggtcacttgggttaaaacgtttggacctctggccgcaggaaatgggaccaaccttgatgaatatgtggctttggtggatggggtattcttgaaccaggtcatgctccaaattaatcctaaattggagagtcagagagtaaataaaaaagtcaataatgatgcctcacttagaatgcacaatctatccattttggtgagacagataaaattttattaccaggagactttgcagcaattgatcatgatgtcgttgccaaatgtcttaatcattggcaaaaatcccttttctgaacaaggcacagaagaagttaaaaaactgcttttacttttattgggttgtgcagttcagtgtcagaaaaaagaggaatttattgaaagaattcaaggtttagattttgatacaaaagcagcggttgccgcacatattcaagaggtaactcataatcaggaaaatgtgtttgacctgcaatggatggaagtgactgatatgtcgcaggaggacatagaaccactcttgaaaaatatggcattgcatctaaaaagacttatagatgagagagatgaacattcagagactatcatagaactctctgaagagcgggatggtctccattttctaccccatgcctcttcatctgcacagtcaccctgtggttctccaggcatgaagcgaacagaaagtcgacaacatctgtcggtggaactggcagatgctaaagccaagataagaaggcttaggcaggaattggaggaaaagactgagcagttgttggattgtaaacaagaacttgagcaaatggaaatagaactcaaaaggctgcaacaagagaacatgaatttgctttcggatgctcgctctgccagaatgtaccgagatgaattagatgcacttcgagagaaagcagtcagagtcgataagcttgaaagtgaagtcagcagatataaagagagactacatgatattgaattttataaggcaagagttgaggaattaaaagaagacaatcaagttttattagaaacaaaaaccatgttggaagaccaactagagggaactcgtgctcgttctgataaattacatgaattagaaaaagagaacttacaactgaaagctaaacttcatgatatggaaatggaacgagatatggatagaaaaaagattgaagaattaatggaagaaaatatgactttggaaatggcacagaaacaaagtatggatgaatcattacatcttggctgggaactggaacagatatccagaactagtgaactttccgaagcaccccagaaatccctgggccatgaggtgaatgagttgacatcaagtagattattgaagctagagatggaaaatcaaagtttgacaaaaaccgtagaagagcttcggactactgtggattctgtagaaggcaatgcttccaaaatcctgaaaatggaaaaagaaaatcaaaggctcagtaaaaaggttgagattcttgaaaatgagattgttcaagaaaagcaaagtcttcagaattgtcagaatttaagcaaggatctaatgaaggagaaagctcagcttgaaaaaacaatagaaacactgagagaaaattcagagagacagattaagatactggaacaggaaaatgaacatctgaatcaaacagtgtcttccttaaggcagcggtcccagataagtgcagaagcaagagtgaaagacattgaaaaagaaaacaaaattcttcatgaatctatcaaagaaacaagtagcaagctaagcaagattgaatttgaaaaaagacaaattaaaaaagaattggaacattataaagaaaaaggagaacgagctgaagaacttgaaaatgaattgcatcatcttgaaaaagaaaatgaattattacagaaaaaaataactaatttaaaaattacttgtgaaaaaattgaggccttagaacaagaaaattcagagctagaaagagaaaatagaaaattaaaaaaaacattggatagctttaaaaatctgacctttcagttagaatccctagaaaaagagaattcccaacttgatgaggaaaacttagaactgcgaaggaatgtagaatctttgaagtgtgcaagcatgaaaatggctcagctacagctagaaaacaaagaactggaaagtgaaaaagagcaacttaagaagggtttggagctcctgaaagcatctttcaagaaaacagaacgcttagaagttagctaccagggtttagatatagaaaatcaaagactgcaaaaaactttagagaacagcaataaaaaaatccagcaattagagagtgaactacaagacttagagatggaaaatcaaacattgcagaaaaacctagaagaactaaaaatatctagcaaaagactagaacagctggaaaaagaaaataaatcattagagcaagagacttctcaactggaaaaggataagaaacaattggagaaggaaaataagagactccgacaacaagcagaaattaaagataccacattagaagaaaataatgtgaagattggaaatttggaaaaagaaaacaaaaccctatccaaagaaattggtatatataaagaatcttgtgtccgtctgaaagaactagaaaaagaaaataaggagcttgtgaaaagagcaactattgatataaaaacgttggttacactacgtgaggatttggtgagtgaaaagttgaagacccaacagatgaacaatgatctcgaaaaattaactcatgagcttgagaagatagggttaaataaggagcgactcttacatgatgaacaaagtactgatgacaggtataaacttttggaatcaaaattagaatccactcttaagaagtctcttgaaataaaagaagaaaaaattgctgctttagaagctcgattagaagaatccacgaattataaccagcaattgcgccaagaacttaaaacagtgaaaaaaaattatgaagctctcaaacagagacaagatgaggaaaggatggtacagagctctcctccaatatctggtgaagacaacaaatgggagcgagaaagtcaagaaacgactagagaacttctgaaagttaaagacagattaattgaagtagaaagaaataatgctacactgcaagcagagaagcaagcgttgaaaactcaactgaagcaacttgagacacagaacaataatttgcaggctcagattcttgcacttcagaggcagacagtgtcattacaagaacagaataccactcttcaaacacagaatgccaagcttcaggttgaaaattccacccttaattcccaaagtacctcactcatgaaccagaatgcccaactcctaatccagcagtcttccttagaaaatgaaaatgaatctgtaatcaaagagcgagaagacctaaaatctctctatgattctctgatcaaagatcatgaaaagctggaacttcttcatgaacgtcaggcttcagagtatgaatctcttatctctaaacatggaactctgaagtctgcccacaaaaatcttgaggtggaacatagagaccttgaagaccgttacaatcagttattaaaacagaaaggacagttggaagatttggaaaaaatgctcaaagtagaacaggaaaaaatgctgcttgaaaataaaaatcatgaaacagtagctgcagaatacaagaaactttgtggtgaaaatgataggctgaatcatacctatagtcaacttttaaaagagactgaagttttacaaactgaccataaaaatttgaaaagtcttctgaataattccaaactggaacaaacaagattagaagctgaattttcaaaactaaaggaacaataccaacaattggatattacatcaaccaagctgaataaccagtgtgagttgctaagccaacttaaaggaaatttagaagaagaaaatcggcatctactagatcaaattcagacattaatgctacagaacagaacacttttggagcagaatatggaaagcaaggatctttttcatgttgaacaaagacagtacattgataagttaaatgaattaagacgtcagaaggagaaactagaagagaaaattatggatcaatacaaattttatgacccatctcctcctagaaggagaggcaactggattactctaaaaatgagaaaattgataaagtctaagaaagatattaatcgggaacgccagaaatctctaacattaacacccacccgctcagactccagtgaaggatttcttcagctccctcatcaagacagtcaagatagttcttcagtaggttcaaactctttagaagatggccagaccttggggaccaagaaaagcagcatggttgcactgaaaagactgccctttttgaggaacagaccgaaggataaagacaaaatgaaggcctgctaccgtcgttccatgtccatgaatgacctggtgcagtccatggtcctagcaggacagtggacaggtagtactgagaatttggaggttcctgatgatatttcaacgggtaaaaggagaaaagaattgggagctatggccttctctactacagccatcaacttttcaactgtcaactcttctgcaggcttcagatccaagcagttggttaataataaagatactacatcctttgaagacataagtccacaaggtgttagtgatgattctagtacgggatcaagagttcatgcttcaagaccagccagccttgatagtggcagaacatccactagcaatagcaataataatgcttcactacatgaagtcaaagcaggtgcagttaataaccaaagcaggccacaaagccacagcagtggagaatttagcctgcttcatgaccatgaggcttggtccagcagtggtagcagtccaatccagtacttgaaaagacagaccagatcaagcccagtgctccagcacaaaatatctgaaacactggagagtcgacatcacaagatcaaaactggttcccctggaagtgaagttgttactctacaacagtttttggaagaaagcaataagcttacctcagtacagataaagtcctcaagtcaagagaatcttttagatgaagtaatgaaaagtttgtctgtctcttctgactttttgggaaaagacaaaccagttagctgtggtctggccaggtcagtaagtggaaaaaccccaggggacttctatgatagacggacaactaagcctgagtttttgagacctggtcctcgaaaaactgaagatacctacttcattagttctgcgggaaaacctacaccaggcactcaaggaaaaataaaattagtaaaagaatcttctctgtcacgacaatcaaaagatagtaacccttatgcaactttacctcgtgcaagcagcgtgatctcaactgccgaaggaactacacgaaggacaagcatccatgattttttgaccaaggacagtagactgcctatatcagttgattcaccaccagctgctgctgacagcaacaccactgcagcatctaatgtggacaaagtacaagaaagcagaaattcaaaaagcaggtctagggagcaacaaagctcctaattctattacccactacatgacatgtgggccaagtgagagaaaagtgtccttcagtttctcagtatgaagcctttatttctgaagtaacaagacacctagcaactataggaatcatttttaaaaatctttaaggagacttttaacagtccttcgtgaatagagcaggcaagaaatacaaaccttcattccttgaatcaaggagcactactggattcaactgccaaaattttttaaaggttttaggacttactataccttgtactgttaagatctactgaataaaggacgttctctcactaaggaccaggtgttttaaggttaagtgtttaaagaagtactccaagaacaatctgcttttttcatcatttgttttatgaatttatccatgtttgcttaatgcttctgctaagtgttagccaaaatctagccatttatatttagttgtgtaaacctaaattaaatgctgtagtattttgtggaatgtactatatagcaagatacagagaaaattgttttggcatgtcagagccttatttggttagcagactgcatgtgttgatactttttttttcttaaagccaattattttgatgcaaaagaaattcagtttataagataaatctgaaaaatccataatgaaataggagttataaaaaatttatagtgatattaatctttccatatttcccattaagcaacactaagcattcataagttaacccatggtaaagagtgtttttctgaaacttttttttagtaagatggtttttcagcaaatggcattcccaagataaagctgttgtgctttaactcatttcttttctttggtattgggttatgtatgcgtgtgcatttttttaacttgagagctgactgttgcttaagaagttttcttatggcaaaaataatgtaaataagttactatgatctgcattttgccagaaactcatttataattaaggctatcatttattaatgatttttttctcctttatgatattacattaaagttgataactgttattggtacttttgaaatatttgtatgcatttgttacctttaaacatttggaagaagcacaaaaaaatagatttagttaacccagggaaacatcaatttttttagtagttccaattttatatcacagttttattttcttatgaaatcaaaaaatgcattgatactcattaatgcaaattcattatttaacatcaatatcagagtaatcttcaaggtctgaaatgagaaacatactgactttttaaaattttaacagtgtacttcttaggctttcattaccagctctgaagaactttttggaataattccatattccatagtgtgtggtttatgagttgtgggtttcatcactaacccagtaaccataagaaaagtctctctctctctctctctctctctctctttctctctccctctttctctctctctttcgtaggccagtagcaatgttgtgttcacagtctaatttccaaaagaccatcaataaaaaagagagcatgtttaaattgaaatggaacttagagaacttgagcttacttacgtacttcaatgccaccggtaacttaggttttaccaccaaatgctgttaacgttaaatcattttgaaaatcttggatgaaaggtgctatgtaaatggaaatacaaaggattcttactaacatacaaaaataatgcacaacagaaatatctaaaaccttttccgtagactttgaaacatctctctctctcataactccctggattcaagtagcacattggtaataggtatcagagcagtctagagacaattgcatgtcaaaaaatgtacattcatttttaggtggataaaagtaaacatagaaattatgttatggctaaatacagttagtgggtaacttagatttatattagctagcatctaatttgcacaactagaacacatcccagaacaattactgaaaagctgaaatttaatgggtggtgatgtagcccaatgagggcgaatgacattacagcttgacctctccagaacactaatatcctaaaatacagaacatgctgggttaagtgcattagtgcttcaagcagaaaatgctgaaaacaacgtgtaaagtactgaatctgagtaggctgaccctgagaagggacaattaaagagacaaccaagggaacacattgagactacaaaaatatgaataatctcaattatattcatcacacttttttcataccatttcaagaaacgactagacagtagtaaccacatgaatattttactttctccagtataccttgagaagcaaactttgtaggaagccactcttctcccctaaacaacttctgccaaacaataataaagccaactggaaacgaatcggagccattttcattttcctaaccggggcctgacatgctttaaattatctggctgtattctaaatcaacacctaacccctcaaggaaactgaagaatcaatatacagggtaatagctttggctcagagctccaataatgtgcttcagatctgtccatgtggaaatgctttcatccaaatttttaaattggtggttaccaaagagttcacaaaacaggtttgtatgtagcacctttcatgcaaggcatgcaaaaagcctattttaaaatcactgtgcatattatagagttgtagccacctcacaatgaagtactacagcctgtgctgtcttaatggtttatgtcaggaaatgaaaaagatactgtaccaaatctggaattacaatggggagtaataatgtatactaaatgacttttgtattttaagttactttttgtgagtggtgaatttttgtgtttttcttttcagctacacttagtcctgagatgtattttttctttaagtcttgaatgaatacaaaaggagcccattttataatataaaccttgatgtacatgttgagatatttggacaatgaaaatgccttaaaaggaatgcatatggataaagttgcacttataacacccttcaacaaaatctaattttaaattgtctttttcttttctattaagggttttctttttcagtgtctaccattgtacttataactgttattaaataccaaatcaaataatataaaagctgtaacatttcctttaaaactaatgctaataagggatttagagttgaatggcaaaatgtttattacttggcaatacctgatgtcagtcacaggcatccaactcatgacaagagataccactgtttgttttttaaaaaacatttttcattttgtttctccttcaaaaattaagttggactaacattcacgtatcaaactaatataaaaagaaataaaaccaagaggtgatttttgtaacaa

SEQ ID NO: 121214 - DNA, 2880 bp, Homo sapiens
  Payload ID: 3767
  Gene Symbol: CCDC88A
  Gene Name: coiled-coil domain containing 88A
  ENST ID: ENST00000412148
  CDS Start-End: 1-2667
cttttggaatcaaaattagaatccactcttaagaagtctcttgaaataaaagaagaaaaaattgctgctttagaagctcgattagaagaatccacgaattataaccagcaattgcgccaagaacttaaaacagtgaaaaaaaattatgaagctctcaaacagagacaagatgaggaaaggatggtacagagctctcctccaatatctggtgaagacaacaaatgggagcgagaaagtcaagaaacgactagagaacttctgaaagttaaagacagattaattgaagtagaaagaaataatgctacactgcaagcagagaagcaagcgttgaaaactcaactgaagcaacttgagacacagaacaataatttgcaggctcagattcttgcacttcagaggcagacagtgtcattacaagaacagaataccactcttcaaacacagaatgccaagcttcaggttgaaaattccacccttaattcccaaagtacctcactcatgaaccagaatgcccaactcctaatccagcagtcttccttagaaaatgaaaatgaatctgtaatcaaagagcgagaagacctaaaatctctctatgattctctgatcaaagatcatgaaaagctggaacttcttcatgaacgtcaggcttcagagtatgaatctcttatctctaaacatggaactctgaagtctgcccacaaaaatcttgaggtggaacatagagaccttgaagaccgttacaatcagttattaaaacagaaaggacagttggaagatttggaaaaaatgctcaaagtagaacaggaaaaaatgctgcttgaaaataaaaatcatgaaacagtagctgcagaatacaagaaactttgtggtgaaaatgataggctgaatcatacctatagtcaacttttaaaagagactgaagttttacaaactgaccataaaaatttgaaaagtcttctgaataattccaaactggaacaaacaagattagaagctgaattttcaaaactaaaggaacaataccaacaattggatattacatcaaccaagctgaataaccagtgtgagttgctaagccaacttaaaggaaatttagaagaagaaaatcggcatctactagatcaaattcagacattaatgctacagaacagaacacttttggagcagaatatggaaagcaaggatctttttcatgttgaacaaagacagtacattgataagttaaatgaattaagacgtcagaaggagaaactagaagagaaaattatggatcaatacaaattttatgacccatctcctcctagaaggagaggcaactggattactctaaaaatgagaaaattgataaagtctaagaaagatattaatcgggaacgccagaaatctctaacattaacacccacccgctcagactccagtgaaggatttcttcagctccctcatcaagacagtcaagatagttcttcagtaggttcaaactctttagaagatggccagaccttggggaccaagaaaagcagcaccatgaatgacctggtgcagtccatggtcctagcaggacagtggacaggtagtactgagaatttggaggttcctgatgatatttcaacgggtaaaaggagaaaagaattgggagctatggccttctctactacagccatcaacttttcaactgtcaactcttctgcaggcttcagatccaagcagttggttaataataaagatactacatcctttgaagacataagtccacaaggtgttagtgatgattctagtacgggatcaagagttcatgcttcaagaccagccagccttgatagtggcagaacatccactagcaatagcaataataatgcttcactacatgaagtcaaagcaggtgcagttaataaccaaagcaggccacaaagccacagcagtggagaatttagcctgcttcatgaccatgaggcttggtccagcagtggtagcagtccaatccagtacttgaaaagacagaccagatcaagcccagtgctccagcacaaaatatctgaaacactggagagtcgacatcacaagatcaaaactggttcccctggaagtgaagttgttactctacaacagtttttggaagaaagcaataagcttacctcagtacagataaagtcctcaagtcaagagaatcttttagatgaagtaatgaaaagtttgtctgtctcttctgactttttgggaaaagacaaaccagttagctgtggtctggccaggtcagtaagtggaaaaaccccaggggacttctatgatagacggacaactaagcctgagtttttgagacctggtcctcgaaaaactgaagatacctacttcattagttctgcgggaaaacctacaccaggcactcaaggaaaaataaaattagtaaaagaatcttctctgtcacgacaatcaaaagatagtaacccttatgcaactttacctcgtgcaagcagcgtgatctcaactgccgaaggaactacacgaaggacaagcatccatgattttttgaccaaggacagtagactgcctatatcagttgattcaccaccagctgctgctgacagcaacaccactgcagcatctaatgtggacaaagtacaagaaagcagaaattcaaaaagcaggtctagggagcaacaaagctcctaattctattacccactacatgacatgtgggccaagtgctacacttagtcctgagatgtattttttctttaagtcttgaatgaatacaaaaggagcccattttataatataaaccttgatgtacatgttgagatatttggacaatgaaaatgccttaaaaggaatgcatatggataaagttgcacttataacacccttcaacaaaatctaatttta

SEQ ID NO: 121215 - DNA, 582 bp, Homo sapiens
  Payload ID: 3767
  Gene Symbol: CCDC88A
  Gene Name: coiled-coil domain containing 88A
  ENST ID: ENST00000430086
  CDS Start-End: 141-582
attctatgcagagatagctttatcaaatgtgcttcagctaagtaacaatccaacacaattattaatatttttccctcagtaatcctaaattggagagtcagagagtaaataaaaaagtcaataatgatgcctcacttagaatgcacaatctatccattttggtgagacagataaaattttattaccaggagactttgcagcaattgatcatgatgtcgttgccaaatgtcttaatcattggcaaaaatcccttttctgaacaaggcacagaagaagttaaaaaactgcttttacttttattgggttgtgcagttcagtgtcagaaaaaagaggaatttattgaaagaattcaaggtttagattttgatacaaaagcagcggttgccgcacatattcaagaggtaactcataatcaggaaaatgtgtttgacctgcaatggatggaagtgactgatatgtcgcaggaggacatagaaccactcttgaaaaatatggcattgcatctaaaaagacttatagatgagagagatgaacattcagagactatcatagaactctctgaagagcgggatggtctccatt

SEQ ID NO: 121216 - DNA, 9586 bp, Homo sapiens
  Payload ID: 3767
  Gene Symbol: CCDC88A
  Gene Name: coiled-coil domain containing 88A
  Uniprot ID: Q3V6T2
  ENST ID: ENST00000413716
  CDS Start-End: 843-6233
attggcgggcggcgctggcgggcggcgaggggtggggtgtgatgcggcactgcggttctgaggccgttactccggcttctccatagagggcggagaaggctggagcgcggcggtgattttgtgccagggattcccagagacgcgctgaaaggctggcagggcttaggaagctggggggttagggacacacattcaagcccccacccccgggaggggaagggggctggaggcgaggcttgagggcggcggaggaatggtgtctgctcggggggaaggggcgagccctgcctgttggtactgaggggctgcgggcagtggaggctccgcgggtcgaaagcggctccatgcccatcggtgggtggaacgtgtagaggtcggaacgccgaggtcgagtctggtggcgcctcggtatccttaacgtggtctctgtttaacgtatttcatttagcccccgttgggattgattcattgggagcagtttcgctggtctggatcctccaggagctggacaaccttgacgggctttttgtcttgggttccagccccctttcccttcctcctcctccagatgccttttctctgcccctcctcgcccggtacagacatttccagcgcaggctgctgctcgtggtgtccgtcgtcgaagccacttcttgggatttcggctcgtttcactctggggtgttttttgaggagggagagtgcccccctcctccacgatgggatttttctcccttgccgaaatggactttcattgatttctacttacttccacgtttagtgaccaattccctaggcgtatttttgtggtagttccttttttcaaatacatactctgtaaaatggagaacgaaatttttactccccttctggagcagttcatgaccagccctttggtcacttgggttaaaacgtttggacctctggccgcaggaaatgggaccaaccttgatgaatatgtggctttggtggatggggtattcttgaaccaggtcatgctccaaattaatcctaaattggagagtcagagagtaaataaaaaagtcaataatgatgcctcacttagaatgcacaatctatccattttggtgagacagataaaattttattaccaggagactttgcagcaattgatcatgatgtcgttgccaaatgtcttaatcattggcaaaaatcccttttctgaacaaggcacagaagaagttaaaaaactgcttttacttttattgggttgtgcagttcagtgtcagaaaaaagaggaatttattgaaagaattcaaggtttagattttgatacaaaagcagcggttgccgcacatattcaagaggtaactcataatcaggaaaatgtgtttgacctgcaatggatggaagtgactgatatgtcgcaggaggacatagaaccactcttgaaaaatatggcattgcatctaaaaagacttatagatgagagagatgaacattcagagactatcatagaactctctgaagagcgggatggtctccattttctaccccatgcctcttcatctgcacagtcaccctgtggttctccaggcatgaagcgaacagaaagtcgacaacatctgtcggtggaactggcagatgctaaagccaagataagaaggcttaggcaggaattggaggaaaagactgagcagttgttggattgtaaacaagaacttgagcaaatggaaatagaactcaaaaggctgcaacaagagaacatgaatttgctttcggatgctcgctctgccagaatgtaccgagatgaattagatgcacttcgagagaaagcagtcagagtcgataagcttgaaagtgaagtcagcagatataaagagagactacatgatattgaattttataaggcaagagttgaggaattaaaagaagacaatcaagttttattagaaacaaaaaccatgttggaagaccaactagagggaactcgtgctcgttctgataaattacatgaattagaaaaagagaacttacaactgaaagctaaacttcatgatatggaaatggaacgagatatggatagaaaaaagattgaagaattaatggaagaaaatatgactttggaaatggcacagaaacaaagtatggatgaatcattacatcttggctgggaactggaacagatatccagaactagtgaactttccgaagcaccccagaaatccctgggccatgaggtgaatgagttgacatcaagtagattattgaagctagagatggaaaatcaaagtttgacaaaaaccgtagaagagcttcggactactgtggattctgtagaaggcaatgcttccaaaatcctgaaaatggaaaaagaaaatcaaaggctcagtaaaaaggttgagattcttgaaaatgagattgttcaagaaaagcaaagtcttcagaattgtcagaatttaagcaaggatctaatgaaggagaaagctcagcttgaaaaaacaatagaaacactgagagaaaattcagagagacagattaagatactggaacaggaaaatgaacatctgaatcaaacagtgtcttccttaaggcagcggtcccagataagtgcagaagcaagagtgaaagacattgaaaaagaaaacaaaattcttcatgaatctatcaaagaaacaagtagcaagctaagcaagattgaatttgaaaaaagacaaattaaaaaagaattggaacattataaagaaaaaggagaacgagctgaagaacttgaaaatgaattgcatcatcttgaaaaagaaaatgaattattacagaaaaaaataactaatttaaaaattacttgtgaaaaaattgaggccttagaacaagaaaattcagagctagaaagagaaaatagaaaattaaaaaaaacattggatagctttaaaaatctgacctttcagttagaatccctagaaaaagagaattcccaacttgatgaggaaaacttagaactgcgaaggaatgtagaatctttgaagtgtgcaagcatgaaaatggctcagctacagctagaaaacaaagaactggaaagtgaaaaagagcaacttaagaagggtttggagctcctgaaagcatctttcaagaaaacagaacgcttagaagttagctaccagggtttagatatagaaaatcaaagactgcaaaaaactttagagaacagcaataaaaaaatccagcaattagagagtgaactacaagacttagagatggaaaatcaaacattgcagaaaaacctagaagaactaaaaatatctagcaaaagactagaacagctggaaaaagaaaataaatcattagagcaagagacttctcaactggaaaaggataagaaacaattggagaaggaaaataagagactccgacaacaagcagaaattaaagataccacattagaagaaaataatgtgaagattggaaatttggaaaaagaaaacaaaaccctatccaaagaaattggtatatataaagaatcttgtgtccgtctgaaagaactagaaaaagaaaataaggagcttgtgaaaagagcaactattgatataaaaacgttggttacactacgtgaggatttggtgagtgaaaagttgaagacccaacagatgaacaatgatctcgaaaaattaactcatgagcttgagaagatagggttaaataaggagcgactcttacatgatgaacaaagtactgatgacaggtataaacttttggaatcaaaattagaatccactcttaagaagtctcttgaaataaaagaagaaaaaattgctgctttagaagctcgattagaagaatccacgaattataaccagcaattgcgccaagaacttaaaacagtgaaaaaaaattatgaagctctcaaacagagacaagatgaggaaaggatggtacagagctctcctccaatatctggtgaagacaacaaatgggagcgagaaagtcaagaaacgactagagaacttctgaaagttaaagacagattaattgaagtagaaagaaataatgctacactgcaagcagagaagcaagcgttgaaaactcaactgaagcaacttgagacacagaacaataatttgcaggctcagattcttgcacttcagaggcagacagtgtcattacaagaacagaataccactcttcaaacacagaatgccaagcttcaggttgaaaattccacccttaattcccaaagtacctcactcatgaaccagaatgcccaactcctaatccagcagtcttccttagaaaatgaaaatgaatctgtaatcaaagagcgagaagacctaaaatctctctatgattctctgatcaaagatcatgaaaagctggaacttcttcatgaacgtcaggcttcagagtatgaatctcttatctctaaacatggaactctgaagtctgcccacaaaaatcttgaggtggaacatagagaccttgaagaccgttacaatcagttattaaaacagaaaggacagttggaagatttggaaaaaatgctcaaagtagaacaggaaaaaatgctgcttgaaaataaaaatcatgaaacagtagctgcagaatacaagaaactttgtggtgaaaatgataggctgaatcatacctatagtcaacttttaaaagagactgaagttttacaaactgaccataaaaatttgaaaagtcttctgaataattccaaactggaacaaacaagattagaagctgaattttcaaaactaaaggaacaataccaacaattggatattacatcaaccaagctgaataaccagtgtgagttgctaagccaacttaaaggaaatttagaagaagaaaatcggcatctactagatcaaattcagacattaatgctacagaacagaacacttttggagcagaatatggaaagcaaggatctttttcatgttgaacaaagacagtacattgataagttaaatgaattaagacgtcagaaggagaaactagaagagaaaattatggatcaatacaaattttatgacccatctcctcctagaaggagaggcaactggattactctaaaaatgagaaaattgataaagtctaagaaagatattaatcgggaacgccagaaatctctaacattaacacccacccgctcagactccagtgaaggatttcttcagctccctcatcaagacagtcaagatagttcttcagtaggttcaaactctttagaagatggccagaccttggggaccaagaaaagcagcatggttgcactgaaaagactgccctttttgaggaacagaccgaaggataaagacaaaatgaaggcctgctaccgtcgttccatgtccatgaatgacctggtgcagtccatggtcctagcaggacagtggacaggtagtactgagaatttggaggttcctgatgatatttcaacgggtaaaaggagaaaagaattgggagctatggccttctctactacagccatcaacttttcaactgtcaactcttctgcaggcttcagatccaagcagttggttaataataaagatactacatcctttgaagacataagtccacaaggtgttagtgatgattctagtacgggatcaagagttcatgcttcaagaccagccagccttgatagtggcagaacatccactagcaatagcaataataatgcttcactacatgaagtcaaagcaggtgcagttaataaccaaagcaggccacaaagccacagcagtggagaatttagcctgcttcatgaccatgaggcttggtccagcagtggtagcagtccaatccagtacttgaaaagacagaccagatcaagcccagtgctccagcacaaaatatctgaaacactggagagtcgacatcacaagatcaaaactggttcccctggaagtgaagttgttactctacaacagtttttggaagaaagcaataagcttacctcagtacagataaagtcctcaagtcaagagaatcttttagatgaagtaatgaaaagtttgtctgtctcttctgactttttgggaaaagacaaaccagttagctgtggtctggccagcgtgatctcaactgccgaaggaactacacgaaggacaagcatccatgattttttgaccaaggacagtagactgcctatatcagttgattcaccaccagctgctgctgacagcaacaccactgcagcatctaatgtggacaaagtacaagaaagcagaaattcaaaaagcaggtctagggagcaacaaagctcctaattctattacccactacatgacatgtgggccaagtgagagaaaagtgtccttcagtttctcagtatgaagcctttatttctgaagtaacaagacacctagcaactataggaatcatttttaaaaatctttaaggagacttttaacagtccttcgtgaatagagcaggcaagaaatacaaaccttcattccttgaatcaaggagcactactggattcaactgccaaaattttttaaaggttttaggacttactataccttgtactgttaagatctactgaataaaggacgttctctcactaaggaccaggtgttttaaggttaagtgtttaaagaagtactccaagaacaatctgcttttttcatcatttgttttatgaatttatccatgtttgcttaatgcttctgctaagtgttagccaaaatctagccatttatatttagttgtgtaaacctaaattaaatgctgtagtattttgtggaatgtactatatagcaagatacagagaaaattgttttggcatgtcagagccttatttggttagcagactgcatgtgttgatactttttttttcttaaagccaattattttgatgcaaaagaaattcagtttataagataaatctgaaaaatccataatgaaataggagttataaaaaatttatagtgatattaatctttccatatttcccattaagcaacactaagcattcataagttaacccatggtaaagagtgtttttctgaaacttttttttagtaagatggtttttcagcaaatggcattcccaagataaagctgttgtgctttaactcatttcttttctttggtattgggttatgtatgcgtgtgcatttttttaacttgagagctgactgttgcttaagaagttttcttatggcaaaaataatgtaaataagttactatgatctgcattttgccagaaactcatttataattaaggctatcatttattaatgatttttttctcctttatgatattacattaaagttgataactgttattggtacttttgaaatatttgtatgcatttgttacctttaaacatttggaagaagcacaaaaaaatagatttagttaacccagggaaacatcaatttttttagtagttccaattttatatcacagttttattttcttatgaaatcaaaaaatgcattgatactcattaatgcaaattcattatttaacatcaatatcagagtaatcttcaaggtctgaaatgagaaacatactgactttttaaaattttaacagtgtacttcttaggctttcattaccagctctgaagaactttttggaataattccatattccatagtgtgtggtttatgagttgtgggtttcatcactaacccagtaaccataagaaaagtctctctctctctctctctctctctctctttctctctccctctttctctctctctttcgtaggccagtagcaatgttgtgttcacagtctaatttccaaaagaccatcaataaaaaagagagcatgtttaaattgaaatggaacttagagaacttgagcttacttacgtacttcaatgccaccggtaacttaggttttaccaccaaatgctgttaacgttaaatcattttgaaaatcttggatgaaaggtgctatgtaaatggaaatacaaaggattcttactaacatacaaaaataatgcacaacagaaatatctaaaaccttttccgtagactttgaaacatctctctctctcataactccctggattcaagtagcacattggtaataggtatcagagcagtctagagacaattgcatgtcaaaaaatgtacattcatttttaggtggataaaagtaaacatagaaattatgttatggctaaatacagttagtgggtaacttagatttatattagctagcatctaatttgcacaactagaacacatcccagaacaattactgaaaagctgaaatttaatgggtggtgatgtagcccaatgagggcgaatgacattacagcttgacctctccagaacactaatatcctaaaatacagaacatgctgggttaagtgcattagtgcttcaagcagaaaatgctgaaaacaacgtgtaaagtactgaatctgagtaggctgaccctgagaagggacaattaaagagacaaccaagggaacacattgagactacaaaaatatgaataatctcaattatattcatcacacttttttcataccatttcaagaaacgactagacagtagtaaccacatgaatattttactttctccagtataccttgagaagcaaactttgtaggaagccactcttctcccctaaacaacttctgccaaacaataataaagccaactggaaacgaatcggagccattttcattttcctaaccggggcctgacatgctttaaattatctggctgtattctaaatcaacacctaacccctcaaggaaactgaagaatcaatatacagggtaatagctttggctcagagctccaataatgtgcttcagatctgtccatgtggaaatgctttcatccaaatttttaaattggtggttaccaaagagttcacaaaacaggtttgtatgtagcacctttcatgcaaggcatgcaaaaagcctattttaaaatcactgtgcatattatagagttgtagccacctcacaatgaagtactacagcctgtgctgtcttaatggtttatgtcaggaaatgaaaaagatactgtaccaaatctggaattacaatggggagtaataatgtatactaaatgacttttgtattttaagttactttttgtgagtggtgaatttttgtgtttttcttttcagctacacttagtcctgagatgtattttttctttaagtcttgaatgaatacaaaaggagcccattttataatataaaccttgatgtacatgttgagatatttggacaatgaaaatgccttaaaaggaatgcatatggataaagttgcacttataacacccttcaacaaaatctaattttaaattgtctttttcttttctattaagggttttctttttcagtgtctaccattgtacttataactgttattaaataccaaatcaaataatataaaagctgtaacatttcctttaaaactaatgctaataagggatttagagttgaatggcaaaatgtttattacttggcaatacctgatgtcagtcacaggcatccaactcatgacaagagataccactgtttgttttttaaaaaacatttttcattttgtttctccttcaaaaattaagttggactaacattcacgtatcaaactaatataaaaagaaataaaaccaagaggtgatttttgt

SEQ ID NO: 121217 - DNA, 4500 bp, Homo sapiens
  Payload ID: 3767
  Gene Symbol: CCDC88A
  Gene Name: coiled-coil domain containing 88A
  ENST ID: ENST00000426576
  CDS Start-End: 1-3609
caactggaaaaggataagaaacaattggagaaggaaaataagagactccgacaacaagcagaaattaaagataccacattagaagaaaataatgtgaagattggaaatttggaaaaagaaaacaaaaccctatccaaagaaattggtatatataaagaatcttgtgtccgtctgaaagaactagaaaaagaaaataaggagcttgtgaaaagagcaactattgatataaaaacgttggttacactacgtgaggatttggtgagtgaaaagttgaagacccaacagatgaacaatgatctcgaaaaattaactcatgagcttgagaagatagggttaaataaggagcgactcttacatgatgaacaaagtactgatgacagtaggtataaacttttggaatcaaaattagaatccactcttaagaagtctcttgaaataaaagaagaaaaaattgctgctttagaagctcgattagaagaatccacgaattataaccagcaattgcgccaagaacttaaaacagtgaaaaaaaattatgaagctctcaaacagagacaagatgaggaaaggatggtacagagctctcctccaatatctggtgaagacaacaaatgggagcgagaaagtcaagaaacgactagagaacttctgaaagttaaagacagattaattgaagtagaaagaaataatgctacactgcaagcagagaagcaagcgttgaaaactcaactgaagcaacttgagacacagaacaataatttgcaggctcagattcttgcacttcagaggcagacagtgtcattacaagaacagaataccactcttcaaacacagaatgccaagcttcaggttgaaaattccacccttaattcccaaagtacctcactcatgaaccagaatgcccaactcctaatccagcagtcttccttagaaaatgaaaatgaatctgtaatcaaagagcgagaagacctaaaatctctctatgattctctgatcaaagatcatgaaaagctggaacttcttcatgaacgtcaggcttcagagtatgaatctcttatctctaaacatggaactctgaagtctgcccacaaaaatcttgaggtggaacatagagaccttgaagaccgttacaatcagttattaaaacagaaaggacagttggaagatttggaaaaaatgctcaaagtagaacaggaaaaaatgctgcttgaaaataaaaatcatgaaacagtagctgcagaatacaagaaactttgtggtgaaaatgataggctgaatcatacctatagtcaacttttaaaagagactgaagttttacaaactgaccataaaaatttgaaaagtcttctgaataattccaaactggaacaaacaagattagaagctgaattttcaaaactaaaggaacaataccaacaattggatattacatcaaccaagctgaataaccagtgtgagttgctaagccaacttaaaggaaatttagaagaagaaaatcggcatctactagatcaaattcagacattaatgctacagaacagaacacttttggagcagaatatggaaagcaaggatctttttcatgttgaacaaagacagtacattgataagttaaatgaattaagacgtcagaaggagaaactagaagagaaaattatggatcaatacaaattttatgacccatctcctcctagaaggagaggcaactggattactctaaaaatgagaaaattgataaagtctaagaaagatattaatcgggaacgccagaaatctctaacattaacacccacccgctcagactccagtgaaggatttcttcagctccctcatcaagacagtcaagatagttcttcagtaggttcaaactctttagaagatggccagaccttggggaccaagaaaagcagcatggttgcactgaaaagactgccctttttgaggaacagaccgaaggataaagacaaaatgaaggcctgctaccgtcgttccatgtccatgaatgacctggtgcagtccatggtcctagcaggacagtggacaggtagtactgagaatttggaggttcctgatgatatttcaacgggtaaaaggagaaaagaattgggagctatggccttctctactacagccatcaacttttcaactgtcaactcttctgcaggcttcagatccaagcagttggttaataataaagatactacatcctttgaagacataagtccacaaggtgttagtgatgattctagtacgggatcaagagttcatgcttcaagaccagccagccttgatagtggcagaacatccactagcaatagcaataataatgcttcactacatgaagtcaaagcaggtgcagttaataaccaaagcaggccacaaagccacagcagtggagaatttagcctgcttcatgaccatgaggcttggtccagcagtggtagcagtccaatccagtacttgaaaagacagaccagatcaagcccagtgctccagcacaaaatatctgaaacactggagagtcgacatcacaagatcaaaactggttcccctggaagtgaagttgttactctacaacagtttttggaagaaagcaataagcttacctcagtacagataaagtcctcaagtcaagagaatcttttagatgaagtaatgaaaagtttgtctgtctcttctgactttttgggaaaagacaaaccagttagctgtggtctggccaggtcagtaagtggaaaaaccccaggggacttctatgatagacggacaactaagcctgagtttttgagacctggtcctcgaaaaactgaagatacctacttcattagttctgcgggaaaacctacaccaggcactcaaggaaaaataaaattagtaaaagaatcttctctgtcacgacaatcaaaagatagtaacccttatgcaactttacctcgtgcaagcagcgtgatctcaactgccgaaggaactacacgaaggacaagcatccatgattttttgaccaaggacagtagactgcctatatcagttgattcaccaccagctgctgctgacagcaacaccactgcagcatctagtgagtaccatttacaccagtggtcctctcatatacttgacatcccaacacatactataggttcttgtgcccaaaatgatttagctatagacatgcctgagcctctatatgcccaggctagaaactcaagaacaggaaggtcacattttctaaaccaaacttttgccactattaggatgcctagtgatgcattcggaatgttggcaaaagatagcataggaccatttactgtggcccattcatctcagccattcttatccctgaatacagaattagttagtaacataagtgggttacctcctaggccagttatcagaataactgaccaggcttctgcctctttggataaacctgcacagaaagaaaatgaacagttttctgatcatcagaaccctagtaacagtaacctacagttttctataaatagcaacaatcttgtcacttctgcatgcctctatcctgatgacacagaagctgcattgttggtttctgaggataatcaaactgtttggtatgaatatggttgtatatgatcaaaactgcacaatataatatattgatgttatttgatatacactgcttctctaatatgatttgaaaagttgctgttaacaaaatatcatttggctaggtttttattttttatttaaaattgttgcacagtgttcagctgtacatgatggcatgtatattaatgtgaatgtgtaaccacaccaaaacctgcatgaaatattaattactttgtccattttctgcatgcctttaaaaaccttaaccatacatgctcctccttcacattttttgttgcctgataagattgttactttgatatccagaagcatgttaaaacagttgcatgctctcttaccaagaagacatttccaagtcatatttgctttgttgcttctggaaaaaaatgttcatttcctccctcccttcctcctcttcccacccctcacttgctctgactgtcactcctttttttcttccagaatgtgtactttatattacatatgtacagtatcagtagggaaaatgtaaaaagatgttgttttcttttgtcatttaattaggccatctgtcctgttttaaagaaatagttaataattcaacactttatataacaaatattaactaatacccatatttataaaacatttttcagatttaaaagattgttaatacttataaacttagtgttattcttagaaaaccccatcaaatttaaatgtgatttacacagtgactaggaacatttgtatttattgtttcttctctgcacttttcatcatctgataaatacaagagctcaagtaactgtcttttcttcaagatggcttctatacttgaaatcagttaatacaatagtttttccagttctttttttatagagagtcaaagagaaataaaccaaattatattca

SEQ ID NO: 121218 - DNA, 9811 bp, Homo sapiens
  Payload ID: 3767
  Gene Symbol: CCDC88A
  Gene Name: coiled-coil domain containing 88A
  Uniprot ID: Q3V6T2
  ENST ID: ENST00000436346
  CDS Start-End: 843-6458
attggcgggcggcgctggcgggcggcgaggggtggggtgtgatgcggcactgcggttctgaggccgttactccggcttctccatagagggcggagaaggctggagcgcggcggtgattttgtgccagggattcccagagacgcgctgaaaggctggcagggcttaggaagctggggggttagggacacacattcaagcccccacccccgggaggggaagggggctggaggcgaggcttgagggcggcggaggaatggtgtctgctcggggggaaggggcgagccctgcctgttggtactgaggggctgcgggcagtggaggctccgcgggtcgaaagcggctccatgcccatcggtgggtggaacgtgtagaggtcggaacgccgaggtcgagtctggtggcgcctcggtatccttaacgtggtctctgtttaacgtatttcatttagcccccgttgggattgattcattgggagcagtttcgctggtctggatcctccaggagctggacaaccttgacgggctttttgtcttgggttccagccccctttcccttcctcctcctccagatgccttttctctgcccctcctcgcccggtacagacatttccagcgcaggctgctgctcgtggtgtccgtcgtcgaagccacttcttgggatttcggctcgtttcactctggggtgttttttgaggagggagagtgcccccctcctccacgatgggatttttctcccttgccgaaatggactttcattgatttctacttacttccacgtttagtgaccaattccctaggcgtatttttgtggtagttccttttttcaaatacatactctgtaaaatggagaacgaaatttttactccccttctggagcagttcatgaccagccctttggtcacttgggttaaaacgtttggacctctggccgcaggaaatgggaccaaccttgatgaatatgtggctttggtggatggggtattcttgaaccaggtcatgctccaaattaatcctaaattggagagtcagagagtaaataaaaaagtcaataatgatgcctcacttagaatgcacaatctatccattttggtgagacagataaaattttattaccaggagactttgcagcaattgatcatgatgtcgttgccaaatgtcttaatcattggcaaaaatcccttttctgaacaaggcacagaagaagttaaaaaactgcttttacttttattgggttgtgcagttcagtgtcagaaaaaagaggaatttattgaaagaattcaaggtttagattttgatacaaaagcagcggttgccgcacatattcaagaggtaactcataatcaggaaaatgtgtttgacctgcaatggatggaagtgactgatatgtcgcaggaggacatagaaccactcttgaaaaatatggcattgcatctaaaaagacttatagatgagagagatgaacattcagagactatcatagaactctctgaagagcgggatggtctccattttctaccccatgcctcttcatctgcacagtcaccctgtggttctccaggcatgaagcgaacagaaagtcgacaacatctgtcggtggaactggcagatgctaaagccaagataagaaggcttaggcaggaattggaggaaaagactgagcagttgttggattgtaaacaagaacttgagcaaatggaaatagaactcaaaaggctgcaacaagagaacatgaatttgctttcggatgctcgctctgccagaatgtaccgagatgaattagatgcacttcgagagaaagcagtcagagtcgataagcttgaaagtgaagtcagcagatataaagagagactacatgatattgaattttataaggcaagagttgaggaattaaaagaagacaatcaagttttattagaaacaaaaaccatgttggaagaccaactagagggaactcgtgctcgttctgataaattacatgaattagaaaaagagaacttacaactgaaagctaaacttcatgatatggaaatggaacgagatatggatagaaaaaagattgaagaattaatggaagaaaatatgactttggaaatggcacagaaacaaagtatggatgaatcattacatcttggctgggaactggaacagatatccagaactagtgaactttccgaagcaccccagaaatccctgggccatgaggtgaatgagttgacatcaagtagattattgaagctagagatggaaaatcaaagtttgacaaaaaccgtagaagagcttcggactactgtggattctgtagaaggcaatgcttccaaaatcctgaaaatggaaaaagaaaatcaaaggctcagtaaaaaggttgagattcttgaaaatgagattgttcaagaaaagcaaagtcttcagaattgtcagaatttaagcaaggatctaatgaaggagaaagctcagcttgaaaaaacaatagaaacactgagagaaaattcagagagacagattaagatactggaacaggaaaatgaacatctgaatcaaacagtgtcttccttaaggcagcggtcccagataagtgcagaagcaagagtgaaagacattgaaaaagaaaacaaaattcttcatgaatctatcaaagaaacaagtagcaagctaagcaagattgaatttgaaaaaagacaaattaaaaaagaattggaacattataaagaaaaaggagaacgagctgaagaacttgaaaatgaattgcatcatcttgaaaaagaaaatgaattattacagaaaaaaataactaatttaaaaattacttgtgaaaaaattgaggccttagaacaagaaaattcagagctagaaagagaaaatagaaaattaaaaaaaacattggatagctttaaaaatctgacctttcagttagaatccctagaaaaagagaattcccaacttgatgaggaaaacttagaactgcgaaggaatgtagaatctttgaagtgtgcaagcatgaaaatggctcagctacagctagaaaacaaagaactggaaagtgaaaaagagcaacttaagaagggtttggagctcctgaaagcatctttcaagaaaacagaacgcttagaagttagctaccagggtttagatatagaaaatcaaagactgcaaaaaactttagagaacagcaataaaaaaatccagcaattagagagtgaactacaagacttagagatggaaaatcaaacattgcagaaaaacctagaagaactaaaaatatctagcaaaagactagaacagctggaaaaagaaaataaatcattagagcaagagacttctcaactggaaaaggataagaaacaattggagaaggaaaataagagactccgacaacaagcagaaattaaagataccacattagaagaaaataatgtgaagattggaaatttggaaaaagaaaacaaaaccctatccaaagaaattggtatatataaagaatcttgtgtccgtctgaaagaactagaaaaagaaaataaggagcttgtgaaaagagcaactattgatataaaaacgttggttacactacgtgaggatttggtgagtgaaaagttgaagacccaacagatgaacaatgatctcgaaaaattaactcatgagcttgagaagatagggttaaataaggagcgactcttacatgatgaacaaagtactgatgacagtaggtataaacttttggaatcaaaattagaatccactcttaagaagtctcttgaaataaaagaagaaaaaattgctgctttagaagctcgattagaagaatccacgaattataaccagcaattgcgccaagaacttaaaacagtgaaaaaaaattatgaagctctcaaacagagacaagatgaggaaaggatggtacagagctctcctccaatatctggtgaagacaacaaatgggagcgagaaagtcaagaaacgactagagaacttctgaaagttaaagacagattaattgaagtagaaagaaataatgctacactgcaagcagagaagcaagcgttgaaaactcaactgaagcaacttgagacacagaacaataatttgcaggctcagattcttgcacttcagaggcagacagtgtcattacaagaacagaataccactcttcaaacacagaatgccaagcttcaggttgaaaattccacccttaattcccaaagtacctcactcatgaaccagaatgcccaactcctaatccagcagtcttccttagaaaatgaaaatgaatctgtaatcaaagagcgagaagacctaaaatctctctatgattctctgatcaaagatcatgaaaagctggaacttcttcatgaacgtcaggcttcagagtatgaatctcttatctctaaacatggaactctgaagtctgcccacaaaaatcttgaggtggaacatagagaccttgaagaccgttacaatcagttattaaaacagaaaggacagttggaagatttggaaaaaatgctcaaagtagaacaggaaaaaatgctgcttgaaaataaaaatcatgaaacagtagctgcagaatacaagaaactttgtggtgaaaatgataggctgaatcatacctatagtcaacttttaaaagagactgaagttttacaaactgaccataaaaatttgaaaagtcttctgaataattccaaactggaacaaacaagattagaagctgaattttcaaaactaaaggaacaataccaacaattggatattacatcaaccaagctgaataaccagtgtgagttgctaagccaacttaaaggaaatttagaagaagaaaatcggcatctactagatcaaattcagacattaatgctacagaacagaacacttttggagcagaatatggaaagcaaggatctttttcatgttgaacaaagacagtacattgataagttaaatgaattaagacgtcagaaggagaaactagaagagaaaattatggatcaatacaaattttatgacccatctcctcctagaaggagaggcaactggattactctaaaaatgagaaaattgataaagtctaagaaagatattaatcgggaacgccagaaatctctaacattaacacccacccgctcagactccagtgaaggatttcttcagctccctcatcaagacagtcaagatagttcttcagtaggttcaaactctttagaagatggccagaccttggggaccaagaaaagcagcatggttgcactgaaaagactgccctttttgaggaacagaccgaaggataaagacaaaatgaaggcctgctaccgtcgttccatgtccatgaatgacctggtgcagtccatggtcctagcaggacagtggacaggtagtactgagaatttggaggttcctgatgatatttcaacgggtaaaaggagaaaagaattgggagctatggccttctctactacagccatcaacttttcaactgtcaactcttctgcaggcttcagatccaagcagttggttaataataaagatactacatcctttgaagacataagtccacaaggtgttagtgatgattctagtacgggatcaagagttcatgcttcaagaccagccagccttgatagtggcagaacatccactagcaatagcaataataatgcttcactacatgaagtcaaagcaggtgcagttaataaccaaagcaggccacaaagccacagcagtggagaatttagcctgcttcatgaccatgaggcttggtccagcagtggtagcagtccaatccagtacttgaaaagacagaccagatcaagcccagtgctccagcacaaaatatctgaaacactggagagtcgacatcacaagatcaaaactggttcccctggaagtgaagttgttactctacaacagtttttggaagaaagcaataagcttacctcagtacagataaagtcctcaagtcaagagaatcttttagatgaagtaatgaaaagtttgtctgtctcttctgactttttgggaaaagacaaaccagttagctgtggtctggccaggtcagtaagtggaaaaaccccaggggacttctatgatagacggacaactaagcctgagtttttgagacctggtcctcgaaaaactgaagatacctacttcattagttctgcgggaaaacctacaccaggcactcaaggaaaaataaaattagtaaaagaatcttctctgtcacgacaatcaaaagatagtaacccttatgcaactttacctcgtgcaagcagcgtgatctcaactgccgaaggaactacacgaaggacaagcatccatgattttttgaccaaggacagtagactgcctatatcagttgattcaccaccagctgctgctgacagcaacaccactgcagcatctaatgtggacaaagtacaagaaagcagaaattcaaaaagcaggtctagggagcaacaaagctcctaattctattacccactacatgacatgtgggccaagtgagagaaaagtgtccttcagtttctcagtatgaagcctttatttctgaagtaacaagacacctagcaactataggaatcatttttaaaaatctttaaggagacttttaacagtccttcgtgaatagagcaggcaagaaatacaaaccttcattccttgaatcaaggagcactactggattcaactgccaaaattttttaaaggttttaggacttactataccttgtactgttaagatctactgaataaaggacgttctctcactaaggaccaggtgttttaaggttaagtgtttaaagaagtactccaagaacaatctgcttttttcatcatttgttttatgaatttatccatgtttgcttaatgcttctgctaagtgttagccaaaatctagccatttatatttagttgtgtaaacctaaattaaatgctgtagtattttgtggaatgtactatatagcaagatacagagaaaattgttttggcatgtcagagccttatttggttagcagactgcatgtgttgatactttttttttcttaaagccaattattttgatgcaaaagaaattcagtttataagataaatctgaaaaatccataatgaaataggagttataaaaaatttatagtgatattaatctttccatatttcccattaagcaacactaagcattcataagttaacccatggtaaagagtgtttttctgaaacttttttttagtaagatggtttttcagcaaatggcattcccaagataaagctgttgtgctttaactcatttcttttctttggtattgggttatgtatgcgtgtgcatttttttaacttgagagctgactgttgcttaagaagttttcttatggcaaaaataatgtaaataagttactatgatctgcattttgccagaaactcatttataattaaggctatcatttattaatgatttttttctcctttatgatattacattaaagttgataactgttattggtacttttgaaatatttgtatgcatttgttacctttaaacatttggaagaagcacaaaaaaatagatttagttaacccagggaaacatcaatttttttagtagttccaattttatatcacagttttattttcttatgaaatcaaaaaatgcattgatactcattaatgcaaattcattatttaacatcaatatcagagtaatcttcaaggtctgaaatgagaaacatactgactttttaaaattttaacagtgtacttcttaggctttcattaccagctctgaagaactttttggaataattccatattccatagtgtgtggtttatgagttgtgggtttcatcactaacccagtaaccataagaaaagtctctctctctctctctctctctctctctttctctctccctctttctctctctctttcgtaggccagtagcaatgttgtgttcacagtctaatttccaaaagaccatcaataaaaaagagagcatgtttaaattgaaatggaacttagagaacttgagcttacttacgtacttcaatgccaccggtaacttaggttttaccaccaaatgctgttaacgttaaatcattttgaaaatcttggatgaaaggtgctatgtaaatggaaatacaaaggattcttactaacatacaaaaataatgcacaacagaaatatctaaaaccttttccgtagactttgaaacatctctctctctcataactccctggattcaagtagcacattggtaataggtatcagagcagtctagagacaattgcatgtcaaaaaatgtacattcatttttaggtggataaaagtaaacatagaaattatgttatggctaaatacagttagtgggtaacttagatttatattagctagcatctaatttgcacaactagaacacatcccagaacaattactgaaaagctgaaatttaatgggtggtgatgtagcccaatgagggcgaatgacattacagcttgacctctccagaacactaatatcctaaaatacagaacatgctgggttaagtgcattagtgcttcaagcagaaaatgctgaaaacaacgtgtaaagtactgaatctgagtaggctgaccctgagaagggacaattaaagagacaaccaagggaacacattgagactacaaaaatatgaataatctcaattatattcatcacacttttttcataccatttcaagaaacgactagacagtagtaaccacatgaatattttactttctccagtataccttgagaagcaaactttgtaggaagccactcttctcccctaaacaacttctgccaaacaataataaagccaactggaaacgaatcggagccattttcattttcctaaccggggcctgacatgctttaaattatctggctgtattctaaatcaacacctaacccctcaaggaaactgaagaatcaatatacagggtaatagctttggctcagagctccaataatgtgcttcagatctgtccatgtggaaatgctttcatccaaatttttaaattggtggttaccaaagagttcacaaaacaggtttgtatgtagcacctttcatgcaaggcatgcaaaaagcctattttaaaatcactgtgcatattatagagttgtagccacctcacaatgaagtactacagcctgtgctgtcttaatggtttatgtcaggaaatgaaaaagatactgtaccaaatctggaattacaatggggagtaataatgtatactaaatgacttttgtattttaagttactttttgtgagtggtgaatttttgtgtttttcttttcagctacacttagtcctgagatgtattttttctttaagtcttgaatgaatacaaaaggagcccattttataatataaaccttgatgtacatgttgagatatttggacaatgaaaatgccttaaaaggaatgcatatggataaagttgcacttataacacccttcaacaaaatctaattttaaattgtctttttcttttctattaagggttttctttttcagtgtctaccattgtacttataactgttattaaataccaaatcaaataatataaaagctgtaacatttcctttaaaactaatgctaataagggatttagagttgaatggcaaaatgtttattacttggcaatacctgatgtcagtcacaggcatccaactcatgacaagagataccactgtttgttttttaaaaaacatttttcattttgtttctccttcaaaaattaagttggactaacattcacgtatcaaactaatataaaaagaaataaaaccaagaggtgatttttgt

SEQ ID NO: 121219 - DNA, 4236 bp, Homo sapiens
  Payload ID: 3767
  Gene Symbol: CCDC88A
  Gene Name: coiled-coil domain containing 88A
  ENST ID: ENST00000444458
  CDS Start-End: 1-1124
aaattatggatcaatacaaattttatgacccatctcctcctagaaggagaggcaactggattactctaaaaatgagaaaattgataaagtctaagaaagatattaatcgggaacgccagaaatctctaacattaacacccacccgctcagactccagtgaaggatttcttcagctccctcatcaagacagtcaagatagttcttcagtaggttcaaactctttagaagatggccagaccttggggaccaagaaaagcagcaatactacatcctttgaagacataagtccacaaggtgttagtgatgattctagtacgggatcaagagttcatgcaggtgcagttaataaccaaagcaggccacaaagccacagcagtggagaatttagcctgcttcatgaccatgaggcttggtccagcagtggtagcagtccaatccagtacttgaaaagacagaccagatcaagcccagtgctccagcacaaaatatctgaaacactggagagtcgacatcacaagatcaaaactggttcccctggaagtgaagttgttactctacaacagtttttggaagaaagcaataagcttacctcagtacagataaagtcctcaagtcaagagaatcttttagatgaagtaatgaaaagtttgtctgtctcttctgactttttgggaaaagacaaaccagttagctgtggtctggccaggtcagtaagtggaaaaaccccaggggacttctatgatagacggacaactaagcctgagtttttgagacctggtcctcgaaaaactgaagatacctacttcattagttctgcgggaaaacctacaccaggcactcaaggaaaaataaaattagtaaaagaatcttctctgtcacgacaatcaaaagatagtaacccttatgcaactttacctcgtgcaagcagcgtgatctcaactgccgaaggaactacacgaaggacaagcatccatgattttttgaccaaggacagtagactgcctatatcagttgattcaccaccagctgctgctgacagcaacaccactgcagcatctaatgtggacaaagtacaagaaagcagaaattcaaaaagcaggtctagggagcaacaaagctcctaattctattacccactacatgacatgtgggccaagtgagagaaaagtgtccttcagtttctcagtatgaagcctttatttctgaagtaacaagacacctagcaactataggaatcatttttaaaaatctttaaggagacttttaacagtccttcgtgaatagagcaggcaagaaatacaaaccttcattccttgaatcaaggagcactactggattcaactgccaaaattttttaaaggttttaggacttactataccttgtactgttaagatctactgaataaaggacgttctctcactaaggaccaggtgttttaaggttaagtgtttaaagaagtactccaagaacaatctgcttttttcatcatttgttttatgaatttatccatgtttgcttaatgcttctgctaagtgttagccaaaatctagccatttatatttagttgtgtaaacctaaattaaatgctgtagtattttgtggaatgtactatatagcaagatacagagaaaattgttttggcatgtcagagccttatttggttagcagactgcatgtgttgatactttttttttcttaaagccaattattttgatgcaaaagaaattcagtttataagataaatctgaaaaatccataatgaaataggagttataaaaaatttatagtgatattaatctttccatatttcccattaagcaacactaagcattcataagttaacccatggtaaagagtgtttttctgaaacttttttttagtaagatggtttttcagcaaatggcattcccaagataaagctgttgtgctttaactcatttcttttctttggtattgggttatgtatgcgtgtgcatttttttaacttgagagctgactgttgcttaagaagttttcttatggcaaaaataatgtaaataagttactatgatctgcattttgccagaaactcatttataattaaggctatcatttattaatgatttttttctcctttatgatattacattaaagttgataactgttattggtacttttgaaatatttgtatgcatttgttacctttaaacatttggaagaagcacaaaaaaatagatttagttaacccagggaaacatcaatttttttagtagttccaattttatatcacagttttattttcttatgaaatcaaaaaatgcattgatactcattaatgcaaattcattatttaacatcaatatcagagtaatcttcaaggtctgaaatgagaaacatactgactttttaaaattttaacagtgtacttcttaggctttcattaccagctctgaagaactttttggaataattccatattccatagtgtgtggtttatgagttgtgggtttcatcactaacccagtaaccataagaaaagtctctctctctctctctctctctctctctttctctctccctctttctctctctctttcgtaggccagtagcaatgttgtgttcacagtctaatttccaaaagaccatcaataaaaaagagagcatgtttaaattgaaatggaacttagagaacttgagcttacttacgtacttcaatgccaccggtaacttaggttttaccaccaaatgctgttaacgttaaatcattttgaaaatcttggatgaaaggtgctatgtaaatggaaatacaaaggattcttactaacatacaaaaataatgcacaacagaaatatctaaaaccttttccgtagactttgaaacatctctctctctcataactccctggattcaagtagcacattggtaataggtatcagagcagtctagagacaattgcatgtcaaaaaatgtacattcatttttaggtggataaaagtaaacatagaaattatgttatggctaaatacagttagtgggtaacttagatttatattagctagcatctaatttgcacaactagaacacatcccagaacaattactgaaaagctgaaatttaatgggtggtgatgtagcccaatgagggcgaatgacattacagcttgacctctccagaacactaatatcctaaaatacagaacatgctgggttaagtgcattagtgcttcaagcagaaaatgctgaaaacaacgtgtaaagtactgaatctgagtaggctgaccctgagaagggacaattaaagagacaaccaagggaacacattgagactacaaaaatatgaataatctcaattatattcatcacacttttttcataccatttcaagaaacgactagacagtagtaaccacatgaatattttactttctccagtataccttgagaagcaaactttgtaggaagccactcttctcccctaaacaacttctgccaaacaataataaagccaactggaaacgaatcggagccattttcattttcctaaccggggcctgacatgctttaaattatctggctgtattctaaatcaacacctaacccctcaaggaaactgaagaatcaatatacagggtaatagctttggctcagagctccaataatgtgcttcagatctgtccatgtggaaatgctttcatccaaatttttaaattggtggttaccaaagagttcacaaaacaggtttgtatgtagcacctttcatgcaaggcatgcaaaaagcctattttaaaatcactgtgcatattatagagttgtagccacctcacaatgaagtactacagcctgtgctgtcttaatggtttatgtcaggaaatgaaaaagatactgtaccaaatctggaattacaatggggagtaataatgtatactaaatgacttttgtattttaagttactttttgtgagtggtgaatttttgtgtttttcttttcagctacacttagtcctgagatgtattttttctttaagtcttgaatgaatacaaaaggagcccattttataatataaaccttgatgtacatgttgagatatttggacaatgaaaatgccttaaaaggaatgcatatggataaagttgcacttataacacccttcaacaaaatctaattttaaattgtctttttcttttctattaagggttttctttttcagtgtctaccattgtacttataactgttattaaataccaaatcaaataatat

SEQ ID NO: 121220 - DNA, 2208 bp, Homo sapiens
  Payload ID: 3767
  Gene Symbol: CCDC88A
  Gene Name: coiled-coil domain containing 88A
  ENST ID: ENST00000456975
  CDS Start-End: 1-2208
taagaagtctcttgaaataaaagaagaaaaaattgctgctttagaagctcgattagaagaatccacgaattataaccagcaattgcgccaagaacttaaaacaaatgctacactgcaagcagagaagcaagcgttgaaaactcaactgaagcaacttgagacacagaacaataatttgcaggctcagattcttgcacttcagaggcagacagtgtcattacaagaacagaataccactcttcaaacacagaatgccaagcttcaggttgaaaattccacccttaattcccaaagtacctcactcatgaaccagaatgcccaactcctaatccagcagtcttccttagaaaatgaaaatgaatctgtaatcaaagagcgagaagacctaaaatctctctatgattctctgatcaaagatcatgaaaagctggaacttcttcatgaacgtcaggcttcagagtatgaatctcttatctctaaacatggaactctgaagtctgcccacaaaaatcttgaggtggaacatagagaccttgaagaccgttacaatcagttattaaaacagaaaggacagttggaagatttggaaaaaatgctcaaagtagaacaggaaaaaatgctgcttgaaaataaaaatcatgaaacagtagctgcagaatacaagaaactttgtggtgaaaatgataggctgaatcatacctatagtcaacttttaaaagagactgaagttttacaaactgaccataaaaatttgaaaagtcttctgaataattccaaactggaacaaacaagattagaagctgaattttcaaaactaaaggaacaataccaacaattggatattacatcaaccaagctgaataaccagtgtgagttgctaagccaacttaaaggaaatttagaagaagaaaatcggcatctactagatcaaattcagacattaatgctacagaacagaacacttttggagcagaatatggaaagcaaggatctttttcatgttgaacaaagacagtacattgataagttaaatgaattaagacgtcagaaggagaaactagaagagaaaattatggatcaatacaaattttatgacccatctcctcctagaaggagaggcaactggattactctaaaaatgagaaaattgataaagtctaagaaagatattaatcgggaacgccagaaatctctaacattaacacccacccgctcagactccagtgaaggatttcttcagctccctcatcaagacagtcaagatagttcttcagtaggttcaaactctttagaagatggccagaccttggggaccaagaaaagcagcaccatgaatgacctggtgcagtccatggtcctagcaggacagtggacaggtagtactgagaatttggaggttcctgatgatatttcaacgggtaaaaggagaaaagaattgggagctatggccttctctactacagccatcaacttttcaactgtcaactcttctgcaggcttcagatccaagcagttggttaataataaagatactacatcctttgaagacataagtccacaaggtgttagtgatgattctagtacgggatcaagagttcatgcttcaagaccagccagccttgatagtggcagaacatccactagcaatagcaataataatgcttcactacatgaagtcaaagcaggtgcagttaataaccaaagcaggccacaaagccacagcagtggagaatttagcctgcttcatgaccatgaggcttggtccagcagtggtagcagtccaatccagtacttgaaaagacagaccagatcaagcccagtgctccagcacaaaatatctgaaacactggagagtcgacatcacaagatcaaaactggttcccctggaagtgaagttgttactctacaacagtttttggaagaaagcaataagcttacctcagtacagataaagtcctcaagtcaagagaatcttttagatgaagtaatgaaaagtttgtctgtctcttctgactttttgggaaaagacaaaccagttagctgtggtctggccaggtcagtaagtggaaaaaccccaggggacttctatgatagacggacaactaagcctgagtttttgagacctggtcctcgaaaaactgaagatacctacttcattagttctgcgggaaaacctacaccaggcactcaaggaaaaataaaattagt

SEQ ID NO: 121221 - DNA, 3089 bp, Homo sapiens
  Payload ID: 3767
  Gene Symbol: CCDC88A
  Gene Name: coiled-coil domain containing 88A
  ENST ID: ENST00000621814
  CDS Start-End: 760-2985
cgggcagtggaggctccgcgggtcgaaagcggctccatgcccatcggtgggtggaacgtgtagaggtcggaacgccgaggtcgagtctggtggcgcctcggtatccttaacgtggtctctgtttaacgtatttcatttagcccccgttgggattgattcattgggagcagtttcgctggtctggatcctccaggagctggacaaccttgacgggctttttgtcttgggttccagccccctttcccttcctcctcctccagatgccttttctctgcccctcctcgcccggtacagacatttccagcgcaggctgctgctcgtggtgtccgtcgtcgaagccacttcttgggatttcggctcgtttcactctggggtgttttttgaggagggagagtgcccccctcctccacgatgggatttttctcccttgccgaaatggactttcattgatttctacttacttccacgtttagtgaccaattccctaggcgtatttttgtggtagttccttttttcaaatacatactctgtaaaatggagaacgaaatttttactccccttctggagcagttcatgaccagccctttggtcacttgggttaaaacgtttggacctctggccgcaggaaatgggaccaaccttgatgaatatgtggctttggtggatggggtattcttgaaccaggtcatgctccaaattaatcctaaattggagagtcagagagtaaataaaaaagtcaataatgatgcctcacttagaatgcacaatctatccattttggtgagacagataaaattttattaccaggagactttgcagcaattgatcatgatgtcgttgccaaatgtcttaatcattggcaaaaatcccttttctgaacaaggcacagaagaagttaaaaaactgcttttacttttattgggttgtgcagttcagtgtcagaaaaaagaggaatttattgaaagaattcaaggtttagattttgatacaaaagcagcggttgccgcacatattcaagaggtaactcataatcaggaaaatgtgtttgacctgcaatggatggaagtgactgatatgtcgcaggaggacatagaaccactcttgaaaaatatggcattgcatctaaaaagacttatagatgagagagatgaacattcagagactatcatagaactctctgaagagcgggatggtctccattttctaccccatgcctcttcatctgcacagtcaccctgtggttctccaggcatgaagcgaacagaaagtcgacaacatctgtcggtggaactggcagatgctaaagccaagataagaaggcttaggcaggaattggaggaaaagactgagcagttgttggattgtaaacaagaacttgagcaaatggaaatagaactcaaaaggctgcaacaagagaacatgaatttgctttcggatgctcgctctgccagaatgtaccgagatgaattagatgcacttcgagagaaagcagtcagagtcgataagcttgaaagtgaagtcagcagatataaagagagactacatgatattgaattttataaggcaagagttgaggaattaaaagaagacaatcaagttttattagaaacaaaaaccatgttggaagaccaactagagggaactcgtgctcgttctgataaattacatgaattagaaaaagagaacttacaactgaaagctaaacttcatgatatggaaatggaacgagatatggatagaaaaaagattgaagaattaatggaagaaaatatgactttggaaatggcacagaaacaaagtatggatgaatcattacatcttggctgggaactggaacagatatccagaactagtgaactttccgaagcaccccagaaatccctgggccatgaggtgaatgagttgacatcaagtagattattgaagctagagatggaaaatcaaagtttgacaaaaaccgtagaagagcttcggactactgtggattctgtagaaggcaatgcttccaaaatcctgaaaatggaaaaagaaaatcaaaggctcagtaaaaaggttgagattcttgaaaatgagattgttcaagaaaagcaaagtcttcagaattgtcagaatttaagcaaggatctaatgaaggagaaagctcagcttgaaaaaacaatagaaacactgagagaaaattcagagagacagattaagatactggaacaggaaaatgaacatctgaatcaaacagtgtcttccttaaggcagcggtcccagataagtgcagaagcaagagtgaaagacattgaaaaagaaaacaaaattcttcatgaatctatcaaagaaacaagtagcaagctaagcaagattgaatttgaaaaaagacaaattaaaaaagaattggaacattataaagaaaaaggagaacgagctgaagaacttgaaaatgaattgcatcatcttgaaaaagaaaatgaattattacagaaaaaaataactaatttaaaaattacttgtgaaaaaattgaggccttagaacaagaaaattcagagctagaaagagaaaatagaaaattaaaaaaaacattggatagctttaaaaatctgacctttcagttagaatccctagaaaaagagaattcccaacttgatgaggaaaacttagaactgcgaaggaatgtagaatctttgaagtgtgcaagcatgaaaatggctcagctacagctagaaaacaaagaactggaaagtgaaaaagagcaacttaagaagggtttggagctcctgaaagcatctttcaagaaaacagaacgcttagaagttagctaccagggtttagatatagaaaatcaaagactgcaaaaaactttagagaacagcaataaaaaaatccagcaattagagagtgaactacaagacttagagatggaaaatcaaacattgcagaaaaacctagaagaactaaaaatatctagcaaaagactagaacagctggaaagaaaataaatcattagagcaagagacttctcaactggaaaaggataagaaacaattggagaaggaaaataagagactccgacaacaagcagaaattaaagataccacattag

SEQ ID NO: 121222 - DNA, 870 bp, Homo sapiens
  Payload ID: 3768
  Gene Symbol: CCDC88B
  Gene Name: coiled-coil domain containing 88B
  Uniprot ID: A6NC98
  ENST ID: ENST00000301897
  CDS Start-End: 12-431
ggaccagcttaatgccctgcgccgcgagaagcagaagctcgtggagaagatcatggaccaataccgcgtgctggagcctgtgcccctgccccggaccaaggtccccttccccggcacccatgcgccgggcccagagctccctctgcctgcgggatgagaccttggcaggcgggcagcggcggaaactcagctcaaggttcccggtggggcgaagctctgagtcattcagccctggggacacccctaggcaacgattccgacagcgccatccaggccccctgggggcgcccgtctcccacagcaaaggacctggtgtgggatgggagaactccgctgagaccctgcaggaacacgaaacagatgccaaccgagagggccctgaggtacaggaaccggagaaacgtcccctcaccccatccctcagccagtgacaccgtgggaacagcaggcttgggagtgcagccttctcggcactggagtgtcagcggaggccccaggcagcccaagagctcagggagccagggaccccaaggggagtccttggacaaggaggcctgggccctgagatcctccacggtcagcgccggggcccggagatggagctgggacgagtgtgtggacaggggggatggctggcccccacgagcagctccaggctggagttctggttcttccaggtggctcccgctgaggcagcggtctctgggggatcccccagctgaaggaggctggcaggagttggcaagagaaccccctgccctgtccaggtgggaagctgagtcccagtgctgggggactgtggcctgggctgatcttgagccttaactggacatgaggggcatgagaataaagctgaactgcagcctcctg

SEQ ID NO: 121223 - DNA, 4915 bp, Homo sapiens
  Payload ID: 3768
  Gene Symbol: CCDC88B
  Gene Name: coiled-coil domain containing 88B
  Uniprot ID: A6NC98
  ENST ID: ENST00000356786
  CDS Start-End: 45-4475
ggcaggtgcagctgccacagtgagacgggcaccccgacccgggcatggaggggggcaaggggcccaggctcagagacttcctgagtgggagtctggctacctgggcgctgggactggccgggctggtcggggaggcggaggactcggagggggaagaagaggaagaggaggaagagccgcccctttggttggagaagagattcctgcgcctcagcgatggggccctgctcctccgggtgctgggcatcattgcccccagctcccgagggggacctcggatgctcagaggccttgacggacctgctgcctggcgagtgtggaacctgaaccacctgtggggccgactgagggacttctaccaggaggagctgcagctgctgatcctgtcgccacccccagacctccagacattgggatttgaccctctctcagaagaagcggtggagcagctggaaggcgttcttcggctactgttgggagcgtcagtacagtgtgagcaccgggaactcttcatccgccacatccagggcctcagtctcgaggtccagagcgagctggccgctgccatccaggaggtgacccagccgggggccggcgtggtgctggcactgtctgggccagatcctggggagctggcacctgccgagctggagatgctgtcccggagcctgatggggacactgtcgaagctggcacgggagcgtgacctgggggcccagcggctggctgaactgctgctggagcgagaacccctctgcttgaggcctgaggctccctctagggctcccgccgagggcccctcgcaccatctggccctgcagctggccaacgccaaggctcagctgcggcgtctgcggcaggagctggaggagaaggccgagctgctgctagactcccaggccgaggtgcagggtttggaggccgaaataagaaggctccgccaggaggcccaggcgctgtcgggacaggccaagcgggccgagctgtaccgcgaggaggcagaggcgctgcgggagcgggccggccgcctgccccgcctgcaggaggagctgaggcgctgccgcgagcggctgcaggcggctgaggcctacaagagtcagctggaggaggagcgggtgctctcgggggtgctggaggcgtccaaggcgctgctggaagagcagctggaggctgcccgagagcgctgcgcccggctgcacgagacccagcgcgagaacctgctgctgcgaacccggctgggcgaggcccatgcggagctggactctctgcggcatcaggtggaccagctggctgaggagaatgtggagctggagctggagcttcagcggagcttggagccacctccaggatcccctggggaggcacccctagcaggagcggccccctcgctgcaagatgaggtgagggaggcagaggctgggcggcttcggacccttgagagggagaaccgggagcttcgggggctgcttcaggtgcttcaggggcagccagggggccagcaccccctgctggaggcaccgagagaggaccctgttcttccagtgctggaggaggctccccagactcctgtggccttcgaccacagccctcagggcttggttcagaaggcaagggatggaggcccccaggccttggacttggctcccccggcattagactcagtgctcgaggcatcagctgagtgtccccaggcacctgattcagacccacaggaggcagagagtccccttcaggcagctgccatggacccccaggcctcagactggtccccgcaagagtcaggctctcctgtggagacacaggagtccccggagaaggctggccgtagatcctctctccagagccctgcctctgtggccccacctcagggtccagggaccaaaattcaggccccgcagttgctgggaggagagacagagggaagagaggctccccaaggcgagttggtgcctgaggcctgggggttgagacaggagggccctgagcacaagccagggccttcggagcccagctctgtgcagctggaggagcaggagggcccaaaccagggcctggacctggccacgggacaagcagaggccagagagcatgaccagaggctggaagggacggtcagggacccagcctggcaaaaaccacagcagaagtcagaaggggctcttgaggtccaggtctgggaaggcccaatcccaggggagagcctggccagtggtgtcgcagagcaggaggccctcagggaggaggtggcacagttgaggagaaaggctgaggcccttggagatgagctggaagcccaggcccgcaagctggaggcccaaaacacggaggctgcccgcctctccaaggagctggcccaagcgcgaagggcagaggccgaggcccaccgggaggcagaggcccaggcctgggagcaagcccggctgcgggaggcagtggaggctgctggccaggagctggagtctgcgtcccaggaacgggaggcgctggtggaggcgctggcagcagcgggccgggagcggaggcagtgggagcgtgaggggtccaggctgcgggcccagtcggaggccgccgaggaacggatgcaggtgctggagagcgagggccgccagcacttggaggaggctgagagggagcgccgggagaaggaggccctccaggcggagctggagaaagctgtggtgcggggcaaggagttgggggaccggctggagcatttgcagcgtgagctggagcaggcggctctcgagcgccaggaatttctgcgagaaaaggaaagccagcaccagaggtaccagggcttggagcagcggctggaagctgagctgcaggcggcggcgaccagcaaggaggaggcgctgatggagctcaagaccagggccctgcagctggaagaggagctgttccagctgcgccagggccccgcggggctggggcccaaaaagcgtgcggagcctcagctggtggagacccagaatgtgcggcttattgaggtggagcgcagtaatgcgatgctggtggcagagaaggcagctttgcaggggcagctgcagcacctggaggggcagctggggagcctgcagggccgtgcccaggagctgctgctgcagagccagcgggcgcaggagcacagcagccgcctgcaggccgagaagtctgtgctggagattcagggccaggagctgcaccggaagctggaggtgctggaggaggaggtgcgggcggcacggcagtcccaggaggagacccgcgggcagcagcaggccctgcttcgggaccacaaggccctggcacagctgcagcggcggcaggaggccgagctagagggactgctggtgcggcaccgagacctcaaggccaacatgcgggcactggagctggcccaccgggagctgcagggccggcacgagcagctgcaggcccagcgggccagcgtggaggcacaggaggtggccctgctggcagagcgtgaacgcctgatgcaagatgggcatcggcagcggggcctggaggaggagctgcggaggcttcagagcgagcacgacagggctcagatgctgctggcagagttgtctcgggagcggggtgagctgcagggtgaacgcggggagctacggggccggctggcgcggctggagctggagcgggcacagctggagatgcagagccagcagctgcgcgagtccaaccagcagctggacctgagcgcctgccggctgaccacgcagtgtgagctattgacacagctgcgaagtgcccaggaagaggagaaccggcagctgctggctgaagttcaggccctgagccgggagaacagggagctcctggagcgcagcctggagagtcgggaccacctgcaccgcgaacagcgggagtacctggaccagcttaatgccctgcgccgcgagaagcagaagctcgtggagaagatcatggaccaataccgcgtgctggagcctgtgcccctgccccggaccaagaagggcagctggctggcagacaaggtgaagaggctgatgcggccccggcgggaggggggcccccctggggggctgcgcctgggggccgatggggctggcagcaccgagagcctggggggccccccggagacggagcttcctgagggcagggaggcagatgggacagggtccccttccccggcacccatgcgccgggcccagagctccctctgcctgcgggatgagaccttggcaggcgggcagcggcggaaactcagctcaaggttcccggtggggcgaagctctgagtcattcagccctggggacacccctaggcaacgattccgacagcgccatccaggccccctgggggcgcccgtctcccacagcaaaggacctggtgtgggatgggagaactccgctgagaccctgcaggaacacgaaacagatgccaaccgagagggccctgaggtacaggaaccggagaaacgtcccctcaccccatccctcagccagtgacaccgtgggaacagcaggcttgggagtgcagccttctcggcactggagtgtcagcggaggccccaggcagcccaagagctcagggagccagggaccccaaggggagtccttggacaaggaggcctgggccctgagatcctccacggtcagcgccggggcccggagatggagctgggacgagtgtgtggacaggggggatggctggcccccacgagcagctccaggctggagttctggttcttccaggtggctcccgctgaggcagcggtctctgggggatcccccagctgaaggaggctggcaggagttggcaagagaaccccctgccctgtccaggtgggaagctgagtcccagtgctgggggactgtggcctgggctgatcttgagccttaactggacatgaggggcatgagaataaagctgaactgcagcctcctga

SEQ ID NO: 121224 - DNA, 2326 bp, Homo sapiens
  Payload ID: 3768
  Gene Symbol: CCDC88B
  Gene Name: coiled-coil domain containing 88B
  ENST ID: ENST00000359902
  CDS Start-End: 151-2289
ctggcagcatcctggcgccccctgcccccccagcccccactgtcagctcctgacttcctgtccctccagccctccgtggccttttccctgtagccaaggtctctcacccgacccacctctgctgagcctctctagctgtctcgctgtcacatggctggggtggcagcccaccgggcgcatccacctttcactgcgcacatgaagaaccgtgggctcagagaggagctggagaaagctgtggtgcggggcaaggagttgggggaccggctggagcatttgcagcgtgagctggagcaggcggctctcgagcgccaggaatttctgcgagaaaaggaaagccagcaccagaggtaccagggcttggagcagcggctggaagctgagctgcaggcggcggcgaccagcaaggaggaggcgctgatggagctcaagaccagggccctgcagctggaagaggagctgttccagctgcgccagggccccgcggggctggggcccaaaaagcgtgcggagcctcagctggtggagacccagaatgtgcggcttattgaggtggagcgcagtaatgcgatgctggtggcagagaaggcagctttgcaggggcagctgcagcacctggaggggcagctggggagcctgcagggccgtgcccaggagctgctgctgcagagccagcgggcgcaggagcacagcagccgcctgcaggccgagaagtctgtgctggagattcagggccaggagctgcaccggaagctggaggtgctggaggaggaggtgcgggcggcacggcagtcccaggaggagacccgcgggcagcagcaggccctgcttcgggaccacaaggccctggcacagctgcagcggcggcaggaggccgagctagagggactgctggtgcggcaccgagacctcaaggccaacatgcgggcactggagctggcccaccgggagctgcagggccggcacgagcagctgcaggcccagcgggccagcgtggaggcacaggaggtggccctgctggcagagcgtgaacgcctgatgcaagatgggcatcggcagcggggcctggaggaggagctgcggaggcttcagagcgagcacgacagggctcagatgctgctggcagagttgtctcgggagcggggtgagctgcagggtgaacgcggggagctacggggccggctggcgcggctggagctggagcgggcacagctggagatgcagagccagcagctgcgcgagtccaaccagcagctggacctgagcgcctgccggctgaccacgcagtgtgagctattgacacagctgcgaagtgcccaggaagaggagaaccggcagctgctggctgaagttcaggccctgagccgggagaacagggagctcctggagcgcagcctggagagtcgggaccacctgcaccgcgaacagcgggagtacctggaccagcttaatgccctgcgccgcgagaagcagaagctcgtggagaagatcatggaccaataccgcgtgctggagcctgtgcccctgccccggaccaagaagggcagctggctggcagacaagggtccccttccccggcacccatgcgccgggcccagagctccctctgcctgcgggatgagaccttggcaggcgggcagcggcggaaactcagctcaaggttcccggtggggcgaagctctgagtcattcagccctggggacacccctaggcaacgattccgacagcgccatccaggccccctgggggcgcccgtctcccacagcaaaggacctggtgtgggatgggagaactccgctgagaccctgcaggaacacgaaacagatgccaaccgagagggccctgaggtacaggaaccggagaaacgtcccctcaccccatccctcagccagtgacaccgtgggaacagcaggcttgggagtgcagccttctcggcactggagtgtcagcggaggccccaggcagcccaagagctcagggagccagggaccccaaggggagtccttggacaaggaggcctgggccctgagatcctccacggtcagcgccggggcccggagatggagctgggacgagtgtgtggacaggggggatggctggcccccacgagcagctccaggctggagttctggttcttccaggtggctcccgctgaggcagcggtctctgggggatcccccagctgaaggaggctggcaggagttggcaagagaaccccctgccctgtccaggtgggaagctgagtcccagtgctgggggactgtggcctgggctgatcttgagccttaactggacatgaggggcatgagaataaagctgaactgca

SEQ ID NO: 121225 - DNA, 3104 bp, Homo sapiens
  Payload ID: 3769
  Gene Symbol: CCDC88C
  Gene Name: coiled-coil domain containing 88C
  ENST ID: ENST00000331194
  CDS Start-End: 284-1804
tccgacattggagatttctaatccctttcctttatcatgtgtctgtattgtgtaccctccttcatttccgaaattcaaacaaacaaaaaaagccagcgtctaaaaggccagatggccgatagcggacccctcctcctgcccccaatttcaagcttaaagtagccagcgtggattctgatttcaaaatagaagatgagttgtcacactccctggaccatttcttcagcacaacacagttttagggggagcctcaggatatacgtgcacatgtccttgggccaggatgtccgtactaagccctggggatctaaaaccaaagcgaggctccccacacagaggcagccttgaccgcacagatgcctccaccgatctggccatgaggtcctggccctcggagctgggctcccggacttgctcaacttcagccaccactacagccccttccaactccacccccatcgcccggcacccaggccgcaccaaaggctataactcagatgacaacctctgtgagccatccctggagtttgaggtccccaaccacaggcagtacgtgtcgcggccaagtagcttagagagcagtagaaacacatccagcaacagctcacctcttaacctaaaaggctcctccgagcagctccatggccggtctgagagcttcagcagcgaagacctgatccccagcagggacctggccactttgccccgggaagccagcacaccgggacgcaacgccctcggccgccacgagtaccccttgcctcggaacgggcctctcccacaggagggtgcccagaagaggggcacagcccctccctacgtcggagtgcggccctgctcggcctcccccagcagtgagatggtcaccttggaggagttcctggaggagagcaaccgcagctcccccacccatgacactcccagttgccgggatgacctgctgagtgactacttccgaaaggccagcgatcccccagccatcggaggccaaccaggaccacctgccaagaaagaaggggccaagatgcccaccaactttgtggcccccaccgtcaaaatggccgcccccacctcggaggggaggccgctgaagcccgggcagtacgtaaagccaaacttcagactgactgaggccgaggccccacccagcgtggccccgagacaggcccagcctccccagagcctgtctctgggcagaccccggcaggctcctgaggccttagggggcagagagacaggcagccacaccctgcaaagccccgcaccccccagctcccatagcctggcccgggagcggaccccacttgtgggaaaggctggcagctcctgtcagggcccaggtccccgcagccggccgctggacacgaggcgcttctccctggctcccccaaaggaggagaggctggcccccctgcatcagtctgccacagcccccgccattgccactgcaggtgctggtgctgctgctgctggcagtggcagcaactcccagctcctgcacttctcacctgctgcagccccggctgccaggaccaagcccaaggcgcccccacgctcaggggaggtggccaccatcacccctgtccgggcagggctcagcctctcagagggagacggggtcccggggcagggctgcagtgaggggcttccggccaagagcccaggtcggtctcccgatttggctccccacctcggccgggccctggaggactgcagtcgagggagcgtctcaaagagcagtccggcctccccggagcccggcggggatccgcagaccgtgtggtatgagtacggctgtgtgtgactgtctcgtggttgagctcgcaaacctgaaaactactgacgcgccttccgactctcacggccttttctcttgcttgcctgcggtgccaggagagggtttggaatgaggaaaggggttcccacgcatttctgctgtttgttctgtgaatggaaacactgtgccaagccccaagaggattacgcttccaggtgtgtaacgtgttttctgtgtctgccgcttccagcagctgatatctttggaacaaataatccacgtcagcatggggaccaattaggatgcaatgacaaactgacttcccccaaagcagacactactccagtatgtcccagtagaacactcatttgcaatgtgttgagctccgttaagcacacacacactcacacaacaggcttacgaggctcaggcctggcgggtcagaaagcccactccctctcccaaggccactggatcccaggagaagcccagactggcgatactacaaaggtctccagggcctggcagaccccagagtcaggcctgctgttaaaaagtgagagtgctgctgttccattcctggggtcccaagcacttccctttaccccaggacccagggcagcctgcagggcagctggcggtggccttggccatttgcccccagcctccagctggctcctgagctctgcaccagggggtttggggaccacacaggcacctgccttcctagatttccctggctcacttttctgcaaacactggatctgccaggcctggggattggggggcaggaaagaggcccccatccagccccctccaggccagtgtgcacagtgcaccgaggggtcatccgcacagagcgaggtgcaagctcgatgtgtaacctggctgcggcacccgacatccccggtctcggggtgttgatttatttctgaataactttttgggtatagaaaccaattttttttaatatatgacatgtatatgtacacactcatgtgaaatatgtatactttggggggatctatttatgttccagtgggagtcactctcttctgtcgggaatcttatctgctgctttgtgtctttggtcagattcctgacaatttagtttcctgttgtaaaggtgcttttcctggggtgaactaaacctattgattttttttttttaagatttttttttccttttgatttaatatactgagaaagaaatgggagacttttgaatgttaacaagatccattttaggagtgtttggggttgtgtattaaatagccattcattctggaactcaaggacaggactgtaataaaatggaatggaaccg

SEQ ID NO: 121226 - DNA, 1641 bp, Homo sapiens
  Payload ID: 3769
  Gene Symbol: CCDC88C
  Gene Name: coiled-coil domain containing 88C
  ENST ID: ENST00000389856
  CDS Start-End: 151-417
ctgcctcggggcggaccgggtcccagtggtcactcctgtccctggggtttagccactcccgaaaaggaccccattcttcccaaccaaatatctcatgtagtttttctgaatccctgagaccagccggtggatggcggtgacgggtggggaatggggggcgccgaatgggaaagcgaacagactggggtgaaaacttttggcccgtttggaagcggcagccaggacaacctgactatgtacatggatttagtggacggcatctttttgaaccaaattatgctgcaaatagatcccaggcccacaaatcaacgcatcaataagcacgtcaacaatgatgtgaaccttcgcattcagaatttgaccatcttggtgagaaacattaagacctactaccaggatagaccctttttccggtaactaaacttcttgcgggcagacacagcgtttgagttttcgcattggcttcaaacaaacccagtggaagtggacagtgaacaagacacccccgcaggaggcccgggcacggggtgtggctgccaggcctggccatggaaggccatcactgtgggctcttctgggagtggcactgacagccagcaaggagaatgggtgctggggcggagtggaagaaggtgagcttgaggccggagttcctaccccaggaggcaccgtcagcgtcccacttctgctcgtgtgatcccctggaggcacctgaatcaggcagtaaacatggagtgagaaacaccggagtagaagaccttgcaacagcacatgtgtgggcccagttcctagctgccccgggtggccaaggccacatcctgtacacacaggtctgggagtgtctgcatttcagcccttgaccgtgaacttgaccctctggaggtgtccatcttgatgtgatcctctgactgcaacctcatcctctgcctctcagagctgcctccccctgtggcttcttgccctgaggcatgggaggcgttggtgccaggagcttggggtttgagtcaggttggctcggggataagacccagcctttccacacattagtttgtgatgctgggtcatagtgcgtctgtttgctccctgtcaagggaccagtaacatgaggggtcagagaagggatcagaactctcgtgggcctccagtgtgtcgcaagtttttgctgttctgcttttcctcagctgctggtgggaatgcaaattgctgtgctgactttggaaaaactctccggcagtaaagcctaaagttccacatccacacaccgtactgtggcccagctgatttctctcctaagggtatcccggagtaacttctgcacatggatgcctgggactttacagcccttctgcacacaataacagaaacctggaagccacccagatgcccatcagtgggagaagggatgaatacacgaagacacgatcacacaatggaatattatacagctgtccaaacacattaactgcagcataacttcagtgatgtaggtggattctggcaatatcataaatattagtaaaaatagcatgttcccaatgatgacttacagcactatgccttttaaaaataaagttaaaagcaactacaatgactgtactctctaggaaaatttacaggtgcaataaaactacataaaaaaga

SEQ ID NO: 121227 - DNA, 7474 bp, Homo sapiens
  Payload ID: 3769
  Gene Symbol: CCDC88C
  Gene Name: coiled-coil domain containing 88C
  Uniprot ID: Q9P219
  ENST ID: ENST00000389857
  CDS Start-End: 88-6174
tgctcgctgcggagccgttttgtgccgcggcgcgggggaacggggacgcggggcggggggcgcggagccggcgggcgcagcctcagcatggacgtgacagtctcggagctcctggagctcttcctgcagagcccgctggtgacctgggtgaaaacttttggcccgtttggaagcggcagccaggacaacctgactatgtacatggatttagtggacggcatctttttgaaccaaattatgctgcaaatagatcccaggcccacaaatcaacgcatcaataagcacgtcaacaatgatgtgaaccttcgcattcagaatttgaccatcttggtgagaaacattaagacctactaccaggaagttctccagcagctgattgtaatgaatttgcccaatgttttgatgattggcagagacccactgtctgggaagagcatggaggaaatcaagaaggtgctgctgctggtgctgggctgtgctgtccagtgtgagaggaaagaggagttcattgaaagaatcaaacagctggacattgagacccaggctggcatcgtggcccatatccaggaggtgactcacaaccaagagaacgtgtttgacctgcagtggctggagctgcccgacgtggctccggaggagctggaggccctgtcgaggagcatggtgctccacctgcggaggctcatcgaccagcgggacgagtgcaccgagctgatcgtggacctcactcaggaacgggactacctgcaggcacagcatccacccagccccatcaagtcctccagcgccgactccactcccagccccaccagcagcctctctagcgaagacaagcagcacctggccgtagagctggccgacaccaaggccaggctgcggcgcgtcaggcaggagctggaggataagacagagcagcttgtggacaccagacatgaggtggaccagctggtgctggaactgcagaaagttaagcaggagaacatccagctagcggcagacgcccggtctgctcgtgcctatcgagacgagctggattccctgcgggagaaggcgaaccgcgtggagaggctggagctggagctgacccgctgcaaggagaagctgcacgacgtggacttctacaaggcccgcatggaggagctgagagaagataatatcattttaattgaaaccaaggccatgctggaggaacagctgactgctgctcgggcccggggcgataaagtccatgagctggaaaaggagaacctgcagctgaaatccaagcttcacgacctggaattggaccgggacacagataagaaacgaattgaggagctgctggaagaaaacatggtccttgagattgcacagaagcagagcatgaacgaatctgcccaccttggctgggagctggagcagctgtccaagaacgcagacttgtcagacgcctccaggaagtcgtttgtgtttgagctgaacgaatgtgcgtccagccgcatcctgaagctggagaaggagaatcagagcctccagagcaccatccaggggctgcgggacgcgtccctggtgttggaggagagcggcctcaagtgcggggagctggagaaggagaaccaccagctcagcaagaagattgaaaagttacaaacccagctggagagagaaaagcagagcaaccaagatctggagaccctcagtgaggagctgatcagagagaaggagcagctgcagagtgacatggagaccctgaaggctgacaaagccaggcagatcaaggaccttgagcaggaaaaggaccacctcaaccgagccatgtggtcgctgcgggagaggtcgcaggtcagcagtgaggcccgcatgaaagacgtggagaaggagaacaaagccctccaccagacggtgacggaggccaatggcaagctcagccagttggagtttgagaagcggcagctgcacagggacttggagcaggccaaggagaagggggagcgggcagagaagctggagagggagctacagcgactccaggaggagaacgggaggctggccaggaaggtgacctccctggagacagccaccgagaaagtcgaggccctggagcatgagagccagggcctgcagctggagaaccggactctgaggaagtctctggacaccttgcagaacgtgtccctgcagcttgagggcctggagcgtgacaacaagcagctggacgcagagaacctggagctgcgcaggctggtggagaccatgcgcttcaccagcaccaagctggcacagatggagagggagaaccagcagctggagcgtgagaaggaggagctgaggaagaacgtggatctgctcaaggcgctgggcaagaagtcagagcgcctggagctcagctaccagagcgtgagcgctgagaacctccggctgcagcagagcctggagagcagcagccacaagacgcagaccttggagagtgagctgggcgagctggaggctgagcgccaggcgctgcggcgggacctggaggccctccggctggccaatgcacagttggagggggccgagaaggacaggaaggccctggagcaggaggtggcccagctcgagaaggataagaagctgctggagaaggaggccaagcggctgtggcagcaggtggagctcaaggatgcagtcttggacgatagcactgccaaactgtccgccgttgagaaggagagccgcgcgctggacaaggagctggcccgctgcagggacgcagccggcaagctgaaggagctggagaaggacaaccgggacctcaccaagcaagtcaccgtgcatgcaaggacactgacaactctgagggaggacctggtgctcgagaagctgaagagccagcagctcagcagtgagctggacaagctgagccaggaactggagaaggtcggcctcaacagggagctgctgttgcaggaggacgacagcggcagtgacacaaaatacaagattttggagggcagaaatgaatcagcattaaaaacaacactagccatgaaagaagaaaagattgtgctcttagaagcacagatggaagagaaagcgagcctaaatcgccagttagagagtgagctgcagatgctaaagaaggagtgtgagaccctcaggcagaaccagggagaggggcagcacttgcagaactctttcaagcaccctgcggggaagacagccgccagtcaccaggggaaggaggcctgggggcccggccataaggaagccaccatggagcttctccgagtgaaggaccgggccatcgagctggagcggaataatgcagctctgcaggctgagaagcagctgctaaaggaacagctgcagcacctggagacccagaacgtgaccttcagcagccagatcttgacactgcagaaacagagcgccttcctgcaggagcacaacaccacactgcagacccagaccgccaagctgcaggtggagaactccacgctgagttcccagagcgcagcgctcaccgcgcagtacacgctgctgcagaaccaccacacggccaaggagacggagaacgaaagcctgcagaggcagcaggagcaacttacagcggcctacgaggccctgctgcaggaccacgagcacctgggcacgctgcacgagcggcaatcggccgagtacgaggccctcatccgccagcacagctgcctaaagacactgcatcggaatctggagctggagcacaaggagctcggggagaggcacggtgacatgctgaagcgcaaggcggagctggaggagcgggagaaggtcttgaccactgagcgagaggcgctgcagcaggagcagaggacaaacgccctcgccatgggcgagaaccagaggctgcggggcgagctggacagggtcaatttcctgcaccaccagctgaagggggagtacgaggagctgcacgcccacaccaaggagctgaaaacctcactgaacaacgcgcagctggagctcaaccgctggcaggcccgcttcgacgagctgaaggagcagcaccagaccatggacatctcgctgaccaagctggacaaccactgtgagctgctctcccgtctcaaggggaacttggaggaagaaaatcatcacctcctgagccagatccagctgttgagccagcagaaccagatgcttctggagcagaacatggagaacaaggagcagtaccatgaggagcagaagcagtacatagacaaattaaatgccttacgaagacataaggaaaagctggaagaaaaaatcatggatcaatacaagttctatgatcctcctccaaagaagaagaaccactggattggagccaaagccttagtcaaactcatcaaaccaaagaaagagggttcgagggaacgcttaaaatccaccgtggacagccctccctggcagctggagtcctcagaccccgcctcgccggcggcctctcagccgctcagatcacaggccgagaaccccgacacccccgcactgggctccaactgtgcagaagagcgcgacgcccacaacgggtctgtggggaaaggccctggggatctaaaaccaaagcgaggctccccacacagaggcagccttgaccgcacagatgcctccaccgatctggccatgaggtcctggccctcggagctgggctcccggacttgctcaacttcagccaccactacagccccttccaactccacccccatcgcccggcacccaggccgcaccaaaggctataactcagatgacaacctctgtgagccatccctggagtttgaggtccccaaccacaggcagtacgtgtcgcggccaagtagcttagagagcagtagaaacacatccagcaacagctcacctcttaacctaaaaggctcctccgagcagctccatggccggtctgagagcttcagcagcgaagacctgatccccagcagggacctggccactttgccccgggaagccagcacaccgggacgcaacgccctcggccgccacgagtaccccttgcctcggaacgggcctctcccacaggagggtgcccagaagaggggcacagcccctccctacgtcggagtgcggccctgctcggcctcccccagcagtgagatggtcaccttggaggagttcctggaggagagcaaccgcagctcccccacccatgacactcccagttgccgggatgacctgctgagtgactacttccgaaaggccagcgatcccccagccatcggaggccaaccaggaccacctgccaagaaagaaggggccaagatgcccaccaactttgtggcccccaccgtcaaaatggccgcccccacctcggaggggaggccgctgaagcccgggcagtacgtaaagccaaacttcagactgactgaggccgaggccccacccagcgtggccccgagacaggcccagcctccccagagcctgtctctgggcagaccccggcaggctccggtgcccccagcttcccatgcacctgccagccgcagtgcctccttgagccgggccttcagcctggcctcagctgaccttctccgggccagcgggccagaggcctgcaaacaggagtcccctcagaagctgggggctcctgaggccttagggggcagagagacaggcagccacaccctgcaaagccccgcaccccccagctcccatagcctggcccgggagcggaccccacttgtgggaaaggctggcagctcctgtcagggcccaggtccccgcagccggccgctggacacgaggcgcttctccctggctcccccaaaggaggagaggctggcccccctgcatcagtctgccacagcccccgccattgccactgcaggtgctggtgctgctgctgctggcagtggcagcaactcccagctcctgcacttctcacctgctgcagccccggctgccaggaccaagcccaaggcgcccccacgctcaggggaggtggccaccatcacccctgtccgggcagggctcagcctctcagagggagacggggtcccggggcagggctgcagtgaggggcttccggccaagagcccaggtcggtctcccgatttggctccccacctcggccgggccctggaggactgcagtcgagggagcgtctcaaagagcagtccggcctccccggagcccggcggggatccgcagaccgtgtggtatgagtacggctgtgtgtgactgtctcgtggttgagctcgcaaacctgaaaactactgacgcgccttccgactctcacggccttttctcttgcttgcctgcggtgccaggagagggtttggaatgaggaaaggggttcccacgcatttctgctgtttgttctgtgaatggaaacactgtgccaagccccaagaggattacgcttccaggtgtgtaacgtgttttctgtgtctgccgcttccagcagctgatatctttggaacaaataatccacgtcagcatggggaccaattaggatgcaatgacaaactgacttcccccaaagcagacactactccagtatgtcccagtagaacactcatttgcaatgtgttgagctccgttaagcacacacacactcacacaacaggcttacgaggctcaggcctggcgggtcagaaagcccactccctctcccaaggccactggatcccaggagaagcccagactggcgatactacaaaggtctccagggcctggcagaccccagagtcaggcctgctgttaaaaagtgagagtgctgctgttccattcctggggtcccaagcacttccctttaccccaggacccagggcagcctgcagggcagctggcggtggccttggccatttgcccccagcctccagctggctcctgagctctgcaccagggggtttggggaccacacaggcacctgccttcctagatttccctggctcacttttctgcaaacactggatctgccaggcctggggattggggggcaggaaagaggcccccatccagccccctccaggccagtgtgcacagtgcaccgaggggtcatccgcacagagcgaggtgcaagctcgatgtgtaacctggctgcggcacccgacatccccggtctcggggtgttgatttatttctgaataactttttgggtatagaaaccaattttttttaatatatgacatgtatatgtacacactcatgtgaaatatgtatactttggggggatctatttatgttccagtgggagtcactctcttctgtcgggaatcttatctgctgctttgtgtctttggtcagattcctgacaatttagtttcctgttgtaaaggtgcttttcctggggtgaactaaacctattgattttttttttttaagatttttttttccttttgatttaatatactgagaaagaaatgggagacttttgaatgttaacaagatccattttaggagtgtttggggttgtgtattaaatagccattcattctggaactcaaggacaggactgtaataaaatggaatggaaccg

SEQ ID NO: 121228 - DNA, 1651 bp, Homo sapiens
  Payload ID: 3769
  Gene Symbol: CCDC88C
  Gene Name: coiled-coil domain containing 88C
  ENST ID: ENST00000553403
  CDS Start-End: 155-445
gcggaacgtgggctcgcgcgccccgcctttgtctcccgggcgcgagccgccgcagccccgcgcccgctgctcgctgcggagccgttttgtgccgcggcgcgggggaacggggacgcggggcggggggcgcggagccggcgggcgcagcctcagcatggacgtgacagtctcggagctcctggagctcttcctgcagagcccgctggtgacctgggtgaaaacttttggcccgtttggaagcggcagccaggacaacctgactatgtacatggatttagtggacggcatctttttgaaccaaattatgctgcaaatagatcccaggcccacaaatcaacgcatcaataagcacgtcaacaatgatgtgaaccttcgcattcagaatttgaccatcttggtgagaaacattaagacctactaccaggatagaccctttttccggtaactaaacttcttgcgggcagacacagcgtttgagttttcgcattggcttcaaacaaacccagtggaagtggacagtgaacaagacacccccgcaggaggcccgggcacggggtgtggctgccaggcctggccatggaaggccatcactgtgggctcttctgggagtggcactgacagccagcaaggagaatgggtgctggggcggagtggaagaaggtgagcttgaggccggagttcctaccccaggaggcaccgtcagcgtcccacttctgctcgtgtgatcccctggaggcacctgaatcaggcagtaaacatggagtgagaaacaccggagtagaagaccttgcaacagcacatgtgtgggcccagttcctagctgccccgggtggccaaggccacatcctgtacacacaggtctgggagtgtctgcatttcagcccttgaccgtgaacttgaccctctggaggtgtccatcttgatgtgatcctctgactgcaacctcatcctctgcctctcagagctgcctccccctgtggcttcttgccctgaggcatgggaggcgttggtgccaggagcttggggtttgagtcaggttggctcggggataagacccagcctttccacacattagtttgtgatgctgggtcatagtgcgtctgtttgctccctgtcaagggaccagtaacatgaggggtcagagaagggatcagaactctcgtgggcctccagtgtgtcgcaagtttttgctgttctgcttttcctcagctgctggtgggaatgcaaattgctgtgctgactttggaaaaactctccggcagtaaagcctaaagttccacatccacacaccgtactgtggcccagctgatttctctcctaagggtatcccggagtaacttctgcacatggatgcctgggactttacagcccttctgcacacaataacagaaacctggaagccacccagatgcccatcagtgggagaagggatgaatacacgaagacacgatcacacaatggaatattatacagctgtccaaacacattaactgcagcataacttcagtgatgtaggtggattctggcaatatcataaatattagtaaaaatagcatgttcccaatgatgacttacagcactatgccttttaaaaataaagttaaaagcaactacaatgactgtactctctaggaaaatttacaggtgcaat

SEQ ID NO: 121229 - DNA, 3617 bp, Homo sapiens
  Payload ID: 3769
  Gene Symbol: CCDC88C
  Gene Name: coiled-coil domain containing 88C
  ENST ID: ENST00000556726
  CDS Start-End: 1-394
gattggagccaaagccttagtcaaactcatcaaaccaaagaaagagggttcgagggaacgcttaaaatccaccgtggacagccctccctggcagctggagtcctcagaccccgcctcgccggcggcctctcagccgctcagatcacaggccgagaaccccgacacccccgcactgggctccaactgtgcagaagagcgcgacgcccacaacgggtctgtggggaaagcacctccgcgcaaaaagagtccctttttgaaaagcaaaaacaaggacaaagacaagtctccaacgacccacccagctctctctaaacgcctgcggttctggtcttcctccgacatcccatcctctcctaacgagcctctctctttctccgacattggagatttctaatccctttcctttatcatgtgtctgtattgtgtaccctccttcatttccgaaattcaaacaaacaaaaaaagccagcgtctaaaaggccagatggccgatagcggacccctcctcctgcccccaatttcaagcttaaagtagccagcgtggattctgatttcaaaatagaagatgagttgtcacactccctggaccatttcttcagcacaacacagttttagggggagcctcaggatatacgtgcacatgtccttgggccaggatgtccgtactaagccctggggatctaaaaccaaagcgaggctccccacacagaggcagccttgaccgcacagatgcctccaccgatctggccatgaggtcctggccctcggagctgggctcccggacttgctcaacttcagccaccactacagccccttccaactccacccccatcgcccggcacccaggccgcaccaaaggctataactcagatgacaacctctgtgagccatccctggagtttgaggtccccaaccacaggcagtacgtgtcgcggccaagtagcttagagagcagtagaaacacatccagcaacagctcacctcttaacctaaaaggctcctccgagcagctccatggccggtctgagagcttcagcagcgaagacctgatccccagcagggacctggccactttgccccgggaagccagcacaccgggacgcaacgccctcggccgccacgagtaccccttgcctcggaacgggcctctcccacaggagggtgcccagaagaggggcacagcccctccctacgtcggagtgcggccctgctcggcctcccccagcagtgagatggtcaccttggaggagttcctggaggagagcaaccgcagctcccccacccatgacactcccagttgccgggatgacctgctgagtgactacttccgaaaggccagcgatcccccagccatcggaggccaaccaggaccacctgccaagaaagaaggggccaagatgcccaccaactttgtggcccccaccgtcaaaatggccgcccccacctcggaggggaggccgctgaagcccgggcagtacgtaaagccaaacttcagactgactgaggccgaggccccacccagcgtggccccgagacaggcccagcctccccagagcctgtctctgggcagaccccggcaggctccggtgcccccagcttcccatgcacctgccagccgcagtgcctccttgagccgggccttcagcctggcctcagctgaccttctccgggccagcgggccagaggcctgcaaacaggagtcccctcagaagctgggggctcctgaggccttagggggcagagagacaggcagccacaccctgcaaagccccgcaccccccagctcccatagcctggcccgggagcggaccccacttgtgggaaaggctggcagctcctgtcagggcccaggtccccgcagccggccgctggacacgaggcgcttctccctggctcccccaaaggaggagaggctggcccccctgcatcagtctgccacagcccccgccattgccactgcaggtgctggtgctgctgctgctggcagtggcagcaactcccagctcctgcacttctcacctgctgcagccccggctgccaggaccaagcccaaggcgcccccacgctcaggggaggtggccaccatcacccctgtccgggcagggctcagcctctcagagggagacggggtcccggggcagggctgcagtgaggggcttccggccaagagcccaggtcggtctcccgatttggctccccacctcggccgggccctggaggactgcagtcgagggagcgtctcaaagagcagtccggcctccccggagcccggcggggatccgcagaccgtgtggtatgagtacggctgtgtgtgactgtctcgtggttgagctcgcaaacctgaaaactactgacgcgccttccgactctcacggccttttctcttgcttgcctgcggtgccaggagagggtttggaatgaggaaaggggttcccacgcatttctgctgtttgttctgtgaatggaaacactgtgccaagccccaagaggattacgcttccaggtgtgtaacgtgttttctgtgtctgccgcttccagcagctgatatctttggaacaaataatccacgtcagcatggggaccaattaggatgcaatgacaaactgacttcccccaaagcagacactactccagtatgtcccagtagaacactcatttgcaatgtgttgagctccgttaagcacacacacactcacacaacaggcttacgaggctcaggcctggcgggtcagaaagcccactccctctcccaaggccactggatcccaggagaagcccagactggcgatactacaaaggtctccagggcctggcagaccccagagtcaggcctgctgttaaaaagtgagagtgctgctgttccattcctggggtcccaagcacttccctttaccccaggacccagggcagcctgcagggcagctggcggtggccttggccatttgcccccagcctccagctggctcctgagctctgcaccagggggtttggggaccacacaggcacctgccttcctagatttccctggctcacttttctgcaaacactggatctgccaggcctggggattggggggcaggaaagaggcccccatccagccccctccaggccagtgtgcacagtgcaccgaggggtcatccgcacagagcgaggtgcaagctcgatgtgtaacctggctgcggcacccgacatccccggtctcggggtgttgatttatttctgaataactttttgggtatagaaaccaattttttttaatatatgacatgtatatgtacacactcatgtgaaatatgtatactttggggggatctatttatgttccagtgggagtcactctcttctgtcgggaatcttatctgctgctttgtgtctttggtcagattcctgacaatttagtttcctgttgtaaaggtgcttttcctggggtgaactaaacctattgattttttttttttaagatttttttttccttttgatttaatatactgagaaagaaatgggagacttttgaatgttaacaagatccattttaggagtgtttggggttgtgtattaaatagccattcattctggaactcaaggacaggactgtaataaaatggaatggaaccgaa

SEQ ID NO: 121230 - DNA, 1412 bp, Homo sapiens
  Payload ID: 3770
  Gene Symbol: CCDC89
  Gene Name: coiled-coil domain containing 89
  Uniprot ID: Q8N998
  ENST ID: ENST00000316398
  CDS Start-End: 148-1272
gttacttcatagcattctgaagacctgtccaccaattacagggctccttactggaaaaaccaactgctggggagtgccaagagtccctagcaacaccctgcagcgtttgaaatctgaggggaaaagactgtagtcagcccttagtggatgagagcgcctatgctccagaaacagcaggctcccaggatggacaccccgccccctgaagaacgcttagagaagcaaaatgaaaaactgaacaaccaggaagaggagacggagtttaaggaactggacggtctgagggaagccttggcaaacctccggggactgtcagaggaggagaggagcgagaaggctatgcttcgctcccgcattgaagagcagtcccagctcatctgcatcctgaagcggaggtcagatgaggccctggagcgctgccagatcctagagctgctcaatgcagagctggaggagaagatgatgcaggaggctgagaagctcaaggcccagggtgagtacagtcggaaactagaggaacgctttatgaccctagcagccaaccacgagttgatgctccgcttcaaggatgaatacaagagtgagaacatcaagctgagggaggagaatgagaagctgaggctggagaatagcagcctcttcagccaggctctgaaggatgaggaggcgaaagtattacagctcacagtccggtgtgaggccctcactggggagctagaaacgctgaaggagaggtgtgctcaggatgcctgccaggcacaggcgcgcgagaaggagctgctggagctacagagccagcaggcctgcacccacaccaaggagacagaacagctgcgcagccagctgcagaccctcaagcagcagcaccagcaggctgtggagcagatagctaaggcagaggagacacacagcagcctgagccaggagctgcaggccaggctgcagaccgtcactagagagaaagaggagttgctgcagctgtccattgaaaggggcaaagtgcttcagaacaaacaggcagagatctgccagcttgaggaaaagttggagatagcaaatgaagacaggaagcatgcgctggagcggtttgagcaagaggcagtggctgtggacagcaacttgagagtcagggagcttcagcgcaaagtagatgggatccagaaggcctacgatgaactcaggctgcagtctgaagccttcaaaaagcacagcttggatcttttaagcaaggagagagaactcaatggcaaactccgccatctctctccatagggaagtttctgcttcctctggcctgcaattcagaattcaaatatttgcgtcttagcattatggcaagagtaaagatgatatcccatttattatactttcaagcacaaaaggcaactcaaagaaaagctactttactatga

SEQ ID NO: 121231 - DNA, 2093 bp, Homo sapiens
  Payload ID: 3771
  Gene Symbol: CCDC9
  Gene Name: coiled-coil domain containing 9
  Uniprot ID: Q9Y3X0
  ENST ID: ENST00000221922
  CDS Start-End: 223-1818
tcccggaaacggtcccacaggaccggaagtgaccctctttatttcccttcctcacgtggtgcaggcaggaagtgacgcgcctggcccgggagctgcggtcgcagaggccgacggagccggagtcgcggacgccgcggggtctccgggacaggaaccctcagtgctgcgtctagattctgcaggggaggtttgctgggaccttggctccacgcagccagcgaaatggcagccacactcgatttgaaatcaaaggaggagaaggatgctgagttggacaagaggatcgaggctcttcggcggaagaatgaggccctcatccggcgctaccaggagattgaggaagaccgtaagaaagctgaacttgagggagtcgcagtcacagctccccgaaagggccgctcagtggagaaggagaacgtggcagtggagtcggagaagaacctgggtccttcccggaggtctcctgggacccctcggcccccaggggccagcaaggggggccggactcctccacagcagggaggccgggccggcatgggccgagcatcgcgcagctgggagggcagccccggggagcagcctcgaggaggaggagctgggggccgtggccggaggggccggggccgaggttcacctcacctctctggagctggagacacctcaatctctgaccgtaaatccaaggagtgggaggagcggcgcaggcagaacattgagaagatgaatgaggagatggagaagatcgccgagtatgagcgcaaccagcgggaaggggttcttgaacccaacccagtgcggaacttcctggacgacccccggcgacgcagcgggcccctggaggagtctgagcgggaccgccgggaggagagccgccggcacggccgcaactgggggggccccgacttcgagcgggtgcgctgtggccttgagcacgagcggcagggccgccgagctggcctgggcagtgctggagacatgacgttgtccatgacgggccgggagcggtcggagtacctgcgctggaagcaggagagggagaagatcgaccaggagcggctgcagaggcaccgcaagcccactggccagtggaggcgcgagtgggatgccgagaagaccgatgggatgttcaaggatggcccagtccctgcccatgaaccatcccaccgctatgatgaccaggcctgggcccggcccccgaagccccctacttttggggagttcctgtcccagcacaaagctgaggccagcagccgcagaaggagaaagagcagtcggccccaggccaaggcagcgcccagggcctacagtgaccatgatgaccgctgggagacaaaagaaggggcagcatccccagcccctgagactccacagcctacttcccccgagacttcccccaaggagacacccatgcagccacccgagatcccagctcctgcccaccggcctcctgaagacgagggggaagagaatgagggggaagaggatgaagaatgggaggacataagtgaggatgaggaagaggaggagatcgaggtggaagaaggtgatgaggaggaaccagcccaagaccaccaagccccagaggctgcccccaccgggatcccctgcagtgagcaggcccacggagtccccttcagtccggaggagcccctgctggagccccaggcccctggcacgccttccagccctttctcaccacccagcggccaccagcctgtgtccgattggggtgaagaggtggagctgaattctccccggaccactcacctggctggcgccctctccccgggtgaggcctggccttttgagagtgtatgaagctggctgcctgtgtgtgtgtgtgtgtgtgtgtgtgtgtgtgtgtgtgtgtgtgcgcgcgcgcgcgcgcgcgcgcgcgcgctagaggggtgtggctggtgggggacccttggggctgggccctgggacccagtgtgccccacagccctgtcagctgagggggtagcgcagcccatgctcttctgtactgtcatgcccgtctctggaatgtccactcccagagcctgccccagcccttcgagccccctccccaataaagaattcacatcctccaa

SEQ ID NO: 121232 - DNA, 834 bp, Homo sapiens
  Payload ID: 3771
  Gene Symbol: CCDC9
  Gene Name: coiled-coil domain containing 9
  ENST ID: ENST00000599398
  CDS Start-End: 450-834
cccagccggattgaggctggagctttgcacagaaaatctggggcgggcctgggtagttttgtccttgttggggcgggtggagtattcagtggggcaaaacgccagttccaggaagcctcgccagtgagttctgggcctgtgtacagaatcctttcgggggaggcgggaggctgtcgaccttccgtagggcgctggagacgggactaggacgtccctgaggaaggcgcgggcttggaatgttctctgagagcttgggcagccaataagagtggggttcggactttctttgagcgtgggattgggaatgtttctgaaccttacctggtggagctagaatattcgcctggatatgagaggcaccaggatgagcacagggaggaaccctcagtgctgcgtctagattctgcaggggaggtttgctgggaccttggctccacgcagccagcgaaatggcagccacactcgatttgaaatcaaaggaggagaaggatgctgagttggacaagaggatcgaggctcttcggcggaagaatgaggccctcatccggcgctaccaggagattgaggaagaccgtaagaaagctgaacttgagggagtcgcagtcacagctccccgaaagggccgctcagtggagaaggagaacgtggcagtggagtcggagaagaacctgggtccttcccggaggtctcctgggacccctcggcccccaggggccagcaaggggggccggactcctccacagcagggaggccgggccggcatgggccgagcatcgcgcagctgggagggcagccccggggagcagcctcgaggaggaggagctgggggccgtg

SEQ ID NO: 121233 - DNA, 356 bp, Homo sapiens
  Payload ID: 3771
  Gene Symbol: CCDC9
  Gene Name: coiled-coil domain containing 9
  ENST ID: ENST00000595659
  CDS Start-End: 187-356
gattgaggctggagctttgcacagaaaatctggggcgggcctgggtagttttgtccttgttggggcgggtggagtattcagtggggcaaaacgccagttccaggaagcctcgccagaaccctcagtgctgcgtctagattctgcaggggaggtttgctgggaccttggctccacgcagccagcgaaatggcagccacactcgatttgaaatcaaaggaggagaaggatgctgagttggacaagaggatcgaggctcttcggcggaagaatgaggccctcatccggcgctaccaggagattgaggaagaccgtaagaaagctgaacttgagggagtcgcagtcacagctccccgaaa

SEQ ID NO: 121234 - DNA, 457 bp, Homo sapiens
  Payload ID: 3771
  Gene Symbol: CCDC9
  Gene Name: coiled-coil domain containing 9
  ENST ID: ENST00000596938
  CDS Start-End: 313-457
gtgggtttgactagatcgtttacatgggaactgggtgagtccacaaagatcatgaaagggctgagtctgaatttctatggagaagatggaggtggcagttgaaaggagggagagtgagggctacaattctcttggggtacagggttttttgtgtatggctgtgaggatcccgcagtatgttagagggtgaagtaggttggggggccattggcctttgtcctttttttccctctgtccccaggaaccctcagtgctgcgtctagattctgcaggggaggtttgctgggaccttggctccacgcagccagcgaaatggcagccacactcgatttgaaatcaaaggaggagaaggatgctgagttggacaagaggatcgaggctcttcggcggaagaatgaggccctcatccggcgctaccaggagattgaggaagaccgtaagaaagctgaacttgagg

SEQ ID NO: 121235 - DNA, 1688 bp, Homo sapiens
  Payload ID: 3772
  Gene Symbol: CCDC90B
  Gene Name: coiled-coil domain containing 90B
  ENST ID: ENST00000260054
  CDS Start-End: 383-871
tctcccccgacccaagcgcgtaatggccgctggctatcttgggggagccagctgttggactatgccccactgccaggaaacaggcgccggaaggttctctgacaagatctcgctttcctagggcggtgaaggcgttcaaaggtcgggaaggggcgctgggagaagcggggcagcgctgagccatgctcgcgaactgtgggtctgtctgtgaagagacccagtttcgtgggaccacggtggcgcctgcgctgggaggtgagcttgtgacagagcgaaaactacaattcccagcattcctgtggtgccagaactaccttgcccgaaagcctgtgcgagatttaccccgtcttccgcctccctcccaccggaaaactctgaggacatgaatagtcgccaggcttggcggctctttctctcccaaggcagaggagatcgttgggtttcaaggccccgcgggcatttctcgccggccctgcggagagagttcttcactaccacaaccaaggagggatatgataggcggccagtggatataactcctttagaacaaaggaaattaacttttgatacccatgcattggttcaggacttggaaactcatggatttgacaaaacacaagcagaaacaattgtatcagcgttaactgctttatcaaatgtcagcctggatactatctataaagagatggtcactcaagctcaacaggaaataacagtacaacagctaatggctcatttggatgctatcaggaaagacatggtcatcctagagaaaagtgaatttgcaaatctgagagcagagaatgagaaaatgaaaattgaattagaccaagttaagcaacaactaatggtaagtgaattttttttctagctgttaatttcagaacaaatattcgttacaagatcattttttaaatatctttgctttctttaaagcatgaaaccagtcgaatcagagcagataataaactggatatcaacttagaaaggagcagagtaacagatatgtttacagatcaagaaaagcaacttatggaaacaactacagaatttacaaaaaaggatactcaaaccaaaagtattatttcagagaccagtaataaaattgacgctgaaattgcttccttaaaaacactgatggaatctaacaaacttgagacaattcgttatcttgcagcttcggtgtttacttgcctggcaatagcattgggattttatagattctggaagtagtattaatgctcatcctgctgtggctgttggcttcttagaacaccaaaccgggagagatttactttgaacattgtcagttgcagcaaaaatttactacacaagattattcgaagtgtatacggactaaaagaggaagtgttttagaatgagaagagatactgtgtctttattgtgtgtgtgtgagtgcaggtgtgtgtctttattatattgaaaagctgtcactcagacctggtttgagatagaagagcattttgtccttttgatagttaatagaaattgaaccagagttttcttatgtttgcttgaacagttgtgtaaatcatacaggattttgtgggtattggttgaatatttgtaaaccattccctagcctacatatttattactgaattaactttcctgataaccattgcataattacatttttctataaaatgaaagattattacaacaaa

SEQ ID NO: 121236 - DNA, 1550 bp, Homo sapiens
  Payload ID: 3772
  Gene Symbol: CCDC90B
  Gene Name: coiled-coil domain containing 90B
  Uniprot ID: Q9GZT6
  ENST ID: ENST00000455220
  CDS Start-End: 219-956
aggttccaggctgctgtgcggctaaatgcgactccatctcccccgacccaagcgcgtaatggccgctggctatcttgggggagccagctgttggactatgccccactgccaggaaacaggcgccggaaggttctctgacaagatctcgctttcctagggcggtgaaggcgttcaaaggtcgggaaggggcgctgggagaagcggggcagcgctgagccatgctcgcgaactgtgggtctgtctgtgaagagacccagtttcgtgggaccacggtggcgcctgcgctgggagagttcttcactaccacaaccaaggagggatatgataggcggccagtggatataactcctttagaacaaaggaaattaacttttgatacccatgcattggttcaggacttggaaactcatggatttgacaaaacacaagcagaaacaattgtatcagcgttaactgctttatcaaatgtcagcctggatactatctataaagagatggtcactcaagctcaacaggaaataacagtacaacagctaatggctcatttggatgctatcaggaaagacatggtcatcctagagaaaagtgaatttgcaaatctgagagcagagaatgagaaaatgaaaattgaattagaccaagttaagcaacaactaatgcatgaaaccagtcgaatcagagcagataataaactggatatcaacttagaaaggagcagagtaacagatatgtttacagatcaagaaaagcaacttatggaaacaactacagaatttacaaaaaaggatactcaaaccaaaagtattatttcagagaccagtaataaaattgacgctgaaattgcttccttaaaaacactgatggaatctaacaaacttgagacaattcgttatcttgcagcttcggtgtttacttgcctggcaatagcattgggattttatagattctggaagtagtattaatgctcatcctgctgtggctgttggcttcttagaacaccaaaccgggagagatttactttgaacattgtcagttgcagcaaaaatttactacacaagattattcgaagtgtatacggactaaaagaggaagtgttttagaatgagaagagatactgtgtctttattgtgtgtgtgtgagtgcaggtgtgtgtctttattatattgaaaagctgtcactcagacctggtttgagatagaagagcattttgtccttttgatagttaatagaaattgaaccagagttttcttatgtttgcttgaacagttgtgtaaatcatacaggattttgtgggtattggttgaatatttgtaaaccattccctagcctacatatttattactgaattaactttcctgataaccattgcataattacatttttctataaaatgaaagattattacaacaaagttgtgtgggttttcaaagtgacttaccatatagttggagattgatttctttttggtaatgaactaaaacaataaattttaaaatgataggccaggcgcggtggctcacacctgtaatctcagcactttgggaggctga

SEQ ID NO: 121237 - DNA, 1986 bp, Homo sapiens
  Payload ID: 3772
  Gene Symbol: CCDC90B
  Gene Name: coiled-coil domain containing 90B
  Uniprot ID: Q9GZT6
  ENST ID: ENST00000529611
  CDS Start-End: 1076-1537
ccctcccaccggaaaactctgaggacatgaatagtcgccaggcttggcggctctttctctcccaaggcagaggagatcgttgggtttcaaggccccgcgggcatttctcgccggccctgcggagaggtgaggcaaggcgtcgtgtcatagatgcctgagtgctctctagggagacgatgcccgtggggtcgcgcctgctcgagcgaacgggaagagaaggtgccacgccctcctcccggattcacgccttgtgctgggcgacgccgctgcctgctgccccgacttgcccagctcgccccaaggggcgaggactgaggaaagcactgcctttctgttcttaaagcgaacctttgaaggcctgggcttcgcgcccggcttctttctcagccgttgtttccgttttttggtgacaagaggctagtaatctcgtcaggagccaacgtaaggtaatctgtgtttgagggtgtcctgttttcttttgtggcctgatcaaattttgattttgtttttttaggtgctggcctcgagcccaggtttttggtagacagcatcataaatttcaggccacgtctgccttattctcactggaattctcagtacatttcagtcacattgtagactttgggaaaataagtgaatactggaacccacaagtttccaacctgttggcacccctgttaacagggtgtcctgaagacatctaactttattcagagaaatgtttctagggctaggtttttgttgtcgtcgttgtttttcacccccagttttttaacttccctcccagtttttaaaccgttttaaggttgtccacaaaataggcgaataggcacctcttatctctgttcaccttcttgaatcttcagtgccagagttcttcactaccacaaccaaggagggatatgataggcggccagtggatataactcctttagaacaaaggaaattaacttttgatacccatgcattggttcaggacttggaaactcatggatttgacaaaacacaagcagaaacaattgtatcagcgttaactgctttatcaaatgtcagcctggatactatctataaagagatggtcactcaagctcaacaggaaataacagtacaacagctaatggctcatttggatgctatcaggaaagacatggtcatcctagagaaaagtgaatttgcaaatctgagagcagagaatgagaaaatgaaaattgaattagaccaagttaagcaacaactaatgcatgaaaccagtcgaatcagagcagataataaactggatatcaacttagaaaggagcagagtaacagatatgtttacagatcaagaaaagcaacttatggaaacaactacagaatttacaaaaaaggatactcaaaccaaaagtattatttcagagaccagtaataaaattgacgctgaaattgcttccttaaaaacactgatggaatctaacaaacttgagacaattcgttatcttgcagcttcggtgtttacttgcctggcaatagcattgggattttatagattctggaagtagtattaatgctcatcctgctgtggctgttggcttcttagaacaccaaaccgggagagatttactttgaacattgtcagttgcagcaaaaatttactacacaagattattcgaagtgtatacggactaaaagaggaagtgttttagaatgagaagagatactgtgtctttattgtgtgtgtgtgagtgcaggtgtgtgtctttattatattgaaaagctgtcactcagacctggtttgagatagaagagcattttgtccttttgatagttaatagaaattgaaccagagttttcttatgtttgcttgaacagttgtgtaaatcatacaggattttgtgggtattggttgaatatttgtaaaccattccctagcctacatatttattactgaattaactttcctgataaccattgcataattacatttttctataaaatgaaagattattac

SEQ ID NO: 121238 - DNA, 1919 bp, Homo sapiens
  Payload ID: 3772
  Gene Symbol: CCDC90B
  Gene Name: coiled-coil domain containing 90B
  Uniprot ID: Q9GZT6
  ENST ID: ENST00000525503
  CDS Start-End: 1003-1464
cccccgacccaagcgcgtaatggccgctggctatcttgggggagccagctgttggactatgccccactgccaggaaacaggcgccggaaggttctctgacaagatctcgctttcctagggcggtgaaggcgttcaaaggtcgggaaggggcgctgggagaagcggggcagcgctgagccatgctcgcgaactgtgggtctgtctgtgaagagacccagtttcgtgggaccacggtggcgcctgcgctgggaggtgagcttgtgacagagcgaaaactacaattcccagcattcctgtggtgccagaactaccttgcccgaaagcctgtgcgagatttaccccgtcttccgcctccctcccaccggaaaactctgaggacatgaatagtcgccaggcttggcggctctttctctcccaaggcagaggagatcgttgggtttcaaggccccgcgggcatttctcgccggccctgcggagaggtgaggcaaggcgtcgtgtcatagatgcctgagtgctctctagggagacgatgcccgtggggtcgcgcctgctcgagcgaacgggaagagaaggtgccacgccctcctcccggattcacgccttgtgctgggcgacgccgctgcctgctgccccgacttgcccagctcgccccaaggggcgaggactgaggaaagcactgcctttctgttcttaaagcgaacctttgaaggcctgggcttcgcgcccggcttctttctcagccgttgtttccgttttttggtgacaagaggctagtaatctcgtcaggagccaacgtaagagttcttcactaccacaaccaaggagggatatgataggcggccagtggatataactcctttagaacaaaggaaattaacttttgatacccatgcattggttcaggacttggaaactcatggatttgacaaaacacaagcagaaacaattgtatcagcgttaactgctttatcaaatgtcagcctggatactatctataaagagatggtcactcaagctcaacaggaaataacagtacaacagctaatggctcatttggatgctatcaggaaagacatggtcatcctagagaaaagtgaatttgcaaatctgagagcagagaatgagaaaatgaaaattgaattagaccaagttaagcaacaactaatgcatgaaaccagtcgaatcagagcagataataaactggatatcaacttagaaaggagcagagtaacagatatgtttacagatcaagaaaagcaacttatggaaacaactacagaatttacaaaaaaggatactcaaaccaaaagtattatttcagagaccagtaataaaattgacgctgaaattgcttccttaaaaacactgatggaatctaacaaacttgagacaattcgttatcttgcagcttcggtgtttacttgcctggcaatagcattgggattttatagattctggaagtagtattaatgctcatcctgctgtggctgttggcttcttagaacaccaaaccgggagagatttactttgaacattgtcagttgcagcaaaaatttactacacaagattattcgaagtgtatacggactaaaagaggaagtgttttagaatgagaagagatactgtgtctttattgtgtgtgtgtgagtgcaggtgtgtgtctttattatattgaaaagctgtcactcagacctggtttgagatagaagagcattttgtccttttgatagttaatagaaattgaaccagagttttcttatgtttgcttgaacagttgtgtaaatcatacaggattttgtgggtattggttgaatatttgtaaaccattccctagcctacatatttattactgaattaactttcctgataaccattgcataattacatttttctataaaatgaaagattattacaacaaa

SEQ ID NO: 121239 - DNA, 719 bp, Homo sapiens
  Payload ID: 3772
  Gene Symbol: CCDC90B
  Gene Name: coiled-coil domain containing 90B
  ENST ID: ENST00000529073
  CDS Start-End: 7-633
gaggacatgaatagtcgccaggcttggcggctctttctctcccaaggcagaggagatcgttgggtttcaaggccccgcgggcatttctcgccggccctgcggagagagttcttcactaccacaaccaaggagggatatgataggcggccagtggatataactcctttagaacaaaggaaattaacttttgatacccatgcattggttcaggacttggaaactcatggatttgacaaaacacaagcagaaacaattgtatcagcgttaactgctttatcaaatgtcagcctggatactatctataaagagatggtcactcaagctcaacaggaaataacagtacaacagctaatggctcatttggatgctatcaggaaagacatggtcatcctagagaaaagtgaatttgcaaatctgagagcagagaatgagaaaatgaaaattgaattagaccaagttaagcaacaactaatgactttttttttaacttcctgctgcttcatatcctatagtttacagatcaagaaaagcaacttatggaaacaactacagaatttacaaaaaaggatactcaaaccaaaagtattatttcagagaccagtaataaaattgacgctgaaattgcttccttaaaaacactgatggaatctaacaaacttgagacaattcgttatcttgcagcttcggtgtttacttgcctggcaatagcattgggattt

SEQ ID NO: 121240 - DNA, 773 bp, Homo sapiens
  Payload ID: 3772
  Gene Symbol: CCDC90B
  Gene Name: coiled-coil domain containing 90B
  ENST ID: ENST00000529312
  CDS Start-End: 8-124
tgaggacatgaatagtcgccaggcttggcggctctttctctcccaaggcagaggagatcgttgggtttcaaggccccgcgggcatttctcgccggccctgcggagagtttttaaaccgttttaaggttgtccacaaaataggcgaataggcacctcttatctctgttcaccttcttgaatcttcagtgccagagttcttcactaccacaaccaaggagggatatgataggcggccagtggatataactcctttagaacaaaggaaattaacttttgatacccatgcattggttcaggacttggaaactcatggaaataacagtacaacagctaatggctcatttggatgctatcaggaaagacatggtcatcctagagaaaagtgaatttgcaaatctgagagcagagaatgagaaaatgaaaattgaattagaccaagttaagcaacaactaatgcatgaaaccagtcgaatcagagcagataataaactggatatcaacttagaaaggagcagagtaacagatatgtttacagatcaagaaaagcaacttatggaaacaactacagaatttacaaaaaaggatactcaaaccaaaagtattatttcagagaccagtaataaaattgacgctgaaattgcttccttaaaaacactgatggaatctaacaaacttgagacaattcgttatcttgcagcttcggtgtttacttgcctggcaatagcattgggattttatagattctggaagtagtattaatgctcatcctgctg

SEQ ID NO: 121241 - DNA, 723 bp, Homo sapiens
  Payload ID: 3772
  Gene Symbol: CCDC90B
  Gene Name: coiled-coil domain containing 90B
  ENST ID: ENST00000534753
  CDS Start-End: 17-370
ggaaaactctgaggacatgaatagtcgccaggcttggcggctctttctctcccaaggcagaggagatcgttgggtttcaaggccccgcgggcatttctcgccggccctgcggagagagttcttcactaccacaaccaaggagggatatgataggcggccagtggatataactcctttagaacaaaggaaattaacttttgatacccatgcattggttcaggacttggaaactcatggatttgacaaaacacaagcagaaacaattgtatcagcgttaactgctttatcaaatgtcagcctggatactatctataaagagatggtcactcaagctcaacaggttatttttattttgttttctaggaaataacagtacaacagctaatggctcatttggatgctatcaggaaagacatggtcatcctagagaaaagtgaatttgcaaatctgagagcagagaatgagaaaatgaaaattgaattagaccaagttaagcaacaactaatgcatgaaaccagtcgaatcagagcagataataaactggatatcaacttagaaaggagcagagtaacagatatgtttacagatcaagaaaagcaacttatggaaacaactacagaatttacaaaaaaggatactcaaaccaaaagtattatttcagagaccagtaataaaattgacgctgaaattgcttccttaaaaacactgatggaatctaacaaa

SEQ ID NO: 121242 - DNA, 1433 bp, Homo sapiens
  Payload ID: 3772
  Gene Symbol: CCDC90B
  Gene Name: coiled-coil domain containing 90B
  ENST ID: ENST00000526265
  CDS Start-End: 17-190
ggaaaactctgaggacatgaatagtcgccaggcttggcggctctttctctcccaaggcagaggagatcgttgggtttcaaggccccgcgggcatttctcgccggccctgcggagaggaaataacagtacaacagctaatggctcatttggatgctatcaggaaagacatggtcatcctagagaaaagtgaatttgcaaatctgagagcagagaatgaggtgatacaaattttaatttattacttataaaataactgatctcataataagcatcctacttaaggaataagttaataagaccaagtaataattccatgtggttagtaaacaataagtttttagatttaaaaacatactatttgtttaaccatacctaatctttttctatataaatcatagtgctttgcatactgaagagaataagagttacattttatacatataaaaccacataaaacaaaatctttgagctatatatataaaatttgtatataatggtttcagagctgagagtaatacggcattttctattttatttaatcctgtactaaatgtctttgtgacttaaaagtatatttctgtaattaagtcagaattttaagttatgttatccactatagcttatttttaaatttagaaaatcagtttttaaaagtataatataaaaacaaatgcattttgctcataagaattattttctgaatacagtggcttactagtttcttttgaagatttttttccttatcaattctgtattagaaatccatagattgtccaaattttggtaatctagggtttcagatttttttaatcataatatagacttggtttaatgctaattgcatgtgatctttcctgtacctagaaaatgaaaattgaattagaccaagttaagcaacaactaatgcatgaaaccagtcgaatcagagcagataataaactggatatcaacttagaaaggagcagagtaacagatatgtttacagatcaagaaaagcaacttatggaaacaactacagaatttacaaaaaaggtaaagtaatatgtaaaaatgtctcttttgtacagttcttgtgccttgtataactgcttttatgtgtaccagtttataagtttagacttttaaaaactacccttgtagagtctctggcttcctcatagctattatagttaaccagcacttttggggaacctggcaccaggtagatggtcgcccatgagccatgaccttgaagtaagaatcaagatttccacatagtgtgcttttttaaactaaattacttctataatagaaaataactattttttgggccaggcacagtagctcacacctgttaatcctgcactttgggaggctgaggcaggagttcaagaccagtctgggcaacatagcaagaccctgtctcaaaaacaaaaaaaaaaaaaagaaaataa

SEQ ID NO: 121243 - DNA, 1587 bp, Homo sapiens
  Payload ID: 3772
  Gene Symbol: CCDC90B
  Gene Name: coiled-coil domain containing 90B
  ENST ID: ENST00000533761
  CDS Start-End: 1-286
tcgccaggcttggcggctctttctctcccaaggcagaggagatcgttgggtttcaaggccccgcgggcatttctcgccggccctgcggagagagttcttcactaccacaaccaaggagggatatgataggcggccagtggatataactcctttagaacaaaggaaattaacttttgatacccatgcattggttcaggacttggaaactcatggaaataacagtacaacagctaatggctcatttggatgctatcaggaaagacatggtcatcctagagaaaagtgaatttgcaaatctgagagcagagaatgaggtgatacaaattttaatttattacttataaaataactgatctcataataagcatcctacttaaggaataagttaataagaccaagtaataattccatgtggttagtaaacaataagtttttagatttaaaaacatactatttgtttaaccatacctaatctttttctatataaatcatagtgctttgcatactgaagagaataagagttacattttatacatataaaaccacataaaacaaaatctttgagctatatatataaaatttgtatataatggtttcagagctgagagtaatacggcattttctattttatttaatcctgtactaaatgtctttgtgacttaaaagtatatttctgtaattaagtcagaattttaagttatgttatccactatagcttatttttaaatttagaaaatcagtttttaaaagtataatataaaaacaaatgcattttgctcataagaattattttctgaatacagtggcttactagtttcttttgaagatttttttccttatcaattctgtattagaaatccatagattgtccaaattttggtaatctagggtttcagatttttttaatcataatatagacttggtttaatgctaattgcatgtgatctttcctgtacctagaaaatgaaaattgaattagaccaagttaagcaacaactaatgcatgaaaccagtcgaatcagagcagataataaactggatatcaacttagaaaggagcagagtaacagatatgtttacagatcaagaaaagcaacttatggaaacaactacagaatttacaaaaaagttttccttctaacagtcaggaccctcagctgcaggtctgttggagtttgctggaggtccactccagaccctgtttacctgggtatcaccagcagaggctgcagaacagcaaatattgctgcctgatccttcctctggaagctttgtcccagaggtgcagccgcctatatgaggatactcaaaccaaaagtattatttcagagaccagtaataaaattgacgctgaaattgcttccttaaaaacactgatggaatctaacaaacttgagacaattcgttatcttgcagcttcggtgtttacttgcctggcaatagcattgggattttatagattctggaagtagtattaatgctcatcctgctgtggctgttggcttcttagaacaccaaaccgggagagatttactttgaacattgtcagttgcagcaaaaatttactacacaagattattcgaagtgt

SEQ ID NO: 121244 - DNA, 987 bp, Homo sapiens
  Payload ID: 3772
  Gene Symbol: CCDC90B
  Gene Name: coiled-coil domain containing 90B
  ENST ID: ENST00000528149
  CDS Start-End: 114-245
gagcgaaaactacaattcccagcattcctgtggtgccagaactaccttgcccgaaagcctgtgcgagatttaccccgtcttccgcctccctcccaccggaaaactctgaggacatgaatagtcgccaggcttggcggctctttctctcccaaggcagaggagatcgttgggtttcaaggccccgcgggcatttctcgccggccctgcggagaggtgaggcaaggcgtcgtgtcatagatgcctgagtgctctctagggagacgatgcccgtggggtcgcgcctgctcgagcgaacgggaagagaaggtgccacgccctcctcccggattcacgccttgtgctgggcgacgccgctgcctgctgccccgacttgcccagctcgccccaaggggcgaggactgaggaaagcactgcctttctgttcttaaagcgaacctttgaaggcctgggcttcgcgcccggcttctttctcagccgttgtttccgttttttggtgacaagaggctagtaatctcgtcaggagccaacgtaagagttcttcactaccacaaccaaggagggatatgataggcggccagtggatataactcctttagaacaaaggaaattaacttttgatacccatgcattggttcaggacttggaaactcatggaaataacagtacaacagctaatggctcatttggatgctatcaggaaagacatggtcatcctagagaaaagtgaatttgcaaatctgagagcagagaatgagaaaatgaaaattgaattagaccaagttaagcaacaactaatgcatgaaaccagtcgaatcagagcagataataaactggatatcaacttagaaaggagcagagtaacagatatgtttacagatcaagaaaagcaacttatggaaacaactacagaatttacaaaaaaggatactcaaaccaaaagtattatttcagagaccagtaataaaattgacgctgaaattgcttcct

SEQ ID NO: 121245 - DNA, 1039 bp, Homo sapiens
  Payload ID: 3772
  Gene Symbol: CCDC90B
  Gene Name: coiled-coil domain containing 90B
  ENST ID: ENST00000529856
  CDS Start-End: 384-557
atctcccccgacccaagcgcgtaatggccgctggctatcttgggggagccagctgttggactatgccccactgccaggaaacaggcgccggaaggttctctgacaagatctcgctttcctagggcggtgaaggcgttcaaaggtcgggaaggggcgctgggagaagcggggcagcgctgagccatgctcgcgaactgtgggtctgtctgtgaagagacccagtttcgtgggaccacggtggcgcctgcgctgggaggtgagcttgtgacagagcgaaaactacaattcccagcattcctgtggtgccagaactaccttgcccgaaagcctgtgcgagatttaccccgtcttccgcctccctcccaccggaaaactctgaggacatgaatagtcgccaggcttggcggctctttctctcccaaggcagaggagatcgttgggtttcaaggccccgcgggcatttctcgccggccctgcggagaggaaataacagtacaacagctaatggctcatttggatgctatcaggaaagacatggtcatcctagagaaaagtgaatttgcaaatctgagagcagagaatgagaaaatgaaaattgaattagaccaagttaagcaacaactaatgcatgaaaccagtcgaatcagagcagataataaactggatatcaacttagaaaggagcagagtaacagatatgtttacagatcaagaaaagcaacttatggaaacaactacagaatttacaaaaaaggatactcaaaccaaaagtattatttcagagaccagtaataaaattgacgctgaaattgcttccttaaaaacactgatggaatctaacaaacttgagacaattcgttatcttgcagcttcggtgtttacttgcctggcaatagcattgggattttatagattctggaagtagtattaatgctcatcctgctgtggctgttggcttcttagaacaccaaaccgggagagatttactttgaacattgtcagttgcagcaaaaatttactacacaagattattcgaagtg

SEQ ID NO: 121246 - DNA, 1053 bp, Homo sapiens
  Payload ID: 3772
  Gene Symbol: CCDC90B
  Gene Name: coiled-coil domain containing 90B
  ENST ID: ENST00000529745
  CDS Start-End: 239-532
gggaaggggcgctgggagaagcggggcagcgctgagccatgctcgcgaactgtgggtctgtctgtgaagagacccagtttcgtgggaccacggtggcgcctgcgctgggaggtgagcttgtgacagagcgaaaactacaattcccagcattcctgtggtgccagaactaccttgcccgaaagcctgtgcgagatttaccccgtcttccgcctccctcccaccggaaaactctgaggacatgaatagtcgccaggcttggcggctctttctctcccaaggcagaggagatcgttgggtttcaaggccccgcgggcatttctcgccggccctgcggagagagttcttcactaccacaaccaaggagggatatgataggcggccagtggatataactcctttagaacaaaggaaattaacttttgatacccatgcattggttcaggacttggaaactcatggaaataacagtacaacagctaatggctcatttggatgctatcaggaaagacatggtcatcctagagaaaagtgaatttgcaaatctgagagcagagaatgagaaaatgaaaattgaattagaccaagttaagcaacaactaatgcatgaaaccagtcgaatcagagcagataataaactggatatcaacttagaaaggagcagagtaacagatatgtttacagatcaagaaaagcaacttatggaaacaactacagaatttacaaaaaaggatactcaaaccaaaagtattatttcagagaccagtaataaaattgacgctgaaattgcttccttaaaaacactgatggaatctaacaaacttgagacaattcgttatcttgcagcttcggtgtttacttgcctggcaatagcattgggattttatagattctggaagtagtattaatgctcatcctgctgtggctgttggcttcttagaacaccaaaccgggagagatttactttgaacattgtcagttgcagcaaaaatttactacacaagattattcgaagtgtatacggactaaaagaggaagtgttttagaatgagaaga

SEQ ID NO: 121247 - DNA, 4014 bp, Homo sapiens
  Payload ID: 3772
  Gene Symbol: CCDC90B
  Gene Name: coiled-coil domain containing 90B
  Uniprot ID: Q9GZT6
  ENST ID: ENST00000529689
  CDS Start-End: 436-1200
cagcggccgaaaacttcaggttccaggctgctgtgcggctaaatgcgactccatctcccccgacccaagcgcgtaatggccgctggctatcttgggggagccagctgttggactatgccccactgccaggaaacaggcgccggaaggttctctgacaagatctcgctttcctagggcggtgaaggcgttcaaaggtcgggaaggggcgctgggagaagcggggcagcgctgagccatgctcgcgaactgtgggtctgtctgtgaagagacccagtttcgtgggaccacggtggcgcctgcgctgggaggtgagcttgtgacagagcgaaaactacaattcccagcattcctgtggtgccagaactaccttgcccgaaagcctgtgcgagatttaccccgtcttccgcctccctcccaccggaaaactctgaggacatgaatagtcgccaggcttggcggctctttctctcccaaggcagaggagatcgttgggtttcaaggccccgcgggcatttctcgccggccctgcggagagagttcttcactaccacaaccaaggagggatatgataggcggccagtggatataactcctttagaacaaaggaaattaacttttgatacccatgcattggttcaggacttggaaactcatggatttgacaaaacacaagcagaaacaattgtatcagcgttaactgctttatcaaatgtcagcctggatactatctataaagagatggtcactcaagctcaacaggaaataacagtacaacagctaatggctcatttggatgctatcaggaaagacatggtcatcctagagaaaagtgaatttgcaaatctgagagcagagaatgagaaaatgaaaattgaattagaccaagttaagcaacaactaatgcatgaaaccagtcgaatcagagcagataataaactggatatcaacttagaaaggagcagagtaacagatatgtttacagatcaagaaaagcaacttatggaaacaactacagaatttacaaaaaaggatactcaaaccaaaagtattatttcagagaccagtaataaaattgacgctgaaattgcttccttaaaaacactgatggaatctaacaaacttgagacaattcgttatcttgcagcttcggtgtttacttgcctggcaatagcattgggattttatagattctggaagtagtattaatgctcatcctgctgtggctgttggcttcttagaacaccaaaccgggagagatttactttgaacattgtcagttgcagcaaaaatttactacacaagattattcgaagtgtatacggactaaaagaggaagtgttttagaatgagaagagatactgtgtctttattgtgtgtgtgtgagtgcaggtgtgtgtctttattatattgaaaagctgtcactcagacctggtttgagatagaagagcattttgtccttttgatagttaatagaaattgaaccagagttttcttatgtttgcttgaacagttgtgtaaatcatacaggattttgtgggtattggttgaatatttgtaaaccattccctagcctacatatttattactgaattaactttcctgataaccattgcataattacatttttctataaaatgaaagattattacaacaaagttgtgtgggttttcaaagtgacttaccatatagttggagattgatttctttttggtaatgaactaaaacaataaattttaaaatgataggccaggcgcggtggctcacacctgtaatctcagcactttgggaggctgaggcgggtggatcacttgaggtcaggagttctagaccagcctggccaacatggtgaaaccccgtctctgctaaaaatacaaaaattagccaggcatggtggcacatgcctgtaattccagctactcgggaggctgaggcaggagaatcttgcagtgagccgagatagcaccactgcactccagcctgggtgacagagcaagactccattacctaaataaataaatgtgtgctttagtgcaaattacaacacttaatatgaaatctgtagagttgctaaatattgagctctgattattacatgtattttttaaatatttgatactcaaaaaccagtttatccctgcttcttaatgtagtttaagttaacccatcttaaatttattacataaaacaaagcttttcttaatgacttcaattcagcaaacattgatatctagtacctactctcaagaaactcataggaaaatttaaattcgtattttgttttgttattagatatattttttcttacaaagtaatatctattagtaaatcatatgtaatttcaaagaaattttaaaatatccttttcatcttagttcttcagtcttacccagatcaagaagacaagaccagaaagtaaacattttgagttcataatgccttggtaatagctataaaagtttgacaatcattattcaaaatagccttgtcatttgtttagctataaacagggaatctgcagtatagagcagtcaagagattggtccatatggtccagtgagtgagagtcaggctttccaactatattttcctcaaaaatctaactgctggtttgttttcaaaagaaaaaccttgacattatcctgttacattctgattcatttttatctctattgcctaagagagttcttagtatattatagattaattttcactgagtcaattaataagttaccatatatattaaagtccactgtaacaaagtatactgcatttgttcagttaaccaatatgactgcctgctatatgccaaacagcatgctagtccctgtgtgcacagagatgaacatggtttcattctcattgaattgacaatcttaaggagagagacataaacaagtaaattattggtttgttaagatttaaaatattctaaaatattaagagggaatgcgtctttcctccatgtgaaggaagctccagtagcataacactgtcgtcactcttcatccccttatccactctgccctaggtaaagtgacttgcccaattgtaaatctggaaggagaaacaaggtgcaattagcccacttcctccccactcctgtttgggaccagcccatctgaagagacattcattctgttctgcttctatgggatcaggctctgcctctgcaggatgaggcctggcccagtagagcaatgcttgagacagggtaaatctgtccagttctagagttcagtgataagaagcttactggccttaagatgaaacccatattctcttgctgagcacagtggcacacatctatagtcctagctgcttgggaggctgcggcagcaggattgcttgagccaaggagttcatcaaggctaaagtgtaccatgatcatacctataaatagtcactgcactccagcctggcaacacatgagaccctgtctcctaaaaaaaaacttctccaatagttttatcagcaaataaaggtgttttttaggcctctatattagtttattcattcttcatcttagttatattcacaacccagaatggaaaggaggtatgccatttattggaccttctcaagccccaacaaataaatatacttattcccaggttatacagccactaaatattaaatagatctgcgttctttctcattgtaggggtttagcaaacaaagtgctttgtatccaataacagaagaatagaaatatgcataccataccctgtccccattacttttagatcctatatcctttccatgaaacttcattttgatggtggttctggggttcaggtaaatttttgtttcagtgatggaaatatatgaaataaggatgagaggattgtgtttctatatgccttaaaactatacctctattccagcacttgcacttcactatgaaacagcaattatacgtatctttttcctacactaaactacaagttctcagaaggcctctagacacatgtgaggtacttgttaaacgcctgtggaataaatgatactcataaa

SEQ ID NO: 121248 - DNA, 777 bp, Homo sapiens
  Payload ID: 3772
  Gene Symbol: CCDC90B
  Gene Name: coiled-coil domain containing 90B
  ENST ID: ENST00000527025
  CDS Start-End: 19-135
ccggaaaactctgaggacatgaatagtcgccaggcttggcggctctttctctcccaaggcagaggagatcgttgggtttcaaggccccgcgggcatttctcgccggccctgcggagagtttttaaaccgttttaaggttgtccacaaaataggcgaataggcacctcttatctctgttcaccttcttgaatcttcagtgccagagttcttcactaccacaaccaaggagggatatgataggcggccagtggatataactcctttagaacaaaggaaattaacttttgatacccatgcattggttcaggacttggaaactcatggatttgacaaaacacaagcagaaacaattgtatcagcgttaactgctttatcaaatgtcagcctggatactatctataaagagatggtcactcaagctcaacaggaaataacagtacaacagctaatggctcatttggatgctatcaggaaagacatggtcatcctagagaaaagtgaatttgcaaatctgagagcagagaatgagaaaatgaaaattgaattagaccaagttaagcaacaactaatgcatgaaaccagtcgaatcagagcagataataaactggatatcaacttagaaaggagcagagtaacagatatgtttacagatcaagaaaagcaacttatggaaacaactacagaatttacaaaaaaggatactcaaaccaaaagtattatttcagagaccagtaataaaattgacgctgaaattgcttccttaaaaacactgatgga

SEQ ID NO: 121249 - DNA, 612 bp, Homo sapiens
  Payload ID: 3772
  Gene Symbol: CCDC90B
  Gene Name: coiled-coil domain containing 90B
  ENST ID: ENST00000527495
  CDS Start-End: 1-402
ggatttgacaaaacacaagcagaaacaattgtatcagcgttaactgctttatcaaatgtcagcctggatactatctataaagagatggtcactcaagctcaacaggaaataacagtacaacagctaatggctcatttggatgctatcaggaaagacatggtcatcctagagaaaagtgaatttgcaaatctgagagcagagaatgagaaaatgaaaattgaattagaccaagttaagcaacaactaatgcatgaaaccagtcgaatcagagcagataataaactggatatcaacttagaaaggagcagagtaacagatatgtttacagatcaagaaaagcaacttatggaaacaactacagaatttacaaaaaagcttcggtgtttacttgcctggcaatagcattgggattttatagattctggaagtagtattaatgctcatcctgctgtggctgttggcttcttagaacaccaaaccgggagagatttactttgaacattgtcagttgcagcaaaaatttactacacaagattattcgaagtgtatacggactaaaagaggaagtgttttagaatgagaagagatactgtgtctttattgtgtgtgtgt

SEQ ID NO: 121250 - DNA, 2334 bp, Homo sapiens
  Payload ID: 3773
  Gene Symbol: CCDC91
  Gene Name: coiled-coil domain containing 91
  Uniprot ID: Q7Z6B0
  ENST ID: ENST00000381259
  CDS Start-End: 17-1342
aggtgccacttgaagaatggatgatgatgattttggtggttttgaggctgcggagacttttgatggtggaagtggtgaaacccaaacaacatctcctgctattccttgggctgcctttcctgcagtatctggagtccatctttcaccatcttctcctgagattgtactggaccgtgaccactcttcttccattggctgcctctcttctgatgccattatttcatcaccagagaatacacatgcagcaaatagcattgtgagtcaaactattccaaaagcacagattcagcaatcaacacacactcatctggatatctcactttttccattgggtttaactgatgaaaaaagtaatggaacaattgcccttgtggatgattctgaggatcctggagccaatgtatctaacatacagcttcagcaaaaaatttcaagtctggagattaaactcaaagtatctgaagaagaaaaacagagaattaaacaggatgtggaatcattgatggaaaagcataatgtcttagaaaaaggctttctaaaagaaaaagagcaagaggccatttcttttcaagatagatacaaagaacttcaggaaaaacataaacaagaattggaagacatgaggaaagctggtcacgaagccctcagcattattgtggatgaatataaggcactactgcagtcttcagttaagcaacaagtagaagctattgaaaaacagtacatttctgcaattgagaaacaggcacacaagtgtgaggagttgctaaatgctcagcatcagaggctccttgaaatgctagatacagagaaggaactgttaaaagaaaaaataaaggaagctttgattcagcaatctcaagaacagaaggaaatattggaaaagtgtttggaggaagaaaggcaaagaaataaagaggcattagtatccgctgcaaagcttgaaaaagaagcagtgaaggatgcagttttaaaagtcgtagaagaagaaagaaaaaatttagaaaaagcgcatgctgaagaaagggaattatggaagacagaacatgcaaaagatcaagaaaaagtatctcaggaaattcaaaaagctatacaagaacaaagaaaaataagtcaggaaactgttaaggcagcaataatagaagagcagaaacgaagtgaaaaggctgtggaagaggcagtgaaaagaacaagagatgaattgatagagtatataaaagaacagaaaaggctcgatcaagtcatccgccaaagaagcctgtccagtttggaactgttcctctcctgtgcacagaaacagttaagtgctttaatagctacggaaccagttgacattgaataaaaagaacatgacaaacccacactggcattggataaatcatattacaccttcaaaatacacactctgaattataaagatgtgtttgttttctttccaaatcatgtagaattgatttccagttcaaggataaaccaaaacaatatttagaactatcaagtgatctaatttattttcttttggtttcttctttacatttactgttattttattattattagtagtagcagcaacagagtatgatatgacccaaaagccattgtaaagtgccacattaccaaaattaattaagtaaactttatagcctgtgggagtctattatatattattttgcaaaagtagtaaatatattattgtttcatgatgactcttgatgagatgctagaatgtaaccatacatttatcttattttgaggatagaaatagcatggatttcaacatcacttatttatctgtataattggaaataaaacaccgatatgatagagaatcattccggcattacctaacctcttctgcagttggatctatgtattttcattggtctactgaaaacaaacaatacaattaaaagcactaaagattattatattaattcaactttgatctgatatatcacttaaactaaaggggtgtgtgtggtgtatgcttgtttcctatttctgctctttaaagatactttgaatcaataaaaccattagtctacaaatcaaattgtgaacttaatctctagaaagagaatataactcagccatttataggaatttaggttcaagtacaggatatatgaaatcttttcccagtatttcagaatgtacttaattcacaggcaggatgcttcaatgcaaaatcatgaatatttttaattcaaaactaaaatgtcattaatatgtatgtatgcaaatgttttatcttattttctgaaatgcatctactttcatgggctttgtacgtttctgagatttctcagtgtaataaaaagagctcccaaactt

SEQ ID NO: 121251 - DNA, 2738 bp, Homo sapiens
  Payload ID: 3773
  Gene Symbol: CCDC91
  Gene Name: coiled-coil domain containing 91
  Uniprot ID: Q7Z6B0
  ENST ID: ENST00000545336
  CDS Start-End: 420-1745
ttccgggggcagaggtgttcgaagccgggtggtgcgtgggctaccccaacctgtgtggctgggccgcggtctcccctcaagggcctggggccgtgcctcgggtgtacgcgtaggggtctgtgtgctgggggtggctcaccgggcagcgtgggtgagcggcgcagcggcggcagcggagagcgagagaggggagcaggcttctaaccctcctttatgtgactcagagaaaggagacctcattccaagttccaggattaattctgatgaaagtattctgtctcatgcatctaatactttacttgtgaatgaagattcattatgaggtgctatacgtggatgacctgcttagttttaatttttggagaaatacattttataaaacattttcatcagattgctaaaattgtgccacttgaagaatggatgatgatgattttggtggttttgaggctgcggagacttttgatggtggaagtggtgaaacccaaacaacatctcctgctattccttgggctgcctttcctgcagtatctggagtccatctttcaccatcttctcctgagattgtactggaccgtgaccactcttcttccattggctgcctctcttctgatgccattatttcatcaccagagaatacacatgcagcaaatagcattgtgagtcaaactattccaaaagcacagattcagcaatcaacacacactcatctggatatctcactttttccattgggtttaactgatgaaaaaagtaatggaacaattgcccttgtggatgattctgaggatcctggagccaatgtatctaacatacagcttcagcaaaaaatttcaagtctggagattaaactcaaagtatctgaagaagaaaaacagagaattaaacaggatgtggaatcattgatggaaaagcataatgtcttagaaaaaggctttctaaaagaaaaagagcaagaggccatttcttttcaagatagatacaaagaacttcaggaaaaacataaacaagaattggaagacatgaggaaagctggtcacgaagccctcagcattattgtggatgaatataaggcactactgcagtcttcagttaagcaacaagtagaagctattgaaaaacagtacatttctgcaattgagaaacaggcacacaagtgtgaggagttgctaaatgctcagcatcagaggctccttgaaatgctagatacagagaaggaactgttaaaagaaaaaataaaggaagctttgattcagcaatctcaagaacagaaggaaatattggaaaagtgtttggaggaagaaaggcaaagaaataaagaggcattagtatccgctgcaaagcttgaaaaagaagcagtgaaggatgcagttttaaaagtcgtagaagaagaaagaaaaaatttagaaaaagcgcatgctgaagaaagggaattatggaagacagaacatgcaaaagatcaagaaaaagtatctcaggaaattcaaaaagctatacaagaacaaagaaaaataagtcaggaaactgttaaggcagcaataatagaagagcagaaacgaagtgaaaaggctgtggaagaggcagtgaaaagaacaagagatgaattgatagagtatataaaagaacagaaaaggctcgatcaagtcatccgccaaagaagcctgtccagtttggaactgttcctctcctgtgcacagaaacagttaagtgctttaatagctacggaaccagttgacattgaataaaaagaacatgacaaacccacactggcattggataaatcatattacaccttcaaaatacacactctgaattataaagatgtgtttgttttctttccaaatcatgtagaattgatttccagttcaaggataaaccaaaacaatatttagaactatcaagtgatctaatttattttcttttggtttcttctttacatttactgttattttattattattagtagtagcagcaacagagtatgatatgacccaaaagccattgtaaagtgccacattaccaaaattaattaagtaaactttatagcctgtgggagtctattatatattattttgcaaaagtagtaaatatattattgtttcatgatgactcttgatgagatgctagaatgtaaccatacatttatcttattttgaggatagaaatagcatggatttcaacatcacttatttatctgtataattggaaataaaacaccgatatgatagagaatcattccggcattacctaacctcttctgcagttggatctatgtattttcattggtctactgaaaacaaacaatacaattaaaagcactaaagattattatattaattcaactttgatctgatatatcacttaaactaaaggggtgtgtgtggtgtatgcttgtttcctatttctgctctttaaagatactttgaatcaataaaaccattagtctacaaatcaaattgtgaacttaatctctagaaagagaatataactcagccatttataggaatttaggttcaagtacaggatatatgaaatcttttcccagtatttcagaatgtacttaattcacaggcaggatgcttcaatgcaaaatcatgaatatttttaattcaaaactaaaatgtcattaatatgtatgtatgcaaatgttttatcttattttctgaaatgcatctactttcatgggctttgtacgtttctgagatttctcagtgtaataaaaagagctcccaaactta

SEQ ID NO: 121252 - DNA, 1626 bp, Homo sapiens
  Payload ID: 3773
  Gene Symbol: CCDC91
  Gene Name: coiled-coil domain containing 91
  ENST ID: ENST00000535520
  CDS Start-End: 197-364
aaaagcaactgagcaaggaggttggataggttgtgtggaggacagatgataactttgttttggaacacttcctccttcacaggctcatgctctctctctcacctgccgccatgtaagatgtgcctgcttctccttctgccatgattgtaagtttcctgaggcctccccagccgtgcaaacctgtgccacttgaagaatggatgatgatgattttggtggttttgaggctgcggagacttttgatggtggaagtggtgaaacccaaacaacatctcctgctattccttgggctgcctttcctgcagggaaacatgcaattttcattgtgagctgccttccagagtttatggtagaacttcactgaagttgctgatgccaatgtggaataaagtatctggagtccatctttcaccatcttctcctgagattgtactggaccgtgaccactcttcttccattggctgcctctcttctgatgccattatttcatcaccagagaatacacatgcagcaaatagcattgtgagtcaaactattccaaaagcacagattcagcaatcaacacacactcatctggatatctcactttttccattgggtttaactgatgaaaaaagtaatggaacaattgcccttgtggatgattctgaggatcctggagccaatgtatctaacatacagcttcagcaaaaaatttcaagtctggagattaaactcaaagtatctgaagaagaaaaacagagaattaaacaggatgtggaatcattgatggaaaagcataatgtcttagaaaaaggctttctaaaagaaaaagagcaagaggccatttcttttcaagatagatacaaagaacttcaggaaaaacataaacaagaattggaagacatgaggaaagctggtcacgaagccctcagcattattgtggatgaatataaggcactactgcagtcttcagttaagcaacaagtagaagctattgaaaaacagtacatttctgcaattgagaaacaggcacacaagtgtgaggagttgctaaatgctcagcatcagaggctccttgaaatgctagatacagagaaggaactgttaaaagaaaaaataaaggaagctttgattcagcaatctcaagaacagaaggaaatattggaaaagtgtttggaggaagaaaggcaaagaaataaagaggcattagtatccgctgcaaagcttgaaaaagaagcagtgaaggatgcagttttaaaagtcgtagaagaagaaagaaaaaatttagaaaaagcgcatgctgaagaaagggaattatggaagacagaacatgcaaaagatcaagaaaaagtatctcaggaaattcaaaaagctatacaagaacaaagaaaaataagtcaggaaactgttaaggcagcaataatagaagagcagaaacgaagtgaaaaggctgtggaagaggcagtgaaaagaacaagagatgaattgatagagtatataaaagaacagaaaaggctcgatcaagtcatccgccaaagaagcctgtccagtttggaactgttcctctcctgtgcacagaaacagttaagtgctttaatagctacggaaccagttgacattgaataaaaagaacatgacaaaccc

SEQ ID NO: 121253 - DNA, 259 bp, Homo sapiens
  Payload ID: 3773
  Gene Symbol: CCDC91
  Gene Name: coiled-coil domain containing 91
  ENST ID: ENST00000541792
  CDS Start-End: 1-141
ctcgatcaagtcatccgccaaagaagcctgtccagtttggaactgttcctctcctgtgcacagaaacaggatactgaggggctacttgtgagatggcaaaaaagagatatggcaaccagaatttccctcagtcgcccctgacaagttctcctacatcttcacacaaagagaagtctggcctaggaggtggaggatgcagcgcaccaagatcgcaccactgtactccaggatgggcaccagagtgagaccttgtctcaaa

SEQ ID NO: 121254 - DNA, 471 bp, Homo sapiens
  Payload ID: 3773
  Gene Symbol: CCDC91
  Gene Name: coiled-coil domain containing 91
  ENST ID: ENST00000538586
  CDS Start-End: 217-471
ctctcttgcctgcagccatgtaagttgtgcctttgcttctccttcaccttccaccatgattgtgaggcctccccagccatgtggaattttcctccttcacaggctcatgctctctctctcacctgccgccatgtaagatgtgcctgcttctccttctgccatgattgtaagtttcctgaggcctccccagccgtgcaaacctgtgccacttgaagaatggatgatgatgattttggtggttttgaggctgcggagacttttgatggtggaagtggtgaaacccaaacaacatctcctgctattccttgggctgcctttcctgcagtatctggagtccatctttcaccatcttctcctgagattgtactggaccgtgaccactcttcttccattggctgcctctcttctgatgccattatttcatcaccagagaatacacatgcagcaaatagcattgtgagtcaaactatt

SEQ ID NO: 121255 - DNA, 2440 bp, Homo sapiens
  Payload ID: 3773
  Gene Symbol: CCDC91
  Gene Name: coiled-coil domain containing 91
  Uniprot ID: Q7Z6B0
  ENST ID: ENST00000539107
  CDS Start-End: 230-1447
ggccttggcggaaatcaacttccgggggcagaggtgttcgaagccgggtggtgcgtgggctaccccaacctgtgtggctgggccgcggtctcccctcaagggcctggggccgtgcctcgggtgtacgcgtaggggtctgtgtgctgggggtggctcaccgggcagcgtgggtgagcggcgcagcggcggcagcggagagcgagagaggggagcaggtgccacttgaagaatggatgatgatgattttggtggttttgaggctgcggagacttttgatggtggaagtggtgaaacccaaacaacatctcctgctattccttgggctgcctttcctgcagtatctggagtccatctttcaccatcttctcctgagattgtactggaccgtgaccactcttcttccattggctgcctctcttctgatgccattatttcatcaccagagaatacacatgcagcaaatagcattgtgagtcaaactattccaaaagcacagattcagcaatcaacacacactcatctggatatctcactttttccattgggtttaactgatgaaaaaagtaatggaacaattgcccttgtggatgattctgaggatcctggagccaatgtatctaacatacagcttcagcaaaaaatttcaagtctggagattaaactcaaagtatctgaagaagaaaaacagagaattaaacaggatgtggaatcattgatggaaaagcataatgtcttagaaaaaggctttctaaaagaaaaagagcaagaggccatttcttttcaagatagatacaaagaacttcaggaaaaacataaacaagaattggaagacatgaggaaagctggtcacgaagccctcagcattattgtggatgaatataagcatcagaggctccttgaaatgctagatacagagaaggaactgttaaaagaaaaaataaaggaagctttgattcagcaatctcaagaacagaaggaaatattggaaaagtgtttggaggaagaaaggcaaagaaataaagaggcattagtatccgctgcaaagcttgaaaaagaagcagtgaaggatgcagttttaaaagtcgtagaagaagaaagaaaaaatttagaaaaagcgcatgctgaagaaagggaattatggaagacagaacatgcaaaagatcaagaaaaagtatctcaggaaattcaaaaagctatacaagaacaaagaaaaataagtcaggaaactgttaaggcagcaataatagaagagcagaaacgaagtgaaaaggctgtggaagaggcagtgaaaagaacaagagatgaattgatagagtatataaaagaacagaaaaggctcgatcaagtcatccgccaaagaagcctgtccagtttggaactgttcctctcctgtgcacagaaacagttaagtgctttaatagctacggaaccagttgacattgaataaaaagaacatgacaaacccacactggcattggataaatcatattacaccttcaaaatacacactctgaattataaagatgtgtttgttttctttccaaatcatgtagaattgatttccagttcaaggataaaccaaaacaatatttagaactatcaagtgatctaatttattttcttttggtttcttctttacatttactgttattttattattattagtagtagcagcaacagagtatgatatgacccaaaagccattgtaaagtgccacattaccaaaattaattaagtaaactttatagcctgtgggagtctattatatattattttgcaaaagtagtaaatatattattgtttcatgatgactcttgatgagatgctagaatgtaaccatacatttatcttattttgaggatagaaatagcatggatttcaacatcacttatttatctgtataattggaaataaaacaccgatatgatagagaatcattccggcattacctaacctcttctgcagttggatctatgtattttcattggtctactgaaaacaaacaatacaattaaaagcactaaagattattatattaattcaactttgatctgatatatcacttaaactaaaggggtgtgtgtggtgtatgcttgtttcctatttctgctctttaaagatactttgaatcaataaaaccattagtctacaaatcaaattgtgaacttaatctctagaaagagaatataactcagccatttataggaatttaggttcaagtacaggatatatgaaatcttttcccagtatttcagaatgtacttaattcacaggcaggatgcttcaatgcaaaatcatgaatatttttaattcaaaactaaaatgtcattaatatgtatgtatgcaaatgttttatcttattttctgaaatgcatctactttcatgggctttgtacgtttctgagatttctcagtgtaataaaaagagctcccaaactta

SEQ ID NO: 121256 - DNA, 1667 bp, Homo sapiens
  Payload ID: 3773
  Gene Symbol: CCDC91
  Gene Name: coiled-coil domain containing 91
  ENST ID: ENST00000543809
  CDS Start-End: 90-893
gtgggaaaggattgttttcctgtaatgaagtccatcttgtattactgagtcaaggaaactataatcaacatttgggtgccacttgaagaatggatgatgatgattttggtggttttgaggctgcggagacttttgatggtggaagtggtgaaacccaaacaacatctcctgctattccttgggctgcctttcctgcagtatctggagtccatctttcaccatcttctcctgagattgtactggaccgtgaccactcttcttccattggctgcctctcttctgatgccattatttcatcaccagagaatacacatgcagcaaatagcattgtgagtcaaactattccaaaagcacagattcagcaatcaacacacactcatctggatatctcactttttccattgggtttaactgatgaaaaaagtaatggaacaattgcccttgtggatgattctgaggatcctggagccaatgtatctaacatacagcttcagcaaaaaatttcaagtctggagattaaactcaaagtatctgaagaagaaaaacagagaattaaacaggatgtggaatcattgatggaaaagcataatgtcttagaaaaaggctttctaaaagaaaaagagcaagaggccatttcttttcaagatagatacaaagaacttcaggaaaaacataaacaagaattggaagacatgaggaaagctggtcacgaagccctcagcattattgtggatgaatataaggcactactgcagtcttcagttaagcaacaagtagaagctattgaaaaacagtacatttctgcaattgagaaacaggcacacaagtgtgaggagttgctaaatgctcagagtgcccttttttcaatccttcctgcgattggctgcttttagaatcctgctgattggtgcgttttacagagtgctgattggtgtattttacaatcctcttgtaagacaggaaagttccccaactccctactcgacccaggaagtccagctggcctcacctctcaattccaccaggaagaataaagcatcagaggctccttgaaatgctagatacagagaaggaactgttaaaagaaaaaataaaggaagctttgattcagcaatctcaagaacagaaggaaatattggaaaagtgtttggaggaagaaaggcaaagaaataaagaggcattagtatccgctgcaaagcttgaaaaagaagcagtgaaggatgcagttttaaaagtcgtagaagaagaaagaaaaaatttagaaaaagcgcatgctgaagaaagggaattatggaagacagaacatgcaaaagatcaagaaaaagtatctcaggaaattcaaaaagctatacaagaacaaagaaaaataagtcaggaaactgttaaggcagcaataatagaagagcagaaacgaagtgaaaaggctgtggaagaggcagtgaaaagaacaagagatgaattgatagagtatataaaagaacagaaaaggctcgatcaagtcatccgccaaagaagcctgtccagtttggaactgttcctctcctgtgcacagaaacagttaagtgctttaatagctacggaaccagttgacattgaataaaaagaacatgacaaacccacactggcattggataaatcatattacaccttcaaaatacacactctga

SEQ ID NO: 121257 - DNA, 518 bp, Homo sapiens
  Payload ID: 3773
  Gene Symbol: CCDC91
  Gene Name: coiled-coil domain containing 91
  ENST ID: ENST00000540794
  CDS Start-End: 157-518
cagacagaagttaagtaagaggctttgggtcaagactgtgactggattcaaatcctaaagttttcgctacactgtgtgctgtggttcctccttcacaggctcatgctctctctctcacctgccgccatgtaagatgtgcctgcttctccttctgccatgattgtaagtttcctgaggcctccccagccgtgcaaacctgcactactgcagtcttcagttaagcaacaagtagaagctattgaaaaacagtacatttctgcaattgagaaacaggcacacaagtgtgaggagttgctaaatgctcagcatcagaggctccttgaaatgctagatacagagaaggaactgttaaaagaaaaaataaaggaagctttgattcagcaatctcaagaacagaaggaaatattggaaaagtgtttggaggaagaaaggcaaagaaataaagaggcattagtatccgctgcaaagcttgaaaaagaagcagtgaaggatgcagttttaaaagtcgtagaagaaga

SEQ ID NO: 121258 - DNA, 502 bp, Homo sapiens
  Payload ID: 3773
  Gene Symbol: CCDC91
  Gene Name: coiled-coil domain containing 91
  ENST ID: ENST00000542801
  CDS Start-End: 1-368
aaaaagcgcatgctgaagaaagggaattatggaagacagaacatgcaaaagatcaagaaaaagtatctcaggaaattcaaaaagctatacaagaacaaagaaaaataagtcaggaaactgttaaggcagcaataatagaagagcagaaacgaagtgaaaaggctgtggaagaggcagtgaaaagaacaagagatgaattgatagagtatataaaagaacagaaaaggctcgatcaagtcatccgccaaagaagcctgtccagtttggaactgttcctctcctgtgcacagaaacaggatactgaggggctacttgtgagatggcaaaaaagagatatggcaaccagaatttccctcagtcgcccctgacaagttctcctacatcttcacacaaagtaagagggccgccacttcacggtgatctcagcactcctaatgccatttggaaaattctggacttggattaagcactactcaggcaggacagttcacagatatctgtg

SEQ ID NO: 121259 - DNA, 1578 bp, Homo sapiens
  Payload ID: 3773
  Gene Symbol: CCDC91
  Gene Name: coiled-coil domain containing 91
  ENST ID: ENST00000545737
  CDS Start-End: 492-1578
acagctcaaaaatgctgatcaattttgaaaatctaaatcagccttggccctgaaaccgagggaagaacctttgtggtaggggacagatttccaaaaactcaccacagtcctgttcttagctggagtttgtgctgatgttgccagacaactgaggaatagatgcaaaaagcaggaagcattattgaattgagctctagtgccaatttgggaaaagcaaattaaaatgtaaaagaatatttttccactcctggcatctcaacataaaatggcaaaatacatggttgctgaaaaagttacagaaattgctaattttgccaaaaagtaaaagccaattgcaaattcttttttgcataaaaaatgcatagacagttagaaattctaatttacaaataaatatgtatacatttaagttggagagtattttgacataaatgactgtgtgtgtgcgggcttgtttcaatatcttatatttttcaggtgccacttgaagaatggatgatgatgattttggtggttttgaggctgcggagacttttgatggtggaagtggtgaaacccaaacaacatctcctgctattccttgggctgcctttcctgcagtatctggagtccatctttcaccatcttctcctgagattgtactggaccgtgaccactcttcttccattggctgcctctcttctgatgccattatttcatcaccagagaatacacatgcagcaaatagcattgtgagtcaaactattccaaaagcacagattcagcaatcaacacacactcatctggatatctcactttttccattgggtttaactgatgaaaaaagtaatggaacaattgcccttgtggatgattctgaggatcctggagccaatgtatctaacatacagcttcagcaaaaaatttcaagtctggagattaaactcaaagtatctgaagaagaaaaacagagaattaaacaggatgtggaatcattgatggaaaagcataatgtcttagaaaaaggctttctaaaagaaaaagagcaagaggccatttcttttcaagatagatacaaagaacttcaggaaaaacataaacaagaattggaagacatgaggaaagctggtcacgaagccctcagcattattgtggatgaatataaggcactactgcagtcttcagttaagcaacaagtagaagctattgaaaaacagtacatttctgcaattgagaaacaggcacacaagtgtgaggagttgctaaatgctcagcatcagaggctccttgaaatgctagatacagagaaggaactgttaaaagaaaaaataaaggaagctttgattcagcaatctcaagaacagaaggaaatattggaaaagtgtttggaggaagaaaggcaaagaaataaagaggcattagtatccgctgcaaagcttgaaaaagaagcagtgaaggatgcagttttaaaagtcgtagaagaagaaagaaaaaatttagaaaaagcgcatgctgaagaaagggaattatggaagacagaacatgcaaaagatcaagaaaaagtatctcaggaaattcaaaaagctatacaagaacaaa

SEQ ID NO: 121260 - DNA, 735 bp, Homo sapiens
  Payload ID: 3773
  Gene Symbol: CCDC91
  Gene Name: coiled-coil domain containing 91
  ENST ID: ENST00000542814
  CDS Start-End: 1-93
ctcgatcaagtcatccgccaaagaagcctgtccagtttggaactgttcctctcctgtgcacagaaacaaccacggttgaccacaggtaactgaaaccacaggaatgagatgacagggatactgaggggctacttgtgagatggcaaaaaagagatatggcaaccagaatttccctcagtcgcccctgacaagttctcctacatcttcacacaaagtaagagggccgccacttcacggtgatctcagcactcctaatgccatttggaaaattctggacttggattaagcactactcaggcaggacagttcacagatatctgtgagccatgacttaaggcccatcatctctgaagctatttccaagttagttagcatcatatggacaaacagagggagaggcagaaagagaaatttcttttcctgcaacgtatgtgttatgttaacaataggatacaatgaagttagggaatcatgtatgaatgtaaatgcccctgcatccccaccgtgttcagtactttatgtattacctttgtcttttccatgatatgcttcttacacattcccccactctttccatggttatctgtcaattgtcaaatgctgtttacctagagcatcggggttctcatttgctagacttttttttttttgcagtttattattctttacctctgtttactaaactccagcatctcacctacattatgtaactttttatcaaagttaagtgaaatg

SEQ ID NO: 121261 - DNA, 549 bp, Homo sapiens
  Payload ID: 3773
  Gene Symbol: CCDC91
  Gene Name: coiled-coil domain containing 91
  ENST ID: ENST00000536154
  CDS Start-End: 170-549
cttgcctgcagccatgtaagttgtgcctttgcttctccttcaccttccaccatgattgtgaggcctccccagccatgtggaattgcttctaaccctcctttatgtgactcagagaaaggagacctcattccaagttccaggattaattctgcatcagaggctccttgaaatgctagatacagagaaggaactgttaaaagaaaaaataaaggaagctttgattcagcaatctcaagaacagaaggaaatattggaaaagtgtttggaggaagaaaggcaaagaaataaagaggcattagtatccgctgcaaagcttgaaaaagaagcagtgaaggatgcagttttaaaagtcgtagaagaagaaagaaaaaatttagaaaaagcgcatgctgaagaaagggaattatggaagacagaacatgcaaaagatcaagaaaaagtatctcaggaaattcaaaaagctatacaagaacaaagaaaaataagtcaggaaactgttaaggcagcaataatagaagagcagaaacgaagtgaaaaggctgtggaaga

SEQ ID NO: 121262 - DNA, 1301 bp, Homo sapiens
  Payload ID: 3773
  Gene Symbol: CCDC91
  Gene Name: coiled-coil domain containing 91
  ENST ID: ENST00000536442
  CDS Start-End: 219-1301
aaatcaacttccgggggcagaggtgttcgaagccgggtggtgcgtgggctaccccaacctgtgtggctgggccgcggtctcccctcaagggcctggggccgtgcctcgggtgtacgcgtaggggtctgtgtgctgggggtggctcaccgggcagcgtgggtgagcggcgcagcggcggcagcggagagcgagagaggggagcaggtgccacttgaagaatggatgatgatgattttggtggttttgaggctgcggagacttttgatggtggaagtggtgaaacccaaacaacatctcctgctattccttgggctgcctttcctgcagtatctggagtccatctttcaccatcttctcctgagattgtactggaccgtgaccactcttcttccattggctgcctctcttctgatgccattatttcatcaccagagaatacacatgcagcaaatagcattgtgagtcaaactattccaaaagcacagattcagcaatcaacacacactcatctggatatctcactttttccattgggtttaactgatgaaaaaagtaatggaacaattgcccttgtggatgattctgaggatcctggagccaatgtatctaacatacagcttcagcaaaaaatttcaagtctggagattaaactcaaagtatctgaagaagaaaaacagagaattaaacaggatgtggaatcattgatggaaaagcataatgtcttagaaaaaggctttctaaaagaaaaagagcaagaggccatttcttttcaagatagatacaaagaacttcaggaaaaacataaacaagaattggaagacatgaggaaagctggtcacgaagccctcagcattattgtggatgaatataaggcactactgcagtcttcagttaagcaacaagtagaagctattgaaaaacagtacatttctgcaattgagaaacaggcacacaagtgtgaggagttgctaaatgctcagcatcagaggctccttgaaatgctagatacagagaaggaactgttaaaagaaaaaataaaggaagctttgattcagcaatctcaagaacagaaggaaatattggaaaagtgtttggaggaagaaaggcaaagaaataaagaggcattagtatccgctgcaaagcttgaaaaagaagcagtgaaggatgcagttttaaaagtcgtagaagaagaaagaaaaaatttagaaaaagcgcatgctgaagaaagggaattatggaagacagaacatgcaaaagatcaagaaaaagtatctcaggaaattcaaaaagctatacaagaa

SEQ ID NO: 121263 - DNA, 376 bp, Homo sapiens
  Payload ID: 3773
  Gene Symbol: CCDC91
  Gene Name: coiled-coil domain containing 91
  ENST ID: ENST00000535212
  CDS Start-End: 1-327
gcattagtatccgctgcaaagcttgaaaaagaagcagtgaaggatgcagttttaaaagtcgtagaagaagaaagaaaaaatttagaaaaagcgcatgctgaagaaagggaattatggaagacagaacatgcaaaagatcaagaaaaagtatctcaggaaattcaaaaagctatacaagaacaaagaaaaataagtcaggaaactgttaaggcagcaataatagaagagcagaaacgaagtgaaaaggctgtggaagaggcagtgaaaagaacaagagatgaattgatagagtatataaaagaacagaaaagggtaagtatctcctgaagagttttaatttgtgcttcaataaactgaatcagtgacttccatacaa

SEQ ID NO: 121264 - DNA, 575 bp, Homo sapiens
  Payload ID: 3773
  Gene Symbol: CCDC91
  Gene Name: coiled-coil domain containing 91
  ENST ID: ENST00000543534
  CDS Start-End: 301-575
actgcggaggaaagctttggacatgaaacctatttttggcttcactttaaggagtggaactctattaaaagctgcgctggtgtttttttgagacagaatcgcctaagctgaagtgtagtggcgccatcatagctcactgcagcctccagctccttggctcaagtgattctcctgcctgagcctccctagtagctaggactacaggtgctatacgtggatgacctgcttagttttaatttttggagaaatacattttataaaacattttcatcagattgctaaaattgtgccacttgaagaatggatgatgatgattttggtggttttgaggctgcggagacttttgatggtggaagtggtgaaacccaaacaacatctcctgctattccttgggctgcctttcctgcagtatctggagtccatctttcaccatcttctcctgagattgtactggaccgtgaccactcttcttccattggctgcctctcttctgatgccattatttcatcaccagagaatacacatgcagcaaatagcattgtgagtcaaactattccaaaagcacagattcagca

SEQ ID NO: 121265 - DNA, 166 bp, Homo sapiens
  Payload ID: 3773
  Gene Symbol: CCDC91
  Gene Name: coiled-coil domain containing 91
  ENST ID: ENST00000543019
  CDS Start-End: 1-83
tcgatcaagtcatccgccaaagaagcctgtccagtttggaactgttcctctcctgtgcacagaaacagagaagtctggcctaggaggtggaggatgcagcgcaccaagatcgcaccactgtactccaggatgggcaccagagtgagaccttgtctcaaaaaaaaaa

SEQ ID NO: 121266 - DNA, 305 bp, Homo sapiens
  Payload ID: 3773
  Gene Symbol: CCDC91
  Gene Name: coiled-coil domain containing 91
  ENST ID: ENST00000539270
  CDS Start-End: 1-93
ctcgatcaagtcatccgccaaagaagcctgtccagtttggaactgttcctctcctgtgcacagaaacaaccacggttgaccacaggtaactgaaaccacaggaatgagatgacagggatactgaggggctacttgtgagatggcaaaaaagagatatggcaaccagaatttccctcagtcgcccctgacaagttctcctacatcttcacacaaagagaagtctggcctaggaggtggaggatgcagcgcaccaagatcgcaccactgtactccaggatgggcaccagagtgagaccttgtctcaa

SEQ ID NO: 121267 - DNA, 2787 bp, Homo sapiens
  Payload ID: 3774
  Gene Symbol: CCDC92
  Gene Name: coiled-coil domain containing 92
  Uniprot ID: Q53HC0
  ENST ID: ENST00000238156
  CDS Start-End: 356-1351
ggcccgccgccgcgccggcgcctagcccgccgggtcagcgcggccaggcctcgccgccggccccgctcccagggtgcaccgcggctagcgctggggtgggagcgggcgagatgcgccgggcgggcggtgcccactgacctccctcggcggcccggcccgggcagcgcccgagcccaggcagccccgcccgccgcgccccgcccagcccatgggccacgggcccccaccgccgcccgccgggaggaccgagcctaagagggcagccgcctgaaggaacgcgacggcggcgcccgcagtatttttcagtgctgtacaagcgtcttgaattactctggtagcttttccagaaagacccatgacttcaccacatttctcgagttacgatgaaggtcctctggatgtcagcatggcagccacaaacctggagaaccagctgcacagcgcacagaagaacctcctgttccttcagcgggagcatgccagcacgctcaaggggctgcactccgagatcaggcggctgcagcagcactgcacagatttaacatatgagctgacagtcaaaagttcggaacagacaggagacgggacttctaaaagcagtgaattaaagaaaagatgtgaagagctggaagcccaactgaaagtgaaagagaacgaaaatgctgagttgttgaaagaactggagcagaaaaacgcgatgatcacagtgctggagaacaccatcaaggagcgagagaagaagtacctggaggagctgaaggccaagagtcacaagctgaccctgctgtctagcgagctggagcagcgggccagcaccatcgcctacctgacctcccagctgcacgccgccaagaagaagctcatgagctccagcgggacctcagatgccagcccgtcagggagccccgtgctggccagctacaagccagcgccccccaaagacaagctacccgaaacgcctcgccgccgcatgaaaaagagcctctcagcccccttgcacccggaatttgaagaggtctacagattcggggcagagagcaggaaactccttttgcgggaaccagtggatgctatgcccgaccccaccccatttctgctggctagggagtccgccgaggtccacctcatcaaagagaggcccctcgtcatcccccccatcgcctccgaccgaagcggcgagcagcacagcccggcccgcgaaaagccgcacaaggcccacgtcggggtggcacatcggatccaccacgccaccccgccgcaggcccagcccgaggtgaagaccctggcggtcgaccaggtgaacggaggcaaggtggtgaggaagcactcagggacggacagaactgtgtgaagcccgccgtgccccaccccgcgctgtccatgcactgtgagcaccactgggaaatctcagccacaccttttctgtttaatcccatgcatgccaaacacttttcacacctaccgacccattctccttctgcttctcttgccctcttcttcacaccaaaatatgatcgtgtccctgccgcagaatatgtatttcctaattgctgtggccaaacgcctgtgtgccgaatcgcttgcttctgatcccgctccgtgtaacctaagtgcgctgcaggcaaagcccaggccacggctgcgtcactactgatgttcacgatgccacacagtcacacacctaattcattctcaagtcggagcaacacataccaaccttgaccttatcctcaagctccagggcagcctggccgagcagcccctgctccctcctggagacccttgtcacctcccgagctcctcctggagacccctgtcacctcctgaccaacctttcccagggcggcaccgatcaccgagcagccgtgcgtgtatctcaaggaactaaataagatgacgctactcctcatagcaccacaacctgaatgtgtgttcatatttttttgttagttttatccaaaatgtttaagatcccaacaaactttattttctaaacctgccttccttctgttttgtgtcttttattaaacaaacacctgaaggagggctaggagactgcaggagggagagcaatcacaggtcccagaagcgactccggcctcctcccggcccagagctagtccttagaatgtgctgcgctcctgagcttctgtgggaagctgcttttgcctctgatggcccctgcccactgtgctgcccgtgctagcccctctcctccctcatggagtgaagccacccctcacctccaggtggccagccagggctccaggccagcctcatggtgcacagagggaaggggtgcccagtgaccactggtcctggaggttctgtgtccttacctgaccccacacagacccaggcaggctgggggtagaagctcatgcaggaactaaacactaagctcaacaacttcacagtcgccgtagcaggtcagagccaaagaagctagggccagagagttctggaagggggagaagtggctccaggtgactggtcacttctgctctgtgcccgacatcatcagcccttcttgccaaaaaggagcatctgctgaaacagacctggatcatcgaaaacacacctttggaaattacattaggattctcacttgtgccaatgctatgtatgccaggcacttttgcctaatcaagtgttttctctgagaaggaaaagaaaactccacacatcttaaaatactctccaatatttactttttgattatataaattccttttaaaaagtagtattaaaaacaaaaccattcaggttaatttgtatggaaagaga

SEQ ID NO: 121268 - DNA, 555 bp, Homo sapiens
  Payload ID: 3774
  Gene Symbol: CCDC92
  Gene Name: coiled-coil domain containing 92
  ENST ID: ENST00000535556
  CDS Start-End: 267-555
atgggccacgggcccccaccgccgcccgccgggaggaccgagcctaagagggcagccgcctgaaggaacgcgacggcggcgcccgcagcacaggaagtttgcggagaggacgcttgaactgaataatccacgctggagctctcagatcactagatggaaagtcagaggtcaaacacccttacatggacgtgctgaagccatcaaaaaacaaaacagaaaaaaacctctaggaaatgatctaggaaaatggtcctctggatgtcagcatggcagccacaaacctggagaaccagctgcacagcgcacagaagaacctcctgttccttcagcgggagcatgccagcacgctcaaggggctgcactccgagatcaggcggctgcagcagcactgcacagatttaacatatgagctgacagtcaaaagttcggaacagacaggagacgggacttctaaaagcagtgaattaaagaaaagatgtgaagagctggaagcccaactgaaagtgaaagagaacgaaaatgctgagttgttgaaagaactggagcagaaaaacg

SEQ ID NO: 121269 - DNA, 751 bp, Homo sapiens
  Payload ID: 3774
  Gene Symbol: CCDC92
  Gene Name: coiled-coil domain containing 92
  ENST ID: ENST00000539761
  CDS Start-End: 386-751
caggagcgccccggggcctagcccggctttgtctgggatgctgtggggaggaggccgtctgaatccacatcgcctttttaaatgcttgttaccacccggggaaccttagagaccctccctgacaagttgtatcgcctcccgtcctggtagcctttccccaacagaatcctggatttgagtctgtcctttgaaagcatctctgctagagttcccacttccaaacccctttcagctcttcgggattcagcctccaggttgccctcggagtggagtctgtggctttccaccggagcagcgcccaggaagtgttttcgtgtgatgaaagttatttttcagtgctgtacaagcgtcttgaattactctggtagcttttccagaaagacccatgacttcaccacatttctcgagttacgatgaaggtcctctggatgtcagcatggcagccacaaacctggagaaccagctgcacagcgcacagaagaacctcctgttccttcagcgggagcatgccagcacgctcaaggggctgcactccgagatcaggcggctgcagcagcactgcacagatttaacatatgagctgacagtcaaaagttcggaacagacaggagacgggacttctaaaagcagtgaattaaagaaaagatgtgaagagctggaagcccaactgaaagtgaaagagaacgaaaatgctgagttgttgaaagaactggagcagaaaaacgcgatgatcacagtgctggagaacacc

SEQ ID NO: 121270 - DNA, 4883 bp, Homo sapiens
  Payload ID: 3774
  Gene Symbol: CCDC92
  Gene Name: coiled-coil domain containing 92
  Uniprot ID: Q53HC0
  ENST ID: ENST00000545135
  CDS Start-End: 3298-4242
gtcacttctcagaagcacctaaataggaagcccatggaaacaaaagcttttcaaccctgaagcccttacattcctctggcaccacagctgcactcaacagactggcaccaggcccattcgtgggcctccagggtgccaggcactgtgctagggcttagggtgcagcagtgaacaatctggagtctgtgcgaggaggcgggaaacagacccacacttacagaccctcacagagacacaaagactagaactggggacagggtggtaatgcacccgagtctgggggccagggcttccgggaggaagtaaacttgtactgagacctaaaggataagtagacagtggagacccaggagaggtgggtgggagagaggcctaagaagagtgttctgggcagaggaggagccatgagagggcaccagggtgggagaagcacagcccagcagggcacccggaggaaagctcgtgccacctggagccctgggggtaggagaagggccagcgagggtggcggggccagttgcagggccgggcagaccagtctgattctcagagcagtgggaaccattggaggtttttaagtagtctcaatttaaaaacaagatcactctgctgccacgtggagagcagaatggagcaggtaggagaggacagagggaggctttctggcagggatttgggtgagggtgaggacggcctcagcagcggagacggggagagttgaacggatctgagagctgctttcaaagcaggatgccagcaagatcatcatggactggaaatggatggcgggggatgccagcgtcaaggccacccccaggttgtgcagctggggacagtgcttgtgaggggtaggacactaggcctagggcagctctcctgtcatccaagacccactaaattctggatcacatttaaatggttctttctctttgacagcaagccactaacatatgggctctgcttcttccatcagccaacagaatcctggatttgagtctgtcctttgaaagcatctctgctagagttcccacttccaaacccctttcagctcttcgggattcagcctccaggtgaggtgctggaattgatgccagagtgaacgactccggattgctgagtggaaggaaaacgtaggcaccgctactgacagctctcaggcgctcctgggattttccttcctttgacgctgaggctgttccgctttcaagcgttctgctttgtgagggaagggcaaggtcagaaggtgctcaccctttccacagcaagcacgcggcacacgtgtgccacacgctgaacctgccttggttgtagctggctcctttgttaaggtcagcgccccccaagaccacgtgctgtgcagacagtgttgggatctcgggaactgtggggttccacttagaaactagtgtctggcccagcagcctacacaggagagtttgcggttacagcacagagacggtttcggggacagaaacatcctttctcactcctgccggaatgctgctcacggctccactgaggaaagccctgcttgatggaaactcaactctgccatcatctgcagcccagtgcgacggcagtcaaaggccagggagagctatgctttgttttatagaaacatgcctagaaatggtcgccttaagttatttaacccactccctattgtcgggttttgagtttgtttctagtcttttccaactgcaaactgcactgtagtgaccattctcacagctacctcttttcacacaaaagtaataatttccctttggtagatttctaaaaataaattgctagttcagagagatgaccaattccaaggcttctgatcagctctgcccaatcactgcccgtggtgaggtgccccccgagactgtacttgccgtgtcctggggccactgccctctcctgccagtttttgtccccaactgaaagggcctcttgtttctctttttcttggtcctttttaggatgtatcattgttcattccccttcgtgagctccgtcgtgttttatttccttctctgcgttctcaggttgccctcggagtggagtctgtggctttccaccggagcagcgcccaggaagtgttttcgtgtgatgaaagtgtatgtctgaagttcgttatgaactcgtcctagctccagagctagtgtgcatgcatgtcactggtcgtacagataattgatgagcaattggtgtcgtctgaagcagtgacagcctgggtgtgtcagtgtctccaaaacggttccactgtggcatcctacaaatgggctgcgtcctgggagccattgagaagttgtacctcctttacggagggttctctggaatagcaaattagggaaaatgcattctgaggttctgtatttacaataataatttataagcaaataactcacatttcatcctcagtatttttcagtgctgtacaagcgtcttgaattactctggtagcttttccagaaagacccatgacttcaccacatttctcgagttacgatgaaggtagagtctggggccctgagtgagcatcagatgctggaagctggggctgggaggggccaagcattggggacagactccagacacctgcaccaccccctggccccatgagatacgttctcagaccttcccaagaaggatctgtggctcctctcagtgctgtgaagtgcagggggcttccctctggaattcagcccatctctccctcctactttggctggctccagatgccatttagaggaaatgtttggcccatttcccaggtgccagcttttcccatgaggaagctgtcagtgcttcctggtcagggaaatcttttgggcgtgatttggtcagtcacagtctgttggggtgaggtggtgcgtggagaggacaggatttggaaccaagggtccctggattagaatccctgctccatacctcactggctgtgtgaccccaggctcgcgaatctgcctctcttgatctgtttcctcatgagtaaagggaaatgactttgtactctggagtgggcctcactcattcatgtgccaggcatcgtgctaggtgctagggcacaccccaaggcgttcgggaagcagaggctgccgtccctggcctggggcctccctgcagtgatgggaatgtagccctggtgcccccacaccctgcccttcaggagccgtggtttccttctgctctctcctgggaggcgcacacccctctgcacccagagccaaggagggcaggcagccctgggaccctcttcaggcaccgcagccagggtctgtgttacccacaggtcctctggatgtcagcatggcagccacaaacctggagaaccagctgcacagcgcacagaagaacctcctgttccttcagcgggagcatgccagcacgctcaaggggctgcactccgagatcaggcggctgcagcagcactgcacagatttaacatatgagctgacagtcaaaagttcggaacagacaggagacgggacttctaaaagcagtgaattaaagaaaagatgtgaagagctggaagcccaactgaaagtgaaagagaacgaaaatgctgagttgttgaaagaactggagcagaaaaacgcgatgatcacagtgctggagaacaccatcaaggagcgagagaagaagtacctggaggagctgaaggccaagagtcacaagctgaccctgctgtctagcgagctggagcagcgggccagcaccatcgcctacctgacctcccagctgcacgccgccaagaagaagctcatgagctccagcgggacctcagatgccagcccgtcagggagccccgtgctggccagctacaagccagcgccccccaaagacaagctacccgaaacgcctcgccgccgcatgaaaaagagcctctcagcccccttgcacccggaatttgaagaggtctacagattcggggcagagagcaggaaactccttttgcgggaaccagtggatgctatgcccgaccccaccccatttctgctggctagggagtccgccgaggtccacctcatcaaagagaggcccctcgtcatcccccccatcgcctccgaccgaagcggcgagcagcacagcccggcccgcgaaaagccgcacaaggcccacgtcggggtggcacatcggatccaccacgccaccccgccgcaggcccagcccgaggtgaagaccctggcggtcgaccaggtgaacggaggcaaggtggtgaggaagcactcagggacggacagaactgtgtgaagcccgccgtgccccaccccgcgctgtccatgcactgtgagcaccactgggaaatctcagccacaccttttctgtttaatcccatgcatgccaaacacttttcacacctaccgacccattctccttctgcttctcttgccctcttcttcacaccaaaatatgatcgtgtccctgccgcagaatatgtatttcctaattgctgtggccaaacgcctgtgtgccgaatcgcttgcttctgatcccgctccgtgtaacctaagtgcgctgcaggcaaagcccaggccacggctgcgtcactactgatgttcacgatgccacacagtcacacacctaattcattctcaagtcggagcaacacataccaaccttgaccttatcctcaagctccagggcagcctggccgagcagcccctgctccctcctggagacccttgtcacctcccgagctcctcctggagacccctgtcacctcctgaccaacctttcccagggcggcaccgatcaccgagcagccgtgcgtgtatctcaaggaactaaataagatgacgctactcctcatagcaccacaacctgaatgtgtgttcatatttttttgttagttttatccaaaatgtttaagatcccaacaaactttattttct

SEQ ID NO: 121271 - DNA, 1790 bp, Homo sapiens
  Payload ID: 3774
  Gene Symbol: CCDC92
  Gene Name: coiled-coil domain containing 92
  Uniprot ID: Q53HC0
  ENST ID: ENST00000545891
  CDS Start-End: 224-1168
ctggggtgggagcgggcgagatgcgccgggcgggcggtgcccactgacctccctcggcggcccggcccgggcagcgcccgagcccaggcagccccgcccgccgcgccccgcccagcccatgggccacgggcccccaccgccgcccgccgggaggaccgagcctaagagggcagccgcctgaaggaacgcgacggcggcgcccgcaggtcctctggatgtcagcatggcagccacaaacctggagaaccagctgcacagcgcacagaagaacctcctgttccttcagcgggagcatgccagcacgctcaaggggctgcactccgagatcaggcggctgcagcagcactgcacagatttaacatatgagctgacagtcaaaagttcggaacagacaggagacgggacttctaaaagcagtgaattaaagaaaagatgtgaagagctggaagcccaactgaaagtgaaagagaacgaaaatgctgagttgttgaaagaactggagcagaaaaacgcgatgatcacagtgctggagaacaccatcaaggagcgagagaagaagtacctggaggagctgaaggccaagagtcacaagctgaccctgctgtctagcgagctggagcagcgggccagcaccatcgcctacctgacctcccagctgcacgccgccaagaagaagctcatgagctccagcgggacctcagatgccagcccgtcagggagccccgtgctggccagctacaagccagcgccccccaaagacaagctacccgaaacgcctcgccgccgcatgaaaaagagcctctcagcccccttgcacccggaatttgaagaggtctacagattcggggcagagagcaggaaactccttttgcgggaaccagtggatgctatgcccgaccccaccccatttctgctggctagggagtccgccgaggtccacctcatcaaagagaggcccctcgtcatcccccccatcgcctccgaccgaagcggcgagcagcacagcccggcccgcgaaaagccgcacaaggcccacgtcggggtggcacatcggatccaccacgccaccccgccgcaggcccagcccgaggtgaagaccctggcggtcgaccaggtgaacggaggcaaggtggtgaggaagcactcagggacggacagaactgtgtgaagcccgccgtgccccaccccgcgctgtccatgcactgtgagcaccactgggaaatctcagccacaccttttctgtttaatcccatgcatgccaaacacttttcacacctaccgacccattctccttctgcttctcttgccctcttcttcacaccaaaatatgatcgtgtccctgccgcagaatatgtatttcctaattgctgtggccaaacgcctgtgtgccgaatcgcttgcttctgatcccgctccgtgtaacctaagtgcgctgcaggcaaagcccaggccacggctgcgtcactactgatgttcacgatgccacacagtcacacacctaattcattctcaagtcggagcaacacataccaaccttgaccttatcctcaagctccagggcagcctggccgagcagcccctgctccctcctggagacccttgtcacctcccgagctcctcctggagacccctgtcacctcctgaccaacctttcccagggcggcaccgatcaccgagcagccgtgcgtgtatctcaaggaactaaataagatgacgctactcctcatagcaccacaacctgaatgtgtgttcatatttttttgttagttttatccaaaatgtttaagatc

SEQ ID NO: 121272 - DNA, 559 bp, Homo sapiens
  Payload ID: 3774
  Gene Symbol: CCDC92
  Gene Name: coiled-coil domain containing 92
  ENST ID: ENST00000545037
  CDS Start-End: 524-559
agacacaggcccgccgccgcgccggcgcctagcccgccgggtcagcgcggccaggcctcgccgccggccccgctcccagggtgcaccgcggctagcgctggggtgggagcgggcgagatgcgccgggcgggcggtgcccactgacctccctcggcggcccggcccgggcagcgcccgagcccaggcagccccgcccgccgcgccccgcccagcccatgggccacgggcccccaccgccgcccgccgggaggaccgagcctaagagggcagccgcctgaaggaacgcgacggcggcgcccgcagcacaggaagtttgcggagaggacgcttgaactgaataatccacgctggagctctcagatcactagatggaaagtcagaggtcaaacacccttacatggacgtgctgaagccatcaaaaaacaaaacagaaaaaaacctctaggaaatgatctaggaaaatgtatttttcagtgctgtacaagcgtcttgaattactctggtagcttttccagaaagacccatgacttcaccacatttctcgagttacgatgaaggt

SEQ ID NO: 121273 - DNA, 860 bp, Homo sapiens
  Payload ID: 3774
  Gene Symbol: CCDC92
  Gene Name: coiled-coil domain containing 92
  ENST ID: ENST00000539551
  CDS Start-End: 572-860
gtgggatcgcagggcgagggatccgcattgcaggtgcaccaggagcgccccggggcctagcccggctttgtctgggatgctgtggggaggaggccgtctgaatccacatcgcctttttaaatgcttgttaccacccggggaaccttagagaccctccctgacaagttgtatcgcctcccgtcctggtagcctttccgtaagtacactaccttgccagccccttcctgaagctttgatgcggctttagtttactctgagtaacgatttgcctgtgattcgtgaaacggagcagaatgcacaaacgcagcagagctccaggcttggctactgggctgccgtctgctacggcgacacaggaagtttgcggagaggacgcttgaactgaataatccacgctggagctctcagatcactagatggaaagtcagaggtcaaacacccttacatggacgtgctgaagccatcaaaaaacaaaacagaaaaaaacctctaggaaatgatctaggaaaatgtatttttcagtgctgtacaagcgtcttgaattactctggtagcttttccagaaagacccatgacttcaccacatttctcgagttacgatgaaggtcctctggatgtcagcatggcagccacaaacctggagaaccagctgcacagcgcacagaagaacctcctgttccttcagcgggagcatgccagcacgctcaaggggctgcactccgagatcaggcggctgcagcagcactgcacagatttaacatatgagctgacagtcaaaagttcggaacagacaggagacgggacttctaaaagcagtgaattaaagaaaagatgtgaagagctggaagcccaactgaaag

SEQ ID NO: 121274 - DNA, 1584 bp, Homo sapiens
  Payload ID: 3774
  Gene Symbol: CCDC92
  Gene Name: coiled-coil domain containing 92
  Uniprot ID: Q53HC0
  ENST ID: ENST00000614047
  CDS Start-End: 18-962
gtcctctggatgtcagcatggcagccacaaacctggagaaccagctgcacagcgcacagaagaacctcctgttccttcagcgggagcatgccagcacgctcaaggggctgcactccgagatcaggcggctgcagcagcactgcacagatttaacatatgagctgacagtcaaaagttcggaacagacaggagacgggacttctaaaagcagtgaattaaagaaaagatgtgaagagctggaagcccaactgaaagtgaaagagaacgaaaatgctgagttgttgaaagaactggagcagaaaaacgcgatgatcacagtgctggagaacaccatcaaggagcgagagaagaagtacctggaggagctgaaggccaagagtcacaagctgaccctgctgtctagcgagctggagcagcgggccagcaccatcgcctacctgacctcccagctgcacgccgccaagaagaagctcatgagctccagcgggacctcagatgccagcccgtcagggagccccgtgctggccagctacaagccagcgccccccaaagacaagctacccgaaacgcctcgccgccgcatgaaaaagagcctctcagcccccttgcacccggaatttgaagaggtctacagattcggggcagagagcaggaaactccttttgcgggaaccagtggatgctatgcccgaccccaccccatttctgctggctagggagtccgccgaggtccacctcatcaaagagaggcccctcgtcatcccccccatcgcctccgaccgaagcggcgagcagcacagcccggcccgcgaaaagccgcacaaggcccacgtcggggtggcacatcggatccaccacgccaccccgccgcaggcccagcccgaggtgaagaccctggcggtcgaccaggtgaacggaggcaaggtggtgaggaagcactcagggacggacagaactgtgtgaagcccgccgtgccccaccccgcgctgtccatgcactgtgagcaccactgggaaatctcagccacaccttttctgtttaatcccatgcatgccaaacacttttcacacctaccgacccattctccttctgcttctcttgccctcttcttcacaccaaaatatgatcgtgtccctgccgcagaatatgtatttcctaattgctgtggccaaacgcctgtgtgccgaatcgcttgcttctgatcccgctccgtgtaacctaagtgcgctgcaggcaaagcccaggccacggctgcgtcactactgatgttcacgatgccacacagtcacacacctaattcattctcaagtcggagcaacacataccaaccttgaccttatcctcaagctccagggcagcctggccgagcagcccctgctccctcctggagacccttgtcacctcccgagctcctcctggagacccctgtcacctcctgaccaacctttcccagggcggcaccgatcaccgagcagccgtgcgtgtatctcaaggaactaaataagatgacgctactcctcatagcaccacaacctgaatgtgtgttcatatttttttgttagttttatccaaaatgtttaagatc

SEQ ID NO: 121275 - DNA, 348 bp, Homo sapiens
  Payload ID: 3774
  Gene Symbol: CCDC92
  Gene Name: coiled-coil domain containing 92
  ENST ID: ENST00000633868
  CDS Start-End: 60-348
tatttttcagtgctgtacaagcgtcttgaattactctggtagcttttccagaaagacccatgacttcaccacatttctcgagttacgatgaaggtcctctggatgtcagcatggcagccacaaacctggagaaccagctgcacagcgcacagaagaacctcctgttccttcagcgggagcatgccagcacgctcaaggggctgcactccgagatcaggcggctgcagcagcactgcacagatttaacatatgagctgacagtcaaaagttcggaacagacaggagacgggacttctaaaagcagtgaattaaagaaaagatgtgaagagctggaagcccaactgaaag

SEQ ID NO: 121276 - DNA, 4064 bp, Homo sapiens
  Payload ID: 3774
  Gene Symbol: CCDC92
  Gene Name: coiled-coil domain containing 92
  Uniprot ID: Q53HC0
  ENST ID: ENST00000631749
  CDS Start-End: 2479-3423
tgtgcagctggggacagtgcttgtgaggggtaggacactaggcctagggcagctctcctgtcatccaagacccactaaattctggatcacatttaaatggttctttctctttgacagcaagccactaacatatgggctctgcttcttccatcagccaacagaatcctggatttgagtctgtcctttgaaagcatctctgctagagttcccacttccaaacccctttcagctcttcgggattcagcctccaggtgaggtgctggaattgatgccagagtgaacgactccggattgctgagtggaaggaaaacgtaggcaccgctactgacagctctcaggcgctcctgggattttccttcctttgacgctgaggctgttccgctttcaagcgttctgctttgtgagggaagggcaaggtcagaaggtgctcaccctttccacagcaagcacgcggcacacgtgtgccacacgctgaacctgccttggttgtagctggctcctttgttaaggtcagcgccccccaagaccacgtgctgtgcagacagtgttgggatctcgggaactgtggggttccacttagaaactagtgtctggcccagcagcctacacaggagagtttgcggttacagcacagagacggtttcggggacagaaacatcctttctcactcctgccggaatgctgctcacggctccactgaggaaagccctgcttgatggaaactcaactctgccatcatctgcagcccagtgcgacggcagtcaaaggccagggagagctatgctttgttttatagaaacatgcctagaaatggtcgccttaagttatttaacccactccctattgtcgggttttgagtttgtttctagtcttttccaactgcaaactgcactgtagtgaccattctcacagctacctcttttcacacaaaagtaataatttccctttggtagatttctaaaaataaattgctagttcagagagatgaccaattccaaggcttctgatcagctctgcccaatcactgcccgtggtgaggtgccccccgagactgtacttgccgtgtcctggggccactgccctctcctgccagtttttgtccccaactgaaagggcctcttgtttctctttttcttggtcctttttaggatgtatcattgttcattccccttcgtgagctccgtcgtgttttatttccttctctgcgttctcaggttgccctcggagtggagtctgtggctttccaccggagcagcgcccaggaagtgttttcgtgtgatgaaagtgtatgtctgaagttcgttatgaactcgtcctagctccagagctagtgtgcatgcatgtcactggtcgtacagataattgatgagcaattggtgtcgtctgaagcagtgacagcctgggtgtgtcagtgtctccaaaacggttccactgtggcatcctacaaatgggctgcgtcctgggagccattgagaagttgtacctcctttacggagggttctctggaatagcaaattagggaaaatgcattctgaggttctgtatttacaataataatttataagcaaataactcacatttcatcctcagtatttttcagtgctgtacaagcgtcttgaattactctggtagcttttccagaaagacccatgacttcaccacatttctcgagttacgatgaaggtagagtctggggccctgagtgagcatcagatgctggaagctggggctgggaggggccaagcattggggacagactccagacacctgcaccaccccctggccccatgagatacgttctcagaccttcccaagaaggatctgtggctcctctcagtgctgtgaagtgcagggggcttccctctggaattcagcccatctctccctcctactttggctggctccagatgccatttagaggaaatgtttggcccatttcccaggtgccagcttttcccatgaggaagctgtcagtgcttcctggtcagggaaatcttttgggcgtgatttggtcagtcacagtctgttggggtgaggtggtgcgtggagaggacaggatttggaaccaagggtccctggattagaatccctgctccatacctcactggctgtgtgaccccaggctcgcgaatctgcctctcttgatctgtttcctcatgagtaaagggaaatgactttgtactctggagtgggcctcactcattcatgtgccaggcatcgtgctaggtgctagggcacaccccaaggcgttcgggaagcagaggctgccgtccctggcctggggcctccctgcagtgatgggaatgtagccctggtgcccccacaccctgcccttcaggagccgtggtttccttctgctctctcctgggaggcgcacacccctctgcacccagagccaaggagggcaggcagccctgggaccctcttcaggcaccgcagccagggtctgtgttacccacaggtcctctggatgtcagcatggcagccacaaacctggagaaccagctgcacagcgcacagaagaacctcctgttccttcagcgggagcatgccagcacgctcaaggggctgcactccgagatcaggcggctgcagcagcactgcacagatttaacatatgagctgacagtcaaaagttcggaacagacaggagacgggacttctaaaagcagtgaattaaagaaaagatgtgaagagctggaagcccaactgaaagtgaaagagaacgaaaatgctgagttgttgaaagaactggagcagaaaaacgcgatgatcacagtgctggagaacaccatcaaggagcgagagaagaagtacctggaggagctgaaggccaagagtcacaagctgaccctgctgtctagcgagctggagcagcgggccagcaccatcgcctacctgacctcccagctgcacgccgccaagaagaagctcatgagctccagcgggacctcagatgccagcccgtcagggagccccgtgctggccagctacaagccagcgccccccaaagacaagctacccgaaacgcctcgccgccgcatgaaaaagagcctctcagcccccttgcacccggaatttgaagaggtctacagattcggggcagagagcaggaaactccttttgcgggaaccagtggatgctatgcccgaccccaccccatttctgctggctagggagtccgccgaggtccacctcatcaaagagaggcccctcgtcatcccccccatcgcctccgaccgaagcggcgagcagcacagcccggcccgcgaaaagccgcacaaggcccacgtcggggtggcacatcggatccaccacgccaccccgccgcaggcccagcccgaggtgaagaccctggcggtcgaccaggtgaacggaggcaaggtggtgaggaagcactcagggacggacagaactgtgtgaagcccgccgtgccccaccccgcgctgtccatgcactgtgagcaccactgggaaatctcagccacaccttttctgtttaatcccatgcatgccaaacacttttcacacctaccgacccattctccttctgcttctcttgccctcttcttcacaccaaaatatgatcgtgtccctgccgcagaatatgtatttcctaattgctgtggccaaacgcctgtgtgccgaatcgcttgcttctgatcccgctccgtgtaacctaagtgcgctgcaggcaaagcccaggccacggctgcgtcactactgatgttcacgatgccacacagtcacacacctaattcattctcaagtcggagcaacacataccaaccttgaccttatcctcaagctccagggcagcctggccgagcagcccctgctccctcctggagacccttgtcacctcccgagctcctcctggagacccctgtcacctcctgaccaacctttcccagggcggcaccgatcaccgagcagccgtgcgtgtatctcaaggaactaaataagatgacgctactcctcatagcaccacaacctgaatgtgtgttcatatttttttgttagttttatccaaaatgtttaagatcccaacaaactttattttct

SEQ ID NO: 121277 - DNA, 111 bp, Homo sapiens
  Payload ID: 3774
  Gene Symbol: CCDC92
  Gene Name: coiled-coil domain containing 92
  ENST ID: ENST00000631954
  CDS Start-End: 60-111
tatttttcagtgctgtacaagcgtcttgaattactctggtagcttttccagaaagacccatgacttcaccacatttctcgagttacgatgaaggtcctctggatgtcagca

SEQ ID NO: 121278 - DNA, 594 bp, Homo sapiens
  Payload ID: 3774
  Gene Symbol: CCDC92
  Gene Name: coiled-coil domain containing 92
  ENST ID: ENST00000633908
  CDS Start-End: 229-594
ccaacagaatcctggatttgagtctgtcctttgaaagcatctctgctagagttcccacttccaaacccctttcagctcttcgggattcagcctccaggttgccctcggagtggagtctgtggctttccaccggagcagcgcccaggaagtgttttcgtgtgatgaaagttatttttcagtgctgtacaagcgtcttgaattactctggtagcttttccagaaagacccatgacttcaccacatttctcgagttacgatgaaggtcctctggatgtcagcatggcagccacaaacctggagaaccagctgcacagcgcacagaagaacctcctgttccttcagcgggagcatgccagcacgctcaaggggctgcactccgagatcaggcggctgcagcagcactgcacagatttaacatatgagctgacagtcaaaagttcggaacagacaggagacgggacttctaaaagcagtgaattaaagaaaagatgtgaagagctggaagcccaactgaaagtgaaagagaacgaaaatgctgagttgttgaaagaactggagcagaaaaacgcgatgatcacagtgctggagaacacc

SEQ ID NO: 121279 - DNA, 306 bp, Homo sapiens
  Payload ID: 3774
  Gene Symbol: CCDC92
  Gene Name: coiled-coil domain containing 92
  ENST ID: ENST00000633097
  CDS Start-End: 18-306
gtcctctggatgtcagcatggcagccacaaacctggagaaccagctgcacagcgcacagaagaacctcctgttccttcagcgggagcatgccagcacgctcaaggggctgcactccgagatcaggcggctgcagcagcactgcacagatttaacatatgagctgacagtcaaaagttcggaacagacaggagacgggacttctaaaagcagtgaattaaagaaaagatgtgaagagctggaagcccaactgaaagtgaaagagaacgaaaatgctgagttgttgaaagaactggagcagaaaaacg

SEQ ID NO: 121280 - DNA, 2491 bp, Homo sapiens
  Payload ID: 3774
  Gene Symbol: CCDC92
  Gene Name: coiled-coil domain containing 92
  Uniprot ID: Q53HC0
  ENST ID: ENST00000632401
  CDS Start-End: 60-1055
tatttttcagtgctgtacaagcgtcttgaattactctggtagcttttccagaaagacccatgacttcaccacatttctcgagttacgatgaaggtcctctggatgtcagcatggcagccacaaacctggagaaccagctgcacagcgcacagaagaacctcctgttccttcagcgggagcatgccagcacgctcaaggggctgcactccgagatcaggcggctgcagcagcactgcacagatttaacatatgagctgacagtcaaaagttcggaacagacaggagacgggacttctaaaagcagtgaattaaagaaaagatgtgaagagctggaagcccaactgaaagtgaaagagaacgaaaatgctgagttgttgaaagaactggagcagaaaaacgcgatgatcacagtgctggagaacaccatcaaggagcgagagaagaagtacctggaggagctgaaggccaagagtcacaagctgaccctgctgtctagcgagctggagcagcgggccagcaccatcgcctacctgacctcccagctgcacgccgccaagaagaagctcatgagctccagcgggacctcagatgccagcccgtcagggagccccgtgctggccagctacaagccagcgccccccaaagacaagctacccgaaacgcctcgccgccgcatgaaaaagagcctctcagcccccttgcacccggaatttgaagaggtctacagattcggggcagagagcaggaaactccttttgcgggaaccagtggatgctatgcccgaccccaccccatttctgctggctagggagtccgccgaggtccacctcatcaaagagaggcccctcgtcatcccccccatcgcctccgaccgaagcggcgagcagcacagcccggcccgcgaaaagccgcacaaggcccacgtcggggtggcacatcggatccaccacgccaccccgccgcaggcccagcccgaggtgaagaccctggcggtcgaccaggtgaacggaggcaaggtggtgaggaagcactcagggacggacagaactgtgtgaagcccgccgtgccccaccccgcgctgtccatgcactgtgagcaccactgggaaatctcagccacaccttttctgtttaatcccatgcatgccaaacacttttcacacctaccgacccattctccttctgcttctcttgccctcttcttcacaccaaaatatgatcgtgtccctgccgcagaatatgtatttcctaattgctgtggccaaacgcctgtgtgccgaatcgcttgcttctgatcccgctccgtgtaacctaagtgcgctgcaggcaaagcccaggccacggctgcgtcactactgatgttcacgatgccacacagtcacacacctaattcattctcaagtcggagcaacacataccaaccttgaccttatcctcaagctccagggcagcctggccgagcagcccctgctccctcctggagacccttgtcacctcccgagctcctcctggagacccctgtcacctcctgaccaacctttcccagggcggcaccgatcaccgagcagccgtgcgtgtatctcaaggaactaaataagatgacgctactcctcatagcaccacaacctgaatgtgtgttcatatttttttgttagttttatccaaaatgtttaagatcccaacaaactttattttctaaacctgccttccttctgttttgtgtcttttattaaacaaacacctgaaggagggctaggagactgcaggagggagagcaatcacaggtcccagaagcgactccggcctcctcccggcccagagctagtccttagaatgtgctgcgctcctgagcttctgtgggaagctgcttttgcctctgatggcccctgcccactgtgctgcccgtgctagcccctctcctccctcatggagtgaagccacccctcacctccaggtggccagccagggctccaggccagcctcatggtgcacagagggaaggggtgcccagtgaccactggtcctggaggttctgtgtccttacctgaccccacacagacccaggcaggctgggggtagaagctcatgcaggaactaaacactaagctcaacaacttcacagtcgccgtagcaggtcagagccaaagaagctagggccagagagttctggaagggggagaagtggctccaggtgactggtcacttctgctctgtgcccgacatcatcagcccttcttgccaaaaaggagcatctgctgaaacagacctggatcatcgaaaacacacctttggaaattacattaggattctcacttgtgccaatgctatgtatgccaggcacttttgcctaatcaagtgttttctctgagaaggaaaagaaaactccacacatcttaaaatactctccaatatttactttttgattatataaattccttttaaaaagtagtattaaaaacaaaaccattcaggttaatttgtatggaaagaga

SEQ ID NO: 121281 - DNA, 6896 bp, Homo sapiens
  Payload ID: 3775
  Gene Symbol: CCDC93
  Gene Name: coiled-coil domain containing 93
  ENST ID: ENST00000319432
  CDS Start-End: 139-2031
ggcggcggcggcggcggcggcggcggcagagggagtttccgctttgtactccaccccggtagcagctccgcggcagggacagcttcctccggacgcttggcgggcttcgctctcgccttacgacagcccggtcggatcatggggttgcccagggggccggagggccagggtctcccggaggtggaaacaagagaagatgaagaacaaaatgtcaagttgactgaaattctggagctcttggttgcagctgggtatttcagggcaagaattaaaggcttatcaccctttgacaaggtagtaggaggaatgacttggtgtatcaccacttgcaactttgatgtagatgttgatttgctctttcaagaaaactctacgataggtcaaaaaatagctctgtcagaaaaaattgtctcggtcctgccaaggatgaaatgcccacaccagctggagccccaccagatccaggggatggattttattcacatatttcctgttgttcagtggctggtgaaacgagctatagaaacaaaagaagagatgggtgactatatccgctcctactctgtatcccagttccagaagacttacagtctccctgaggatgatgacttcataaagagaaaagaaaaggccatcaagacagttgtggacctctcagaagtgtacaagccccgtcggaaatacaaacgccaccagggagcagaggagctacttgatgaagaatctcgaatccatgctacacttttggaatatggcagatatggatttagccgccagagcaaaatggagaaggctgaggacaagaaaacggcacttccagcagggctgtcagctacagaaaaagctgatgcccacgaggaagatgagcttcgagcagctgaagagcagcgtattcagtcgctgatgaccaagatgaccgctatggcaaatgaggagagccgtctcaccgcaagctccgtgggccagattgtgggactctgctctgctgagatcaagcagattgtgtccgagtatgcagagaagcagtctgagctatcagctgaagaaagtccagaaaaattaggaacctcccagctacatcgccggaaagtcatttccttgaacaaacagattgcgcaaaagaccaaacatcttgaagagctgcgagcaagtcacaccagcctacaagccagatataatgaagccaagaaaacgctgacagagctgaagacttacagtgagaaactggacaaagagcaagcagccctcgagaagatagaatccaaagctgatccaagtatcctacagaacctgagagcacttgtagccatgaatgaaaatctgaaaagtcaagaacaggaatttaaagcacattgtcgagaggagatgacacgactacagcaagaaattgaaaacctgaaagctgagagagcaccacgtggagatgaaaagaccctctccagtggagagccgcctggtaccttgacctctgcaatgactcatgacgaagacctagacagacggtataatatggagaaagagaaactttacaagatacgtttactacaggctcgaagaaatcgagaaatagcaattttgcaccgcaagattgatgaagtccctagccgtgccgagctaatacagtatcagaagagatttattgaactctaccgccagatttcagcagtgcacaaagaaaccaagcagttcttcactttatataataccctggatgataaaaaggtttatttggaaaaagagattagtctgctgaactcaattcatgagaacttctcacaggccatggcctcccctgctgcccgggaccagtttttacgtcagatggaacagattgtggaaggaattaagcaaagtagaatgaagatggaaaagaaaaagcaagagaacaaaatgagaagagaccagttgaacgaccagtacttggagctgttagaaaagcagaggctatactttaagactgtgaaagagttcaaggaggagggccgcaagaacgagatgctgctgtccaaggtgaaagcgaaggcctcctgaacatccccagccgtggctgtatgtcattgattttacttttaagcaccgtatatcacctacaagatcatgaaatggttctgaaagcgacagtagagagatgcagttgtgatgatttcaacaacctggatgttttctttctcctctttgcttccattcatctctgttggctgctgttgatggagtcagacagtaaacacgtggcttggataacacccatcatcctatgaagaatatagggagtacttgttctctgttgattcaacttttatgtctccagtaacattgcgcttatgaaggtacctgtatttgtatggactctgaataaagaagaattcatttgtttagcaagtattagttcagcaaccactgagaaataagcactgaggaagattcagagacgtgtaaaacacagttcctactgcacaagtacccagcaggtggcccagggaggcagatacagcacacttgaccgcagaactgggctatccaagatgtttttcagtaaacagaaggcatttagctgaaatgatcagcccatgtagtgttggtcacttgggcctttcacctgccatggtaccttttgttcccagctcctccaggtgccagccagcaggcttggtggtgacagcaactggaacgaaagttcagtgttgttttaatttttatacgttactcaagttgatttctcagaaaattgaaaacagaccttgtgctgaggacacgtcaataaaaattataccttcccctgccccaatgttcatgtgagtcacagcatgcagaggggctgtgcatccccctcattgaaggcacatttgatgaggctacgctgcagatgggtcatggtctgagccaggagagagatagacactgttccctgcactcaaggcaagtagggtgtcaggaggaagagcagtagggtttgcagagatccagggaaacttcctggaggaggcagcatttgagccctatctaaagggagaatcggatgttgataggaagactgttttaaatgaaaatacactatgattaaaaacccaagagagtgcagaggagtacaaggcatgcatgttgggaaaggagggaataagctagtctctgcaggaggcttcagagacccgtctgggaagtagggctgagactaggctttggagggccttgaagggcagctgagggttgattttaatccttggaaatgaccagtgcagatcaaacatggagctcctgctgccctggtcctcaggagtctggtaactcagtcatgttctgtaggtttgtgctccattttgcataaatcttgcaaacataccaggtggcaggtttgcacagtaacacaaaagcttaaacatgtcaagcaagtggggcattcagcagccacagaaatgtgttcatttttagtccctaatggatgtgattaagcagggctgatgtgtacagatttaaaaacacacacacgtgctggattaaaaacagccactggtttcagtgccagggccagcaaggcctacctgagccaggcggaagcagcagcttgcaaatagaaactgccacctgcgagcgcttcttgggtcatgtgcagctccacctcagctggtccctgagccgtggtcatgtgggggttttgaagggctaagttgaagcaagtaattgcaaaagaacaggtggcactctgagggcaggggaaggagacagaagtttgactgcgtttgaaattatttcagtcagggaaacatctgcgttgtcttgttaagcagcttgtaggcccacccctggctaactgaactttgtgagcagttggggcagttatttgaatatttgtccaaaggtggtagggaggcagatgacattctggggttactggagtccacctctgtgctgatggggaaagtatggcatgatgaatccaaagcaaccagtaattctttttgaaagtgcaggcatttattttgagctgtatttcataggagtttcatttggtttggttttggtatagagaggtgtccatagatctctattccctttttttttttatcgacaaggcctactacggataaatcagtttttgttgcctgaatacactttgaattagactacagaagccagtttgagctcaaatttcacacttgctgcagacaactctcagtgtggacagtgcctttctgagtaattaggatgttacatgactttttggtgaagccgtatagggtaaggagatgccccaaggcccctgatcatttcagaagccacctggagcaccagaaggggtcatcttcccagggctatggctctgtgtgcttagacagacatagtatggaattgtgctctaagcccacaggcttctccggagttaaaaggaagcaagaacatccttaagttactttttcaaaatatgcgcttcaggaggaaccaggtttccccaggagagagaggctccctgctcaatcagcacagggagttgctagcgggcaggctgcccagtgctgtggaatctccgccagcctctgggttgggggctccctcccacttcttgcttcttatggagtacatgggactgctctgctttaagccgcgatcagagctgttgtgagcaggacaagattgcgtgatcacgaggtgcgtggggagatgctaggacatttgttgatgtctttgacctgtgctccgtctctgttggatgactgggttagctaacaccactagagggaggtacagaatgttaaacagtcgtcagagtcacactgagggttgttttaacagagggcaaattcccagtttgtcaagcatatctctgttagagtccgaagttcatggttttaatggttctagctcgtagcccttaatattttcaggatagctgggtcctgccagtgtccgctgagtccatcagcacaaccagaaggtccagggtccaggcatgggaagcattctctgacaataccgagccctcgggacctcctgaaaccttgagcagaggctggagaagaccttcagacagtccttttactacctcacaaagtgccatgcccgggacctcagacctcagggttgtgacgttgttgatgttgtcaggccccagtacgtctctagtgaccgaagcagacctgcctgaaagggcactccggacagtgagccctggctctaacctgtgccctcatatttctgctgcctcatatggtcttgtttgcccactctgtaggtgactgatcaccctaaaagggaggtaggtatctagcagtagcacagttactttgagcctgaccacttgttctgaagtgcagatgttgaaacatgcattgaggaagaacactttaaggaagcactttatgatttactcatggctggtgttggcctcaaagtaaaagaacatcttaatgcagaacagtacaataaagagccccataggatggatgccatcatctgtccccatggttgggattgccaaggaaagtgccttgttctgtgcatcttcagaatcccccaggccctctcttgatccttttcatgaagtccagagcattccttctattacaggctgaagatgcattgtaaaaggtaatgctataatagtattccctcttctcaataaatgtgcaaaactggagaatctggtgctgatctgcagcatacttgacaacacagggaataccgtggatgttccacgccagccttacatccgtccccattgcctgcccatgtccagtggccctgcgcaacaaaagtaagggcttgtcttaccacactctccccagcatctagctcaaggtagatgactgactgggaaattccggttggataaaatggcttttccacattgcaactttgcatctctattaggaaaatttagattgaacctttcctctacttgatgcttagtttgagaacagttttcacaactttagagggtctctctcagagtatgttatactgtaaccttgaagtttgagatgaaacaaggtgtcagaggttttgaatctttcaaaggaattgccttttacagatttttttttttattccctaagaagggaaaaagagagggaagaactacactaatgttagagataaggtatgttttggctcaaaatgtgtcatgaacctaaaggtaacttgatgggcagaaatgtctcagccatgtgaaccaagaagtgggaccacagtgcaaggctgtgggtggcagcactagatacggtggtggcaggagtgtgacatgtaggcactccatgggggacagctggacggtgtctatcaaaagtgcaaatgcataagctctttgaactagcaatgctactcctaagaattgtacctgtgtacaaggtacttgtgtacaagagtttttgttgaaacattgtaatagcaaaaagttggagagtgccaccaatacaggggaatggttaaatacattatggccagcttaaacaatggaatagtttgtagaaatttaaaacaatggatcctgtgtgtgtgtactaccatagaatgggccccaagatgcatgattaagtgaggaaaaaagcccatggtatcctaatgtttggaatggagaaagtgtgtagatgtatgtgtgtgcatatgttttcacacagacgtatacacgtgtatatcatatgtccacctgcatatgcctaggatgtctctgggaggatatctagcagcccggcagcctgaattgcctctgggaagaggggtgggaatgacttttcaatgtacaccttttgtaccttttgaattttgtaccatgtacatgtattatctattaaaaaatagttcttaatttttaatttggtatacttttcttaatagaaccaaaatggaagaaaattctgattctctaaatctgctttcttaaagataaagcctttgattcaaaagta

SEQ ID NO: 121282 - DNA, 6899 bp, Homo sapiens
  Payload ID: 3775
  Gene Symbol: CCDC93
  Gene Name: coiled-coil domain containing 93
  Uniprot ID: Q567U6
  ENST ID: ENST00000376300
  CDS Start-End: 139-2034
ggcggcggcggcggcggcggcggcggcagagggagtttccgctttgtactccaccccggtagcagctccgcggcagggacagcttcctccggacgcttggcgggcttcgctctcgccttacgacagcccggtcggatcatggggttgcccagggggccggagggccagggtctcccggaggtggaaacaagagaagatgaagaacaaaatgtcaagttgactgaaattctggagctcttggttgcagctgggtatttcagggcaagaattaaaggcttatcaccctttgacaaggtagtaggaggaatgacttggtgtatcaccacttgcaactttgatgtagatgttgatttgctctttcaagaaaactctacgataggtcaaaaaatagctctgtcagaaaaaattgtctcggtcctgccaaggatgaaatgcccacaccagctggagccccaccagatccaggggatggattttattcacatatttcctgttgttcagtggctggtgaaacgagctatagaaacaaaagaagagatgggtgactatatccgctcctactctgtatcccagttccagaagacttacagtctccctgaggatgatgacttcataaagagaaaagaaaaggccatcaagacagttgtggacctctcagaagtgtacaagccccgtcggaaatacaaacgccaccagggagcagaggagctacttgatgaagaatctcgaatccatgctacacttttggaatatggcaggagatatggatttagccgccagagcaaaatggagaaggctgaggacaagaaaacggcacttccagcagggctgtcagctacagaaaaagctgatgcccacgaggaagatgagcttcgagcagctgaagagcagcgtattcagtcgctgatgaccaagatgaccgctatggcaaatgaggagagccgtctcaccgcaagctccgtgggccagattgtgggactctgctctgctgagatcaagcagattgtgtccgagtatgcagagaagcagtctgagctatcagctgaagaaagtccagaaaaattaggaacctcccagctacatcgccggaaagtcatttccttgaacaaacagattgcgcaaaagaccaaacatcttgaagagctgcgagcaagtcacaccagcctacaagccagatataatgaagccaagaaaacgctgacagagctgaagacttacagtgagaaactggacaaagagcaagcagccctcgagaagatagaatccaaagctgatccaagtatcctacagaacctgagagcacttgtagccatgaatgaaaatctgaaaagtcaagaacaggaatttaaagcacattgtcgagaggagatgacacgactacagcaagaaattgaaaacctgaaagctgagagagcaccacgtggagatgaaaagaccctctccagtggagagccgcctggtaccttgacctctgcaatgactcatgacgaagacctagacagacggtataatatggagaaagagaaactttacaagatacgtttactacaggctcgaagaaatcgagaaatagcaattttgcaccgcaagattgatgaagtccctagccgtgccgagctaatacagtatcagaagagatttattgaactctaccgccagatttcagcagtgcacaaagaaaccaagcagttcttcactttatataataccctggatgataaaaaggtttatttggaaaaagagattagtctgctgaactcaattcatgagaacttctcacaggccatggcctcccctgctgcccgggaccagtttttacgtcagatggaacagattgtggaaggaattaagcaaagtagaatgaagatggaaaagaaaaagcaagagaacaaaatgagaagagaccagttgaacgaccagtacttggagctgttagaaaagcagaggctatactttaagactgtgaaagagttcaaggaggagggccgcaagaacgagatgctgctgtccaaggtgaaagcgaaggcctcctgaacatccccagccgtggctgtatgtcattgattttacttttaagcaccgtatatcacctacaagatcatgaaatggttctgaaagcgacagtagagagatgcagttgtgatgatttcaacaacctggatgttttctttctcctctttgcttccattcatctctgttggctgctgttgatggagtcagacagtaaacacgtggcttggataacacccatcatcctatgaagaatatagggagtacttgttctctgttgattcaacttttatgtctccagtaacattgcgcttatgaaggtacctgtatttgtatggactctgaataaagaagaattcatttgtttagcaagtattagttcagcaaccactgagaaataagcactgaggaagattcagagacgtgtaaaacacagttcctactgcacaagtacccagcaggtggcccagggaggcagatacagcacacttgaccgcagaactgggctatccaagatgtttttcagtaaacagaaggcatttagctgaaatgatcagcccatgtagtgttggtcacttgggcctttcacctgccatggtaccttttgttcccagctcctccaggtgccagccagcaggcttggtggtgacagcaactggaacgaaagttcagtgttgttttaatttttatacgttactcaagttgatttctcagaaaattgaaaacagaccttgtgctgaggacacgtcaataaaaattataccttcccctgccccaatgttcatgtgagtcacagcatgcagaggggctgtgcatccccctcattgaaggcacatttgatgaggctacgctgcagatgggtcatggtctgagccaggagagagatagacactgttccctgcactcaaggcaagtagggtgtcaggaggaagagcagtagggtttgcagagatccagggaaacttcctggaggaggcagcatttgagccctatctaaagggagaatcggatgttgataggaagactgttttaaatgaaaatacactatgattaaaaacccaagagagtgcagaggagtacaaggcatgcatgttgggaaaggagggaataagctagtctctgcaggaggcttcagagacccgtctgggaagtagggctgagactaggctttggagggccttgaagggcagctgagggttgattttaatccttggaaatgaccagtgcagatcaaacatggagctcctgctgccctggtcctcaggagtctggtaactcagtcatgttctgtaggtttgtgctccattttgcataaatcttgcaaacataccaggtggcaggtttgcacagtaacacaaaagcttaaacatgtcaagcaagtggggcattcagcagccacagaaatgtgttcatttttagtccctaatggatgtgattaagcagggctgatgtgtacagatttaaaaacacacacacgtgctggattaaaaacagccactggtttcagtgccagggccagcaaggcctacctgagccaggcggaagcagcagcttgcaaatagaaactgccacctgcgagcgcttcttgggtcatgtgcagctccacctcagctggtccctgagccgtggtcatgtgggggttttgaagggctaagttgaagcaagtaattgcaaaagaacaggtggcactctgagggcaggggaaggagacagaagtttgactgcgtttgaaattatttcagtcagggaaacatctgcgttgtcttgttaagcagcttgtaggcccacccctggctaactgaactttgtgagcagttggggcagttatttgaatatttgtccaaaggtggtagggaggcagatgacattctggggttactggagtccacctctgtgctgatggggaaagtatggcatgatgaatccaaagcaaccagtaattctttttgaaagtgcaggcatttattttgagctgtatttcataggagtttcatttggtttggttttggtatagagaggtgtccatagatctctattccctttttttttttatcgacaaggcctactacggataaatcagtttttgttgcctgaatacactttgaattagactacagaagccagtttgagctcaaatttcacacttgctgcagacaactctcagtgtggacagtgcctttctgagtaattaggatgttacatgactttttggtgaagccgtatagggtaaggagatgccccaaggcccctgatcatttcagaagccacctggagcaccagaaggggtcatcttcccagggctatggctctgtgtgcttagacagacatagtatggaattgtgctctaagcccacaggcttctccggagttaaaaggaagcaagaacatccttaagttactttttcaaaatatgcgcttcaggaggaaccaggtttccccaggagagagaggctccctgctcaatcagcacagggagttgctagcgggcaggctgcccagtgctgtggaatctccgccagcctctgggttgggggctccctcccacttcttgcttcttatggagtacatgggactgctctgctttaagccgcgatcagagctgttgtgagcaggacaagattgcgtgatcacgaggtgcgtggggagatgctaggacatttgttgatgtctttgacctgtgctccgtctctgttggatgactgggttagctaacaccactagagggaggtacagaatgttaaacagtcgtcagagtcacactgagggttgttttaacagagggcaaattcccagtttgtcaagcatatctctgttagagtccgaagttcatggttttaatggttctagctcgtagcccttaatattttcaggatagctgggtcctgccagtgtccgctgagtccatcagcacaaccagaaggtccagggtccaggcatgggaagcattctctgacaataccgagccctcgggacctcctgaaaccttgagcagaggctggagaagaccttcagacagtccttttactacctcacaaagtgccatgcccgggacctcagacctcagggttgtgacgttgttgatgttgtcaggccccagtacgtctctagtgaccgaagcagacctgcctgaaagggcactccggacagtgagccctggctctaacctgtgccctcatatttctgctgcctcatatggtcttgtttgcccactctgtaggtgactgatcaccctaaaagggaggtaggtatctagcagtagcacagttactttgagcctgaccacttgttctgaagtgcagatgttgaaacatgcattgaggaagaacactttaaggaagcactttatgatttactcatggctggtgttggcctcaaagtaaaagaacatcttaatgcagaacagtacaataaagagccccataggatggatgccatcatctgtccccatggttgggattgccaaggaaagtgccttgttctgtgcatcttcagaatcccccaggccctctcttgatccttttcatgaagtccagagcattccttctattacaggctgaagatgcattgtaaaaggtaatgctataatagtattccctcttctcaataaatgtgcaaaactggagaatctggtgctgatctgcagcatacttgacaacacagggaataccgtggatgttccacgccagccttacatccgtccccattgcctgcccatgtccagtggccctgcgcaacaaaagtaagggcttgtcttaccacactctccccagcatctagctcaaggtagatgactgactgggaaattccggttggataaaatggcttttccacattgcaactttgcatctctattaggaaaatttagattgaacctttcctctacttgatgcttagtttgagaacagttttcacaactttagagggtctctctcagagtatgttatactgtaaccttgaagtttgagatgaaacaaggtgtcagaggttttgaatctttcaaaggaattgccttttacagatttttttttttattccctaagaagggaaaaagagagggaagaactacactaatgttagagataaggtatgttttggctcaaaatgtgtcatgaacctaaaggtaacttgatgggcagaaatgtctcagccatgtgaaccaagaagtgggaccacagtgcaaggctgtgggtggcagcactagatacggtggtggcaggagtgtgacatgtaggcactccatgggggacagctggacggtgtctatcaaaagtgcaaatgcataagctctttgaactagcaatgctactcctaagaattgtacctgtgtacaaggtacttgtgtacaagagtttttgttgaaacattgtaatagcaaaaagttggagagtgccaccaatacaggggaatggttaaatacattatggccagcttaaacaatggaatagtttgtagaaatttaaaacaatggatcctgtgtgtgtgtactaccatagaatgggccccaagatgcatgattaagtgaggaaaaaagcccatggtatcctaatgtttggaatggagaaagtgtgtagatgtatgtgtgtgcatatgttttcacacagacgtatacacgtgtatatcatatgtccacctgcatatgcctaggatgtctctgggaggatatctagcagcccggcagcctgaattgcctctgggaagaggggtgggaatgacttttcaatgtacaccttttgtaccttttgaattttgtaccatgtacatgtattatctattaaaaaatagttcttaatttttaatttggtatacttttcttaatagaaccaaaatggaagaaaattctgattctctaaatctgctttcttaaagataaagcctttgattcaaaagta

SEQ ID NO: 121283 - DNA, 850 bp, Homo sapiens
  Payload ID: 3775
  Gene Symbol: CCDC93
  Gene Name: coiled-coil domain containing 93
  ENST ID: ENST00000437999
  CDS Start-End: 1-276
cagaacctgagagcacttgtagccatgaatgaaaatctgaaaagtcaagaacaggaatttaaagcacattgtcgagaggagatgacacgactacagcaagaaattgaaaacctgaaagctgagagagcaccacgtggagatgaaaagaccctctccagtggagagccgcctggtaccttgacctctgcaatgactcatgacgagaatgagcttcagcactcttccagtgaagtctgttggattttgcctgcagctgagccccttgggaagacctagacagacggtataatatggagaaagagaaactttacaagatacgtttactacaggctcgaagaaatcgagaaatagcaattttgcaccgcaagattgatgaagtccctagccgtgccgagctaatacagtatcagaagagatttattgaactctaccgccagatttcagcagtgcacaaagaaaccaagcagttcttcactttatataataccctggatgataaaaaggtttatttggaaaaagagattagtctgctgaactcaattcatgagaacttctcacaggccatggcctcccctgctgcccgggaccagtttttacgtcagatggaacagattgtggaaggaattaagcaaagtagaatgaagatggaaaagaaaaagcaagagaacaaaatgagaagagaccagttgaacgaccagtacttggagctgttagaaaagcagaggctatactttaagactgtgaaagagttcaaggaggagggccgcaagaacgagatgctgctgtccaaggtgaaagcgaaggcctcctgaacatccccagccgtggctgtatgtcattgattttactt

SEQ ID NO: 121284 - DNA, 1434 bp, Homo sapiens
  Payload ID: 3776
  Gene Symbol: CCDC94
  Gene Name: coiled-coil domain containing 94
  Uniprot ID: Q9BW85
  ENST ID: ENST00000262962
  CDS Start-End: 69-1040
cggaaaagctcgataattacccagcctaaccatttctcaggtgcttgcgaggtgatcagaaggcaaagatgtcggagcgaaaagtattaaacaaatactacccgccggactttgacccatcaaagatccccaaactcaagctccccaaagaccggcagtacgtggtgcggctgatggcccccttcaacatgaggtgtaagacgtgcggagaatacatctacaaggggaagaaattcaatgctcggaaggagacggtgcagaacgaggtctacctgggcctgcccatcttccgcttttacatcaagtgcacgcgctgcctggcagagatcaccttcaagacagaccctgaaaacacagactacaccatggagcatggagccacgcggaatttccaggctgagaagctcctggaggaggaggagaagagggtgcagaaggagcgggaggacgaggagctgaacaaccccatgaaggtgctggagaaccggaccaaggactccaagctggagatggaggtgctggagaacctccaggagctgaaagacctgaaccagcggcaggcgcacgtggacttcgaggctatgctgaggcagcaccgcctgtcggaggaggagcggcggaggcagcagcaggaggaggacgagcaggagaccgcggccctgttggaggaagccagaaagcgaagactgctggaggactccgactcagaggatgaggctgctccctcgcccctgcagccagcccttcggcccaaccccaccgccatcctggatgaggccccaaagcccaagaggaaggtggaggtctgggagcagagcgttggcagcctgggcagccggcccccgctgtcgaggctggtcgtggtgaagaaggcaaaggccgacccggactgcagcaacgggcagcctcaggcggcccccaccccaggagccccgcagaacaggaaggaggccaaccctacacccctgacgcctggcgcgtcctccctgagccaactgggtgcatacctggacagtgacgacagcaacggcagcaactgagccctcccaggaccccctcacggggtcaaagtcacacgtccagcttcagccacattgaggccagcattgctggtggtcagggcaggaggccttggcgtgactggaggccggacagacaagcgccagcgtgctccaacacatagggccaccaggggcctcagccccaggaggtcccttctctgtgccctcaccagcctctcaacacctcggggacccctgctgctcctgcccccacctgtcactgtgcttagggctgcaacatccctggagcagcttccaacactacttcagggtggcagtgtttggggcactgggcgagcctgccggcctctagatggcctcatctcttccttccacaaactgtctagaaccaataaaaggaaacctgccaacc

SEQ ID NO: 121285 - DNA, 800 bp, Homo sapiens
  Payload ID: 3776
  Gene Symbol: CCDC94
  Gene Name: coiled-coil domain containing 94
  ENST ID: ENST00000596496
  CDS Start-End: 319-800
cgccaccatgcctggttaattttttttgtattttagtagagatgagatttcaccatgttgcccagggtggttttgaactcttgatctcaggcattccacccacctcatactcccaaagtgctggaattacaggcgtgagccaccgcgcccggccccacgcaggtctttctaggagagcagtctcaggcttgctgtaggaactcctgggaaacaggagccctgggatacaaagggagtaaatactacccgccggactttgacccatcaaagatccccaaactcaagctccccaaagaccggcagtacgtggtgcggctgatggcccccttcaacatgaggtgtaagacgtgcggagaatacatctacaaggggaagaaattcaatgctcggaaggagacggtgcagaacgaggtctacctgggcctgcccatcttccgcttttacatcaagtgcacgcgctgcctggcagagatcaccttcaagacagaccctgaaaacacagactacaccatggagcatggagccacgcggaatttccaggctgagaagctcctggaggaggaggagaagagggtgcagaaggagcgggaggacgaggagctgaacaaccccatgaaggtgctggagaaccggaccaaggactccaagctggagatggaggtgctggagaacctccaggagctgaaagacctgaaccagcggcaggcgcacgtggacttcgaggctatgctgaggcagcaccgcctgtcggaggaggagcggcggaggcagcagcaggaggaggacgagcaggagaccgc

SEQ ID NO: 121286 - DNA, 2091 bp, Homo sapiens
  Payload ID: 3777
  Gene Symbol: CCDC96
  Gene Name: coiled-coil domain containing 96
  Uniprot ID: Q2M329
  ENST ID: ENST00000310085
  CDS Start-End: 2-1669
gatggacgtcagctctgagcacactaaggaccccggcggggaaggcggagacggggaaagcctggccgcgcggccgtccaagatcaaggccagctctggccctccgacctctcccgaacccggggagctggagtcggagccggaggaggaggaggaggagcaagcggcttcgcagggaggcaccgccgcggacgagcaggccgaggccccgaaagggctaacggcagccgaggctgcgggcgaggaggggcctggagagccggggaggccggccgagccccagcccgagcccgaagagccggccgaggttggggctgaggagcccgcccagccggagcccggagccgggcccgaggaactagaggcggaggcgggggcggaggaactggagcaggcggcagaggggaaggaagtcaggttccaggcctctctgccgctgaccaggatcgatgaggaagaggctgctgcagccccggaggccgagacagagcgggtggagggggaggaagaggacaaggaggagacgcagagagacggcgcggagagcaaggagagggatggggaaggacgcccggccaaaagccaggaagaggggaagcgcctctatggaagggacgagtttgaggacctcgagtggtccgaggaggtccagaagctgcaggagcagcagctgcgcagcgacctcctggaccagtaccgttccctgctggtggagcggaaccgctcccagcgctacaacctatacctgcagcacaagatcttcgaggcgctgcgcagaaagaagggcctggaggccgctgaggtggctgaccggggcgcagaggccgaggcccccgagaaagagcaagcgtacctgcgccatctgggcatgctggaggagctgaagaagcagcaggcagacgacctgcagtggtaccaccaggagctgggccagttgaagcggcagtgccaggagaagctcaccagggtggagaaggagtggcgacgcttccaggcactcaagaagcaggtggtgatgcaggccatgggcagctgtcggatgaggggcgggcgccaggctgctctgcgagaggtggagcagatccaggcgttggaggataaaaaggagaaggagatgagcgccgtgcggctggagaacattcagctgaagcagagcctggtgcattttgaaaccaggatgaggacccaggaggacctgacccagggtctgcttcttattgactttgaacagctgaagattgagaaccaaaccttcaatgagaaaattgaggaacgaaatgaggaacttttaaaacttcgcagcaaggtgaccaacagtgtgcaagtaataacccacgtgaaggaaaagctgcacttcatggacatggagaacgcgtgcaaaaagacacagctggcagaaatcgaggcccaggccgccctaggaagagacatcctgaccaagacgaagcaagcccgagaggggctgcggacggacaacatcagactgaatcagaagtgcggccttctaggcaaggactcacttcttcgggacttggaagaaaaggtggacaagaccgaactgcttcaccggcgcctggaatccctgaagcgccaccacgctagcctcactttgtcctgcagaggcgtgaggcagaagatcagggaggccaaagcctttctcccttcttgaccagatcgatgagaagagtctgcaaaacacttcatcctcaggacgtgctgtcctgctttattttaccttcgttgctattaaaaaggcctgtgtcatttgggacgggactctattttgtatttatctcaaaacgttttagcttccaaatcagtgctgagcccaaacctgggttaggagttttatctgggattgagcaaaaataggtccagaaaagcaaacaaagggtgatttaatgtaactgacttctcatgaaaaactgtcaaaagtctcaagtctgagcaattctataatttcagtgatgtaatactaaagagtactgttcctctttcatatgtaggagggtttaaaagttcagcgaatgggcaaggtacaaaaaaaccctgtgcattaagctaattattaaattctttggatttattaaa

SEQ ID NO: 121287 - DNA, 3322 bp, Homo sapiens
  Payload ID: 3778
  Gene Symbol: CCDC97
  Gene Name: coiled-coil domain containing 97
  Uniprot ID: Q96F63
  ENST ID: ENST00000269967
  CDS Start-End: 123-1154
gcctgggcgcagcggtgcacccggacccggaacattctcaggcgaaagtgtctcttgcgtgcgtgggccggaggttagtgtgcggggcccgccgggcggttgaaaagtccgagagaatcaggatggaggccgtggcgacggcgacggcggcgaaggaacccgataagggctgcatagagcctggacctgggcactggggtgagctgagccggacaccagtcccatctaaaccccaggacaaagtggaagcagctgaggcaacaccagtggccctggacagtgacacctccggggctgaaaatgcagcagtgagtgctatgctgcacgctgtagccgccagccgcctgcctgtttgcagccagcagcagggtgaacccgacttgacagagcatgagaaagtggccatcctggcccagctgtaccacgagaagccactggtgttcctggagcgcttccgcacaggcctccgtgaggagcatctggcctgctttggccacgtgcgtggcgaccaccgtgcagacttctactgtgctgaggtggcccggcagggcactgcccggccccgcaccctgcgtacccgcctgcgtaaccggcgctatgctgccctgcgagagctgatccaagggggcgagtacttcagtgatgagcagatgcggttccgggcccccctgctatatgagcagtacatcgggcagtatctcacccaggaggagctcagtgcccgcaccccaacccaccagccccccaagcccgggtcccccgggagacctgcttgcccgctctccaacttgctgctccagtcctacgaggagcgggagctacagcagcgtctgctccaacagcaggaggaggaggaggcctgcttggaggaagaggaagaggaggaggacagtgacgaggaagaccagaggtcaggcaaggactcggaggcctgggttcccgactcggaggagaggctgatcctgcgagaggagttcaccagccgcatgcaccagcgcttcctagatggcaaggacggggactttgactacagcacagtagacgacaaccccgacttcgacaacctcgacatcgtggcacgggatgaggaggagaggtactttgatgaggaagaacctgaggatgcgcccagcccagagctggatggggactgatggccgccacccttcccaccgcctgccccatccccatccccaacaaggcagctgattccaggcctgctcagtgaccctttctctagggggacatcagggcagtgccccacaacccacacacaccaccatctcactgggtctagtctcatctcagacaacccccacccccactgtttctggggttccctttctcatctctcccaccctgtctcctgcctctgtctttcttggtgtctgtctgggcttctttctgtctctttctgtctttctgtctctctccctacccccgctccctctttccagtgctctggctggctgtctctccctttctccccctctctctctgccttaggctctgtctccaccgcagggcccaaggtgaaagtcctccccttgccggaggccagctggcagggcctttcgtggctggaagtggccagtttggttccggtgctgacccctaggccccagcgcagctgcctcccgtgctgtctgtctccccctctctgtttatgtctgcgctgtgtctcacactcagagcctccttgcttctgttaggttcccatctctccttctgcctcactctgggcctcttctttctacttgtacatttccacctctctaggcctctgctctcactgtccctctctgtctgtctctcagcctttatctctgggttttgatcccccactccaggctctgggccccttcttcccccttccctcaaacctggctgctataggcagcagaaccctgaccactgagtaatacagccccaggggagggaggagaccccaggcagggaggatgggggcagctctcttctctccccaggacccaggctgtggatcacggggcctgccagcttgagtgtagagggaggggggactctacccttctcagccccaccagcccccctctgcccaaccacaattttcccttcctccgccttcctctccctctcctgtttacactccccaaatgcgcacaggctgttatcatgggtcctgagtcatcccacacacagcctgccccagcgtccctgcccccagctggccgcagggcccgccccatggagccccctgccgccctgggctaatgggagccagatggccgcctggtgactcagccaccgggcctgtgggaacccaggcgtcccgccttcccatgcccccacacccggctcctgctcccccagcagacacacacaggagggcctggccactgttgagggggcacacagggcaagggtcaccaagtcggggcctagggactcctcatgcctctgagatggaatggtggtatcctgccgtggccaagcctgaaggaccctcaaaactgcctcctggagtccacggttcctgacctccgagcctcagctatgccctctgggtcaaccagaattagagccagacagggaaagtgagagctggatggaggcagacaagatgctcagagcgactattaaagaacgaaagcctctgctacggagcgcttctgtcctctgtcaggcccgagcgaagtgcctgacaccgggttggatcctcagatggccccatgaactagtgaagtgggtcaaaggaggcctggaaagatgttgcttcctcaaggccactcggccatcagaggcagaaatgaaacaggaacccaggcctagaatcacaaaggtcctagaaaccacttggctgtctggcctctcaggtgtcagggccatccagagtgagacagcattggagggacaagtgtgcatgcagatgtcctcagacgggaaggtttgagaagggtcagatggtaggcgggcctaacaagggctccgtgctagccactgtcccgcacacagacaggatcaggtcatcttgatatggagatcagtccccaaatcactgaattgtcccagcagtgctatgccctaggtactaccaatatcactcctctatttcccagaggaggaagcagcagctagactccaggaccttggggtcatatctctcagaaagccaagagtgcaggatgagagctgtctgtctcttacctgcctgtatttgtgccccatttttaaagagcagagggcctgggccacaggaaaggtatcagcccttggtgataggcacattttttaccagtctatcatttggtcattaaatttgtttacaatatactttgctata

SEQ ID NO: 121288 - DNA, 534 bp, Homo sapiens
  Payload ID: 3778
  Gene Symbol: CCDC97
  Gene Name: coiled-coil domain containing 97
  ENST ID: ENST00000600918
  CDS Start-End: 1-464
ccaacttgctgctccagtcctacgaggagcgggagctacagcagcgtctgctccaacagcaggaggaggaggaggcctgcttggaggaagaggaagaggaggaggacagtgacgaggaagaccagaggtcaggcaaggactcggaggcctgggttcccgactcggaggagaggctgatcctgcgagaggagttcaccagccgcatgcaccagcgcttcctagatggcaaggacggggactttgactacaggtgctcctgtgcctccacctccccatcccccagcccagcatcccacggcctttggtcacatgcagagcccttaacaagctgtgggggtctccctttgtggagctacaaggccccaaaacagttccaggatgtggggttgaacagccaaaggaagaggctgggtgacctcggactagccttgtccatctcagaccctcagtctcctcacctctaaggcaggggatggacagggatgacatatagctcagtatcaatgaaaccctgaaacacttccctcctggcaa

SEQ ID NO: 121289 - DNA, 413 bp, Homo sapiens
  Payload ID: 3778
  Gene Symbol: CCDC97
  Gene Name: coiled-coil domain containing 97
  ENST ID: ENST00000596882
  CDS Start-End: 365-413
tctaacgattccttcatttcattgtaactcccgtttcccccaaagtccgaaatccagccaggctcctttcaaagtccttactcaatttctgtgctttcccacaaccttcaaagtaatccgacgtcgggtgaggtgtgattggaagcgtggctccaacaccactggccaagaattggtaattgtggaagccagatggagatgattggtatatggaggctgcatagagcctggacctgggcactggggtgagctgagccggacaccagtcccatctaaaccccaggacaaagtggaagcagctgaggcaacaccagtggccctggacagtgacacctccggggctgaaaatgcagcagtgagtgctatgctgcacgctgtagccgccagccgcctgcctgtttgcagccagcagc

SEQ ID NO: 121290 - DNA, 1057 bp, Homo sapiens
  Payload ID: 3779
  Gene Symbol: CCER2
  Gene Name: Coiled-coil glutamate rich protein 2
  ENST ID: ENST00000635114
  CDS Start-End: 1-801
atgccgccccgagggccagcctctgagctgctgctgctgcggctgctcctgctgggggcggccaccgctgctcccttggcaccgagaccctccaaggaggagctgacccgctgtctggcagaggtggtcacagaggtgctgaccgtgggccaggtccagagaggaccctgcactgctcttctccacaaggagttgtgcgggacagagccccacggctgtgcgtccaccgaggagaaaggcctgctgcttggggatttcaagaagcaggaggctgggaagatgaggtccagccaggaggtgagggatgaggaagaggaggaggtagcagagaggacccacaagtctgaggtccaggaacaagccatccgcatgcaagggcatcgccagctccaccaggaggaggacgaggaggaggagaaggaggagaggaagagggggcccatggagacctttgaggacctgtggcagcggcatctagagaatggaggggacctccagaagcgggtggcagagaaggccagtgacaaagagacggcccagttccaggcagaggagaagggggtgcgggtgctgggcggggaccgcagcctgtggcagggggccgagagaggcggaggagagaggcgcgaggacttgccccaccaccaccaccaccaccaccagccagaggctgagcccaggcaggagaaggaggaggcttcggagagggaggaaaaggaggtggagcagctggagcacttgagagacgaactgaagaaggtgacagagacgctgggggagcagctcaggagggagggctgacccctacctcagtccctccttcctcctgacacaccctgtggcttaggactgttgaccccgaagcctccacctcacctagcaccccacgccacccctacccaaacaggggaggaggcggacgtgccttggaaccacacccaaggaggtgagtctgagctgggccgggggctgggctcagccctgacacaggaagcacccccacacctatgcactcccactccaacccttctgagtgaataaagcacaaagaaacgca

SEQ ID NO: 121291 - DNA, 570 bp, Homo sapiens
  Payload ID: 3779
  Gene Symbol: CCER2
  Gene Name: Coiled-coil glutamate rich protein 2
  ENST ID: ENST00000635007
  CDS Start-End: 1-369
gaggacgaggaggaggagaaggaggagaggaagagggggcccatggagacctttgaggacctgtggcagcggcatctagagaatggaggggacctccagaagcgggtggcagagaaggccagtgacaaagagacggcccagttccaggcagaggagaagggggtgcgggtgctgggcggggaccgcagcctgtggcagggggccgagagaggcggaggagagaggcgcgaggacttgccccaccaccaccaccaccaccaccagccagaggctgagcccaggcaggagaaggaggaggcttcggagagggaggaaaaggaggtggagcagctggagcacttgagagacgaactgaagaaggactgttgaccccgaagcctccacctcacctagcaccccacgccacccctacccaaacaggggaggaggcggacgtgccttggaaccacacccaaggaggtgagtctgagctgggccgggggctgggctcagccctgacacaggaagcacccccacacctatgcactcccactccaacccttctgagtgaataaagcacaaagaaacgca

SEQ ID NO: 121292 - DNA, 2962 bp, Homo sapiens
  Payload ID: 3780
  Gene Symbol: CCER1
  Gene Name: coiled-coil glutamate-rich protein 1
  Uniprot ID: Q8TC90
  ENST ID: ENST00000358859
  CDS Start-End: 435-1655
acagtcctgccaggacggcgacagtgaagcacctgggttgagagggagcagcaggtaactgcgcaacccctgcctcccccggccccagcccgtgcctcagcagagccgggtgtggtggggacccgggagtgggtctcactgcgtgtcgcctgccaacaccttcctcccccaccatccttacccagccccagtcccacccagcacacctgggcgagacaacccaggtgcgaaggacaagcgattactaccgaagagcgtgcaaaccaggaagagagcagcctcctggagaggaaaacgtgatcccaggggtagacacgtggcgctgcgtggagagacaggttgacgagacgaggctcttctgaccgtcctacctggcaaaacttgacgacagcttcaggtcgctaccatctggacctctcggagctccctgaaccatgactcagaccctcgacacaagggaagaccctctgaacctgggcggcggtggcggcggcggctgtggctgtggctgggcacactcggcctccttgagctcctggtcgtcctgccatcgaaggcgcccgggtgctccagcgtacaatagaccgcaccgatatagccccaagaccgagtatgggcccccaaggaagcagccgaagcaacagcacggcccgggcttttggttccaaccacccgtgtgctctaactgggggtgctggggagggccctggcgcccaccccctccaggattctggaaattcccctgcccggtgcaagtgtttcgggtgtatggcctgcaccctctctgcttttgctgctgctcctgctggagcgggtcctggaaccctggctgggtgaagcccccaggcaggaagaagcgctggggccgcagaggccgcggcctgcgccaccaccctcgccactcctacccgcggagcccgccagcggatgtgagcacgctgccgcggccggtcaagctgtatgagtggagagagcctggcatgcgagcgccgcccaacaccacccaattcatcatgaaccagatctacgaggacatgaggcagcaggagaaggtggagcgtcagcaggaggcgctgcgggcgcagaaggccacggtgagcggcgaggcctccccagccagatcctccggaaacgacgcgccccctggcggcagcaaggaaacctggggactgcaggaaactctgtatggctttgtgcagaatccctctctagcattcagtcccaacccagaggaaaaccagtctcttgccccgctgctggtggaagaagaggaggagaagaaaaatgatgatgaggaggagtatgaccaggaggtgtgtgatgcaaaggaggcgagcgaggaggaagaagaggtcgaagatgaggaggaagaggtcgaagatgaggaggaagaagaggtcgaagaggctgaatatgtggaggagggagaggaggagctggaagaggaggagctggaagaggaagaggaggtcctggaggagaacgagcagagaggggaagaatttcacttgcctctggaaatgcctttatcaatcttcgtagaggctgaagaaaagagagagaactttataagctgcacttttttaaacccagagcagataattcccaaagtgccacaggaatccctgttcatggcacaggactttaactgttagacatcagaaaagggattgagaaaagggatggaactgatttgaggctaaactggattagcaatttattaaaaactgattaaaaagtgagttccattaataaacagatctatgtaaacaccttctttggccattataaaatgtttaaaatttgatgcgtatgtgtatgactatgggtgggtggtggggaagctttcaaatataattttactggaactgattaaaggccaagtattttattactaccatttgaatattttcatttggtgttttcccctctagaaaacagagttgctgttgtttttttaaatctggcaatgctgaaaaagcgtttgtttttgaaacaaatttatacaacttggccacttaatgagcttggaatcaagagatagtttattacatgcgtaagaagcacattctaacgctactaaatgttcaccagtgctcttaacataactgaagccattttcaatccctgtattttttcaacaatatttttcctcatagatttttccaccatcagagttcatttttgagggttatattttgttaacctcatttgcaggctcttgtgtcatcgcttattgatattccttgttccacagtgctatggatcttcctcagaagaacatgaagttgcttctgtggaactggttatctgccatggcctcaacaatccataatccagtcatggagaggattccccatggtcagaagtcaacttgcacatctagttaaagtccaaggtaactgcaaacagtggaacatggcttaggttttgaagcctcgttattggatatagtctttatcctaagttctgaggagccataaaaatagttttccagaatggatttttttttttagataaaaagattatctaccttttgggggtggaatatcttattttgtttttgaatttgtctttgttataaagaagagtaaaacaaagatgtgtaagtgtgagtctgtgtgagctagtttctgatgtctaaacagcaattacctatggagaatacatcattcaaagtaatagcttttgttcaaacatttttaggaagtaataatacatttcttcctggacagttgataaaagttccatccatagcatatttccagaatatccctagatgatgaatttaaacatgccttctcagaaattaaatcttttgactttgaaccacaagttagcatttatttgttgaagagaagaatgtgtggtgatgtcttacctgaatgttggttgttactgatatattacaattttcaaggtgataagcttgagctattaaataataaaaagtattaaagta

SEQ ID NO: 121293 - DNA, 683 bp, Homo sapiens
  Payload ID: 3780
  Gene Symbol: CCER1
  Gene Name: coiled-coil glutamate-rich protein 1
  ENST ID: ENST00000549707
  CDS Start-End: 1-175
gaacgagcagagaggggaagaatttcacttgcctctggaaatgcctttatcaatcttcgtagaggctgaagaaaagagagagaactttataagctgcacttttttaaacccagagcagataattcccaaagtgccacaggaatccctgttcatggcacaggactttaactgttagacatcagaaaagggattgagaaaagggatggaactgatttgaggctaaactggattagcaatttattaaaaactgattaaaaatgctatggatcttcctcagaagaacatgaagttgcttctgtggaactggttatctgccatggcctcaacaatccataatccagtcatggagaggattccccatggtcagaagtcaacttgcacatctagttaaagtccaaggtaactgcaaacagtggaacatggcttaggttttgaagcctcgttattggatatagtctttatcctaagttctgaggagccataaaaatagttttccagaatggatttttttttttagataaaaagattatctaccttttgggggtggaatatcttattttgtttttgaatttgtctttgttataaagaagagtaaaacaaagatgtgtaagtgtgagtctgtgtgagctagtttctgatgtctaaacagcaattacctatggagaatacatcattcaaagtaa

SEQ ID NO: 121294 - DNA, 1057 bp, Homo sapiens; identical to SEQ ID NO: 121290
  Payload ID: 3781
  Gene Symbol: CCER2
  Gene Name: coiled-coil glutamate-rich protein 2
  Uniprot ID: I3L3R5
  ENST ID: ENST00000571838
  CDS Start-End: 1-801

SEQ ID NO: 121295 - DNA, 570 bp, Homo sapiens; identical to SEQ ID NO: 121291
  Payload ID: 3781
  Gene Symbol: CCER2
  Gene Name: coiled-coil glutamate-rich protein 2
  ENST ID: ENST00000571845
  CDS Start-End: 1-369

SEQ ID NO: 121296 - DNA, 3927 bp, Homo sapiens
  Payload ID: 3782
  Gene Symbol: CCSER1
  Gene Name: coiled-coil serine-rich protein 1
  Uniprot ID: Q9C0I3
  ENST ID: ENST00000432775
  CDS Start-End: 355-2388
gttaccatcgagaccggggctgtgtatgctcgaggtgcagggagctaatgtataaggagttaaatgaactcttgctgctgccaaatatgttgttatcactaactgcaccgctgctgtcattagtgctgctgccaacactgcaagccctgctgctgccagtgccaattctgctgatgccttgggctctccatgtcccagggtgattccatagacaagcagctgcttttagatttcacttgctcattacctgtagatcctttgccttaggactcaagcttaagcccatgaagcctgggatagaagacaattggaggctgcaaagttggctttcacagtgcaagcctttgattcccaatgggggactcaggatcaagacgatctaccctggtctcccggttgccaatattcagaagaagtattaacagaagacatgattctcttccttcttcaccttcttccagtaatacagttggtgtccacagttcctctccttccagcactaactcaagctcaggtagcacaggtaaacggaggagcatattccgtactccttccattagcttccaccataagaaggggagtgagcctaagcaagagcctaccaaccagaaccttagtatttcaaatggtgctcaacctggtcacagcaatatgcagaaactgagtttggaagaacatattaagaccaggggaagacattctgttggttttagtagttcacgaaataagaagataacaagatctttgacagaggattttgaaagggaaaaagagcactcaactaacaagaatgtctttataaattgtctaagttctggcaaaagtgaaggggatgattctggtttcacagaagaccaaactcgtcgttctgttaagcagtcaacaaggaagctactccctaaatctttttcatctcactataaattttctaagccagttctacagagccaatccatttcattggtacaacagtctgaattctcattggaagttacacagtaccaagagagagaacctgtattagtaagagcttcgccatcctgttctgtggatgtaacagaacgggcaggaagctctttacaatctcctttgctttctgctgatcttaccacagctcagacaccttcagaatttttagccttgactgaagattctgtgtctgaaatggatgcattttctaaaagtggaagcatggcatcccactgtgacaactttggccacaatgattctacctctcagatgtccctcaattctgctgctgttacaaagacaacaacagaacttacgggaactgttccctgtgcaattatgtctcctgggaaatataggttagagggtcaatgtagcactgaatctaattcattaccggaaacctctgctgctaatcagaaggaagtgttattacaaattgctgaactacctgctacaagtgtgagccactcagagagtaacctaccagcagatagtgaaagagaagaaaatatagggttacaaaatggtgaaacaatgctggggacaaactccccaaggaaacttggattttatgagcaacataaagcaatagcggaacatgtaaaagggatccatcctatttcagattcaaagataatacctacttctggtgatcatcatatttttaacaaaacatcacatggatatgaagcaaatcctgccaaagttcttgccagtagtctcagtccatttcgtgaaggaagatttatagagaggagactgcgatcctcgtcagaaggcactgcagggagtagcagaatgattttgaaaccgaaagatggaaatatagaagaagttaatagtttaagaaagcaaagagcaggttcttcatcttcaaaaatgaacagtttggatgttttgaataatttgggatcttgtgaactggatgaagatgatctaatgcttgatcttgaatttttagaggaacagagtcttcacccttctgtttgccgggaggactcatatcactctgtcgtctcatgtgccgcagtagttcttactcctatggaaccaatgatagaaatgaagaaaagagaagaaccagaatttcctgagccttccaaacagaatctttccctgaaattaacaaaggacgttgatcaagaagccaggtgttcccacatcagccgaatgcccaacagtccatctgcggattggcctctacaaggtgtggaagaaaacggaggcatagattctctgccattcagactgatgttacaggactgcacggcagtcaagacgttattattaaagatgaagagagttcttcaagagagtgcagacatgagtccagcaagcagtaccacgtcacttcctgttagtcctcttactgaagagccagtgcctttcaagaccacataccctagggaattctgaaaacctgactaacatcaattgaagattggggttcaggaggcctagatgatccaccatgacttattcaaaagttgaagatgaaaggaaagaataaagactctttccatccagttctctagtctgaaaggaaaagaaataggcaaaggacagtaggcttttctatatcattatattcattcaaatgattctcttaaaataataatgaactaaggaggctctgtaagcaagacaaacggtcaggaggcctccttgctccaagaatactccctttttactttattaaaatggtttgtaaaggtaaactaaattgactaaagtatcaatatttccatatatgcgtgatcttttagagaccataaactgtcagtgtattaggctgttcttgcatggctataaagaaatacctgagactaggtgatttataagaaaaggggtataattggcccacagttctgcagactgtacaggaagcatagtagcatgtgcttctggggaggcctcaggaagcttccaatcgtggcggaaggcaaagggaagcaggcacattgcatggtgagaacagaaacaagaacaaggaagggtggctgggaggcgccacataattttaaattaccagatctcacaagaactcactatccggaagacagcacccagccatgagggatccaccctcatgattcaaacacctcccaccaagccccacctccagcactggggatcacaactcgacatgagatttgagcagagacaaatttccaaactatatcactcagaatctggaatagaaagagtatgcaccataacacttttattctctacagaaacagacactgtgctgagctcaaaaaatagtgattcatcaaatatgaatgtgcaaacctcttttgtactgtatctgtggaatcctggttactggggctttgagcccctgtcccataaaatctctgtaatactaacctaactcatggcatttctttaaaatcaaatttaatgaaatgatggacataaagcccatggaactgagtgtgtaatcttctcttatttgattagatgttaaacttgaaacacttttttttgataaaatatgaaatacataaatgagttaaattgttgtgactttccttataagattgaaaacaataaggtgtttttaatactttttttctgtgttctcttgaaagtagctttacatgtattaagcaatcctggctttagatattagggacaataaaaatatctgcaattttcccagttttatatagccattgtttgcaagtatgaaaacctgtcttttgttactgaaatattatcttttattttggcttttttgataacttttatgtttgccttgagcaagtcacttatcttttctatttgtgttttctatttcagtttatttatgaaagacagtaataatgattgtgatgtaccttacaaaaaaagataaaatcgtattgaagagactgttgaatatgaacgcagtgtattaaatgcccgatataggaacaaaaataaaatgaagaacatttctattataaa

SEQ ID NO: 121297 - DNA, 2684 bp, Homo sapiens
  Payload ID: 3782
  Gene Symbol: CCSER1
  Gene Name: coiled-coil serine-rich protein 1
  ENST ID: ENST00000505073
  CDS Start-End: 339-2330
aaatagtcgccgacctactgccaatccgcctctcctctctctctctctctgtctcaacatgactgactgggaagcggtggctcgggcagagcagctccgctggcgcaggcaggaggagcaggaggattattaaataacgcagctggactctgtgcaactgggagtggagaggagcccaacagccgagaaggggagggagggcagaggagggggaccaggaaggacacccccgtgccccgaagacataaatccctgagtgcccgggaggagccttaacaagcgcacggagccctcaaggctgcaaagttggctttcacagtgcaagcctttgattcccaatgggggactcaggatcaagacgatctaccctggtctcccggttgccaatattcagaagaagtattaacagaagacatgattctcttccttcttcaccttcttccagtaatacagttggtgtccacagttcctctccttccagcactaactcaagctcaggtagcacaggtaaacggaggagcatattccgtactccttccattagcttccaccataagaaggggagtgagcctaagcaagagcctaccaaccagaaccttagtatttcaaatggtgctcaacctggtcacagcaatatgcagaaactgagtttggaagaacatattaagaccaggggaagacattctgttggttttagtagttcacgaaataagaagataacaagatctttgacagaggattttgaaagggaaaaagagcactcaactaacaagaatgtctttataaattgtctaagttctggcaaaagtgaaggggatgattctggtttcacagaagaccaaactcgtcgttctgttaagcagtcaacaaggaagctactccctaaatctttttcatctcactataaattttctaagccagttctacagagccaatccatttcattggtacaacagtctgaattctcattggaagttacacagtaccaagagagagaacctgtattagtaagagcttcgccatcctgttctgtggatgtaacagaacgggcaggaagctctttacaatctcctttgctttctgctgatcttaccacagctcagacaccttcagaatttttagccttgactgaagattctgtgtctgaaatggatgcattttctaaaagtggaagcatggcatcccactgtgacaactttggccacaatgattctacctctcagatgtccctcaattctgctgctgttacaaagacaacaacagaacttacgggaactgttccctgtgcaattatgtctcctgggaaatataggttagagggtcaatgtagcactgaatctaattcattaccggaaacctctgctgctaatcagaaggaagtgttattacaaattgctgaactacctgctacaagtgtgagccactcagagagtaacctaccagcagatagtgaaagagaagaaaatatagggttacaaaatggtgaaacaatgctggggacaaactccccaaggaaacttggattttatgagcaacataaagcaatagcggaacatgtaaaagggatccatcctatttcagattcaaagataatacctacttctggtgatcatcatatttttaacaaaacatcacatggatatgaagcaaatcctgccaaagttcttgccagtagtctcagtccatttcgtgaaggaagatttatagagaggagactgcgatcctcgtcagaaggcactgcagggagtagcagaatgattttgaaaccgaaagatggaaatatagaagaagttaatagtttaagaaagcaaagagcaggttcttcatcttcaaaaatgaacagtttggatgttttgaataatttgggatcttgtgaactggatgaagatgatctaatgcttgatcttgaatttttagaggaacagagtcttcacccttctgtttgccgggaggactcatatcactctgtcgtctcatgtgccgcagtagttcttactcctatggaaccaatgatagaaatgaagaaaagagaagaaccagaatttcctgagccttccaaacagaatctttccctgaaattaacaaaggacgttgatcaagaagccaggtgttcccacatcagccgaatgcccaacagtccatctgcggattggcctctacaaggtgtggaagaaaacggaggcatagattctctgccattcagactgatgttacaggactgcacggcagtcaagacgttattattaaagatgaagagagttcttcaagaggttcacttgtcaaggatgagtgtttccaattctacaaataaaaattgtattattttctagttgtatgaaagtgaagctaatgcttaagaatagtgcagacatgagtccagcaagcagtaccacgtcacttcctgttagtcctcttactgaagagccagtgcctttcaaggatataatgaaagatgaatgctcgatgctcaagctgcagctgaaagagaaggatgaactcatttcccaacttcaggaagagctgggaaaagtccggcatttacagaaggcttttgcttcaagagtagataaatccacacagactgaactactatgctatgatgtaagtagctctgtaaaaccatttttaacttcattattggcattcagacctccacagcttattgacctctgcggctgctgtgt

SEQ ID NO: 121298 - DNA, 445 bp, Homo sapiens
  Payload ID: 3782
  Gene Symbol: CCSER1
  Gene Name: coiled-coil serine-rich protein 1
  ENST ID: ENST00000503421
  CDS Start-End: 234-445
tctaccatgtgaggacacagtgagaaggcagctatttgcaagccaggaagagagccatcaccaagaactgaatctgccagccccttcatcttggatttcccagcctccaaaactctacaagttagagttggattatctacattacgaagagaggaaagtgattgtaaaactagactttatttcattcagcaaaggaaattcattggcagggtgagactagtcgaagtgcagacatgagtccagcaagcagtaccacgtcacttcctgttagtcctcttactgaagagccagtgcctttcaaggatataatgaaagatgaatgctcgatgctcaagctgcagctgaaagagaaggatgaactcatttcccaacttcaggaagagctgctcccgaaaattttgtgttccatgagaggaggttttatttgcttggctgtgtttcttga

SEQ ID NO: 121299 - DNA, 1070 bp, Homo sapiens
  Payload ID: 3782
  Gene Symbol: CCSER1
  Gene Name: coiled-coil serine-rich protein 1
  ENST ID: ENST00000509109
  CDS Start-End: 115-396
tgaggacacagtgagaaggcagctatttgcaagccaggaagagagccatcaccaagaactgaatctgccagccccttcatcttggatttcccagcctccaaaactagtgcagacatgagtccagcaagcagtaccacgtcacttcctgttagtcctcttactgaagagccagtgcctttcaaggatataatgaaagatgaatgctcgatgctcaagctgcagctgaaagagaaggatgaactcatttcccaacttcaggaagagctgctcccgaaaattttgtgttccatgagaggaggttttatttgcttggctgtgtttcttgaagattctactgatgtcttcagtgatatgcatgcccccattaaagattctaaagcaaactactacacgtaggccatcatgttccaagtttttgaaagttcatctttttcatcttgttgataaatttcatcaacttttatgtagggaaaagtccggcatttacagaaggcttttgcttcaagagtagataaatccacacagactgaactactatgctatgatgctaccgtgataagctgctattctgctcatcacaaggagttagagtcctaattatttaaataaacagaaggaagaaaggaaggaaattaattttgacaaaggacctgaataatccataaaccagatgcctttagtgaaaacgaagtaagatcagctctggatacctcctaactcttcccctccttctcctgatgagggagaagtggaggcccaaggaaaatgagcaagttttgtaacaacacgaatggggaaggatgggaaagagaacagaatcggtggagggtttaaacttgaaaagactagagacagtacaaggagggagagaggtggcaaaatgtacccaggccctgtattgattaggaattttcaagttctggacataaagttttctctaagaagtgaatttcttctgtatatgttgtccttttttcaacatgtctccaaattggttgaagaaatatgttatgaattactgtattaaaggctgtggatcacataaatagagctctgtctcttcttaggta

SEQ ID NO: 121300 - DNA, 605 bp, Homo sapiens
  Payload ID: 3782
  Gene Symbol: CCSER1
  Gene Name: coiled-coil serine-rich protein 1
  ENST ID: ENST00000513522
  CDS Start-End: 1-508
gaatctttccctgaaattaacaaaggacgttgatcaagaagccaggtgttcccacatcagccgaatgcccaacagtccatctgcggattggcctctacaaggtgtggaagaaaacggaggcatagattctctgccattcagactgatgttacaggactgcacggcagtcaagacgttattattaaagatgaagagagttcttcaagagagtgcagacatgagtccagcaagcagtaccacgtcacttcctgttagtcctcttactgaagagccagtgcctttcaaggatataatgaaagatgaatgctcgatgctcaagctgcagctgaaagagaaggatgaactcatttcccaacttcaggaagagctgggaaaagtccggcatttacagaaggcttttgcttcaagagtagataaatccacacagactgaactactatgctatgatgccctgtggaatcctacatgcactgaaggtttatttaaaccagtacttatttcaacttaggttaaatcattatctgacaataagaaatgcatcactaatctgtgacatgtaaaatattgagtaaaatcaattttttcatcatttcatattttaagta

SEQ ID NO: 121301 - DNA, 514 bp, Homo sapiens
  Payload ID: 3782
  Gene Symbol: CCSER1
  Gene Name: coiled-coil serine-rich protein 1
  ENST ID: ENST00000510519
  CDS Start-End: 225-401
tgaggacacagtgagaaggcagctatttgcaagccaggaagagagccatcaccaagaactgaatctgccagccccttcatcttggatttcccagcctccaaaactctacaagttagagttggattatctacattacgaagagaggaaagtgattgtaaaactagactttatttcattcagcaaaggaaattcattggcagggtgagactagtcgaagtgcagacatgagtccagcaagcagtaccacgtcacttcctgttagtcctcttactgaagagccagtgcctttcaagaatattcagcattatatcaactgtacacacatatggtctgacacatgccactgcatcattatagaagagccaaaggataaccaattttgcatagaccacataccctagggaattctgaaaacctgactaacatcaattgaagattggggttcaggaggcctagatgatccaccatgacttattcaaaagttgaagatgaaaggaaagaataaagactcttt

SEQ ID NO: 121302 - DNA, 5847 bp, Homo sapiens
  Payload ID: 3782
  Gene Symbol: CCSER1
  Gene Name: coiled-coil serine-rich protein 1
  Uniprot ID: Q9C0I3
  ENST ID: ENST00000509176
  CDS Start-End: 289-2991
gtctcaacatgactgactgggaagcggtggctcgggcagagcagctccgctggcgcaggcaggaggagcaggaggattattaaataacgcagctggactctgtgcaactgggagtggagaggagcccaacagccgagaaggggagggagggcagaggagggggaccaggaaggacacccccgtgccccgaagacataaatccctgagtgcccgggaggagccttaacaagcgcacggagccctcaaggctgcaaagttggctttcacagtgcaagcctttgattcccaatgggggactcaggatcaagacgatctaccctggtctcccggttgccaatattcagaagaagtattaacagaagacatgattctcttccttcttcaccttcttccagtaatacagttggtgtccacagttcctctccttccagcactaactcaagctcaggtagcacaggtaaacggaggagcatattccgtactccttccattagcttccaccataagaaggggagtgagcctaagcaagagcctaccaaccagaaccttagtatttcaaatggtgctcaacctggtcacagcaatatgcagaaactgagtttggaagaacatattaagaccaggggaagacattctgttggttttagtagttcacgaaataagaagataacaagatctttgacagaggattttgaaagggaaaaagagcactcaactaacaagaatgtctttataaattgtctaagttctggcaaaagtgaaggggatgattctggtttcacagaagaccaaactcgtcgttctgttaagcagtcaacaaggaagctactccctaaatctttttcatctcactataaattttctaagccagttctacagagccaatccatttcattggtacaacagtctgaattctcattggaagttacacagtaccaagagagagaacctgtattagtaagagcttcgccatcctgttctgtggatgtaacagaacgggcaggaagctctttacaatctcctttgctttctgctgatcttaccacagctcagacaccttcagaatttttagccttgactgaagattctgtgtctgaaatggatgcattttctaaaagtggaagcatggcatcccactgtgacaactttggccacaatgattctacctctcagatgtccctcaattctgctgctgttacaaagacaacaacagaacttacgggaactgttccctgtgcaattatgtctcctgggaaatataggttagagggtcaatgtagcactgaatctaattcattaccggaaacctctgctgctaatcagaaggaagtgttattacaaattgctgaactacctgctacaagtgtgagccactcagagagtaacctaccagcagatagtgaaagagaagaaaatatagggttacaaaatggtgaaacaatgctggggacaaactccccaaggaaacttggattttatgagcaacataaagcaatagcggaacatgtaaaagggatccatcctatttcagattcaaagataatacctacttctggtgatcatcatatttttaacaaaacatcacatggatatgaagcaaatcctgccaaagttcttgccagtagtctcagtccatttcgtgaaggaagatttatagagaggagactgcgatcctcgtcagaaggcactgcagggagtagcagaatgattttgaaaccgaaagatggaaatatagaagaagttaatagtttaagaaagcaaagagcaggttcttcatcttcaaaaatgaacagtttggatgttttgaataatttgggatcttgtgaactggatgaagatgatctaatgcttgatcttgaatttttagaggaacagagtcttcacccttctgtttgccgggaggactcatatcactctgtcgtctcatgtgccgcagtagttcttactcctatggaaccaatgatagaaatgaagaaaagagaagaaccagaatttcctgagccttccaaacagaatctttccctgaaattaacaaaggacgttgatcaagaagccaggtgttcccacatcagccgaatgcccaacagtccatctgcggattggcctctacaaggtgtggaagaaaacggaggcatagattctctgccattcagactgatgttacaggactgcacggcagtcaagacgttattattaaagatgaagagagttcttcaagagagtgcagacatgagtccagcaagcagtaccacgtcacttcctgttagtcctcttactgaagagccagtgcctttcaaggatataatgaaagatgaatgctcgatgctcaagctgcagctgaaagagaaggatgaactcatttcccaacttcaggaagagctgggaaaagtccggcatttacagaaggcttttgcttcaagagtagataaatccacacagactgaactactatgctatgatggtttaaacttgaaaagactagagacagtacaaggagggagagaggctacatatcgaaatcgaattgtgagccaaaatctcagcacaagggacagaaaagcaatacatactcccaccgaggaccgttttaggtattcggcagcggaccagacaagcccctacaaaaacaagacctgtcaactcccaagtctctgtttaagtaatttcctgaaggacaaggaactagcagaagttatcaaacattcaagaggaacttatgaaaccctcacttcagacgttacacagaacttacgggccaccgttgggcagagctctctgaagccaacagctaagacagaagggctctccacgttcttagagaaaccaaaggaccaagttgctacggcccgacagcattcgacctttacaggcaggtttggacagccacccagagggccaatctctttacacatgtacagcaggaagaatgtgtttctccaccacaatttacacagcactgagctgcaaactctaggccagcaggatgggtaattaaatcaccgtattcctgtctttgggtaggataaagatggttagtgtttctcgtgcatagttcatattaaaattgtcatgtactttttcttacattttagttataaacagagttgtgttgttgggttttttttcttagtcataaacaaagacttgtgggttttttttttccaagagtgaaagtttgagcatgttaattgaactaggttgcattgccttgaagactttactatataggtgtataataaatgggaccatcatgatcgtttatatagtccataatttatttattttttatctctatcacttactgatatgcattaaggtttcagaagataatatcaaatagcaatctgttcactgttaatggtgttactataaaagtagacctgatgaaaaatagataaaggaattataaagaattttaaattatataattaatagaaggaggaaaaaagagaaatgttaacgtcttatatttggtggtatatttatttgaagaatgtggcttgcttgcatgtaacctagagatgtgtttgtctctattacatacattcaagctcatcttgtgatactagtaagggggaaatggctgtattttttttcctttaaacgtttagttcatactagttcacaaaggatttcagacagagtaattgctagccaaatagagaatgacagctctgatctttgaaaaattttgcttttagtttttgttattgatgttgaagtaccgtgacataacacaaggtgataaagttggttgaattttgtcagatgatgcataaatactgacatgctatattctttgagccactgtcatggcaatataaacattttttcaaaatttcaaggatgaaacatcctaagaaaattattctttttctttactttccttattttttaaaatgttcttttttatgtaaatccaattttggtttatatacatcaacccatatctataattttatgaactgaagaacagaaagtcagtattttagtagccagcatacaatattctgactatgcagaaatctagatttggaacaaaagtaaagtaaatgtgaacattggcaatttaatcttagaaataagcttctaacaggaatatttaaaacccatttgatggcaaatatttctctttgacaaataaggcccaaatatgttataatatgttatatacttatgtgcactttagatcaatatatgaattgatctatggataattccatcatgttcaattagtagcagagcagaatcaaagagtacaattgaatacataaataaataatttttaaaagactaataggaatcaaggctgcagttttcttatacacatcagagctgttaagtacatccacattagccatagtccatgcaaattgaaactgtcatacctactgcatgatctgtttcccttgcattttctaacagaatctgtcagcgtgcacaagcaagatgaacaaagggaaattgagatagcagttttagcatggcatctgacaacttgcttaaattaaagctgtgtgcaaaatgcatctcctattataaaaatgtatttgtgccctgtgctttggggaaaagccattagacactccacccctgagctttaactactgaactttgatacatttgcaaacttagattggaactgataaagtaaggagtcgagtggatatgttgtacttgtaattttggttttccaaaggaacacacatgtgcatcaaggcagacatttgccaaatgttttctttctttgcgtgtttgtaattctgccaaaagagaacaatatacactgcaaattgcttgacttaatgagattgccatctaaagttcccaccatactttggaagctataatgatcatgcagatatacactttgggctgggcaatatttaagaaatgataggaaaatagaaaaatcatgattattaattgtggaattcagcttgatttgtcctaaatgttggtgtctgttgctagagtattttaaatctgtacataaataagcatgataaaataatcaaggattttttcccaggatatggaagaactatgtatcacaaataatgtttttgatttggacttttggagttgatagttttgttttcctggaagatagacttttgaattatactttataaaaataatctatttatagaagatctgtcatttaatagacattttaagagatgttttaaacgctagtattttcttgaaaaatcttttttaaagctgaatcattcaaaagaaaacctggattaaacagttcgattttaaaaggaagggtattttttggaaatatcatcttaaagctgttttgtatcagtattttcaacattgttataatattatttgtaatactaagtgtaactcaggcctggagaaggtgtaagcccactatgctaatgtacatcagtaactgtaaaacaggggttctttgtaagttcctcttgtgtatatatagtaacttataacaatggcatgtgggcattctttcagtgaattgctttctttgtactaaaatctctagttttctaagacagttccatgtataaaaatgatttatgcatttctccaaggcggtacatatccaaagacatgacaccagggggaaaaagtgcttgtttttctgatggaagcagtggtcttttcttttctttcctctttcttttgtgcatgtgtatgtgtagctaagcctaaataaccctgtaaaatttctgctgcaaattgtctcttctgaatttagaatgtgttttaaaggaacacttaggaagagaaataccttgaagaaaagctgtttccacctgaaataaactgttcccatttttataattattggaacatgaaactgta

SEQ ID NO: 121303 - DNA, 716 bp, Homo sapiens
  Payload ID: 3782
  Gene Symbol: CCSER1
  Gene Name: coiled-coil serine-rich protein 1
  ENST ID: ENST00000508550
  CDS Start-End: 1-413
tagcggaacatgtaaaagggatccatcctatttcagattcaaagataatacctacttctggtgatcatcatatttttaacaaaacatcacatggatatgaagcaaatcctgccaaagttcttgccagtagtctcagtccatttcgtgaaggaagatttatagagaggagactgcgatcctcgtcagaaggcactgcagggagtagcagaatgattttgaaaccgaaagatggaaatatagaagaagttaatagtttaagaaagcaaagagcaggttcttcatcttcaaaaatgaacagtttgggtctgcgacagatctctgaccatctgaatagatgcttcacaatttgcagcacagaattgaccttcagtaaactaactacctgttctgaggtgacagtcactggaatctgaggatgttttgaataatttgggatcttgtgaactggatgaagatgatctaatgcttgatcttgaatttttagaggaacagagtcttcacccttctgaactaccgcaggaacataccaggaaagccaagagaatccacagacctttgaaggaattggatcaccgccacaggctccctgagatggcaaaaaactgtgagtctgcttgctttctcaatgggaggctcgtggtccggggcaagttctcagttctggtcactggctgcttggaaaatagactcagtgctgttgtgggacacgatgggag

SEQ ID NO: 121304 - DNA, 744 bp, Homo sapiens
  Payload ID: 3782
  Gene Symbol: CCSER1
  Gene Name: coiled-coil serine-rich protein 1
  ENST ID: ENST00000502478
  CDS Start-End: 1-224
ttaggaatctttccctgaaattaacaaaggacgttgatcaagaagccaggtgttcccacatcagccgaatgcccaacagtccatctgcggattggcctctacaaggtgtggaagaaaacggaggcatagattctctgccattcagactgatgttacaggactgcacggcagtcaagacgttattattaaagatgaagagagttcttcaagagttttcttcatgaatccagcattaatgtttcacttgtaaaacaactcacatacttttgtgtgattcgatgggctaaatccgacattaagaatttcaagctgcaacataacaggtatacagcagacggcaccctgcagaatctccaaggaatacttgagtcgtcagcgcttctgatgggttttggaaaaagacagtgagcagagaatcacttaagcaaagtggaaaagccgtaattgtgttcctctgagacacatttttactgaaattatgttttgtttttgtttgaaaatcagaatcaaaggcatatttaactacagttaaaatagctgtttttaatgagtgattctatcaaatatgatgttacaactttagataacataatgcaatttcttaaaagtagtatgaatctaataatattcacatgtttacagatgagcaaaagtgtttcagaatctagtgactcgtttagctggaatgcacttattccttaactgtatcattttaaccttgataaaattgaaaacttgtggaaa

SEQ ID NO: 121305 - DNA, 7664 bp, Homo sapiens
  Payload ID: 3783
  Gene Symbol: CCSER2
  Gene Name: coiled-coil serine-rich protein 2
  Uniprot ID: Q9H7U1
  ENST ID: ENST00000224756
  CDS Start-End: 186-2690
gcgatgctggttgctgcggctcgggcggcggggctggcggggatgtgacgggcggcccttcgtctcaccttccgtcctcgggcccgcaggtcgcagggcggcctgcagctgggccgcggccgaggaggcagcgcgacctccgcacgattctttcaacttttaagaacaaatgcaccttatagctcatggaagaaaaaacacaaatcaagacatttttgggttccaagttgccaaagtatggaacaaaatctgtaagaagtacattgcagccaatgccaaatgggacacctgttaatttattaggaacttccaagaatagtaatgtcaaaagttacatcaaaaataatggctctgattgtccatcatctcattcatttaattggaggaaagcaaataaatatcagctttgtgcacaaggtgtcgaagagcctaacaatactcaaaattcacatgataaaataattgatcctgaaaaacgtgttcctactcaaggaatgtttgataaaaatgggataaagggaggtttgaaaagtgtttctttattcacatcaaagttagcaaagccatccactatgtttgtgtcatctacagaggagttaaaccaaaagtctttttctggaccatctaatttgggtaaattcaccaaaggcacattattaggaaggacttcatattcttcgatcaatactccaaaatcacagttgaatggattttatggaaaccgatcagctggtagcatgcaaaggcctagagcgaactcctgtgccaccagaagcagttctggagaaagcttagctcaatccccagacagtagtaaatctattaattgtgaaaaaatggtaaggtcacaaagtttttcacattccattcagaattcattccttccaccttcatctataaccagatcacattcctttaatagagctgtggatcttacaaagccttatcagaaccaacagctatccattagagtgcctctacggtcaagtatgctaacaagaaattcccggcagccagaagtactcaatgggaatgaacatttggggtatggatttaataggccttatgctgctggtggaaagaagttggctttaccaaatggcccaggtgtaacttctactttaggttatagaatggttcatccctctctactgaaatctagccgatctccattttctgggactatgacagttgatggaaataaaaattcacctgctgacacatgtgtagaggaagatgctacagttttggctaaggacagagctgctaataaggaccaagaactgattgaaaatgaaagttatagaacaaaaaacaaccagaccatgaaacatgatgctaaaatgagatacctgagtgatgatgtggatgacatttccttgtcgtctttgtcatcttctgataagaatgatttaagtgaagactttagtgatgattttatagatatagaagactccaacagaactagaataactccagaggaaatgtctctcaaagaagagaaacatgaaaatgggccaccacaggatatgtttgattcccccaaggaaaatgaaaaagccttcagtaaaactgatgaatggatagatataagtgtctctgacaggagtgaatgtacaaaacatacttctgggaataatttggtttcaccagatacagactacagagctggttcttcgtttgaactctctccatctgatagctctgatggaacatacatgtgggatgaagaaggcttggaacccattggaaatgtccatccagttgggagctatgagtcctctgaaatgaacagcatagatattttgaataatcttgaatcatgtgaccttgaggatgatgatcttatgcttgatgtggatctgcctgaggatgcacctcttgaaaatgtggagtgtgacaatatgaaccgctttgaccgaccagacagaaatgttcggcagcctcaggaaggtttttggaaaaggccaccccagaggtggagtggacaggagcattaccacctcagccaccctgaccactatcatcaccatggaaaaagtgacttgagcagaggctctccctatagagaatctcctttgggtcattttgaaagctatggagggatgccctttttccaggctcagaagatgtttgttgatgtaccagaaaatacagtgatactggatgagatgacccttcggcacatggttcaggattgcactgctgtaaaaactcagttactcaaactgaaacgtctcctgcatcagcatgatggaagtggttcattgcatgatattcaactgtcattgccatccagtccagaaccagaagatggtgataaagtatataagaatgaagatttattaaatgaaataaaacaacttaaagacgaaataaagaaaaaagatgaaaagatccaactattagaacttcagcttgcaactcagcatatctgccaccaaaaatgtaaagaggaaaaatgcacttatgctgataaatatacccaaacaccctggagacgaattcctggtgggtattctgctccctccttctctccttggcagggctccttccaggggatcccacggactgttccaccgcaccgcagacagacctcaagtactacagccttccagcagccttcccagacccacagatcacacccagggaaaactaataaagccacaacgtatcgaggcccgcagtgaatgctcaatccaagacatgcatcagggcggtgcacatccggaagaaagctttacacacgtcttgcaccaagaaagcaactatggtttggaagagcagcctttttcatcaggcccacaattaacaatggatgtggctaagagtacaccttctgaagcaaacttaaacattactgtaaatgctcaagagccttatcatttggcaaacaatcaaattagtgacatgcagtttatacccacttctcttcagacacctcccgagtcaagtacagtagaccaggctaagagagttggaagaaatcagtctccgccagtgggttatatgtctcagcccaagtccttgcagcttttaaagccatccatattgagttctttggtaccgcctccagtttctgaatcatctccaagtaggactcccacttgtaaaaagtcaccaataatcacaacatgtaattcagcaaaacttcagccaacatctagtcaaacaaatcttgcaaataatcagaatctgaaagcatctaagctccgccccccctcaggctctttcaaacaaaaacaaacaaacagcccccaactagagcctcaaagcttccaggccaagacaagcatcccaaggccactaacacaacgaaaagaaatcatgcagaatccaaatggcaatttgcattctggggattgtttggcctctaatcgatattctcgtcttcctaaaccaaagatacattaagtacatagccatcacctgccaatttgtttcttaaaaacaatctcttctgtaatagctttatgtgcagcttgcagcttgctactgtggtggaggttccattgaaagcctgcaaatcttaaattaaaatgtggaagcttctactagtttggctccttcattttatatcctggttgaagtacatgccatttgagcataattatctcaggtaaacacgaaagtttgcttacccatttcagaggcctgccaaaggcccaaatcatgttatccatccctctccacgtcagaaaattcataatattttactgagcaggcaagaagtgtgctttgctggtttagtcctattaaggtctgtatttattgtggttgtcagaacctcaccccttttcacttgtctctcctgtgaatatggctactattttaactaaagatatggtgataatggaagatggtagtctgtaagcagagttctggccagtgttttgtatatttaaaaggtctatgcaaaagctttgtgatgaataaaggagattaggcttttaatggaaagtctatgtaagttttatttttccttgccagggtcagtcagctaatgttactgttgattcatttcccaaattccccagactgaaagtgtttcttattacatataaatcagttatatattcctttacatcttgttttacaaacacatgtgcatgcacacacacatatacacacacataccatttatgtttgtatttgttactgggtaaattttggagcgcttgagatacaccttgaaacctgtacctaaagatgtattcatttgtaacatatgttggtgctagagttttgctggtaattcaggcttgaacccttaggcttgtggatccatgatagccattttaaggttccacagcattatgtctttaattgtaatatttatatttattgattttctgctaatatctgaagactgaaataatgaacttgaaacatttgcacaaaactttgatggggtataaatataccatatatagggattgtaaactattttctatagcaaaacaagttaaaatattttgagaaaaataacaaatttaaataagactatcttgagaaagctggagttcataatattctccccctcccccatctccagtctcctaggtttcccttttctgtgttttttgtttttttctgtttgttttttgagacagagtcttgctccattgcccaggctggattacagtggcgcaatctcggctcactgcaacttctgcctcccgggttcaagcgattctcctgcctcagcctcctgagtagctgggactacaggcatgtgccaccatgcctggctaatttttttgtatttttagtagagatgagatttcaccttgttggtcaggctggtctcgaactcctgacctcaagtgatccacccacctcgtctatggtgtatttttgaaagacaattttttaaaggtagatttgggaaaaaaatagaattgaagatgggaaattttgttttattaaaaaggtgctagaagatgtttcaaagacaatattcttattttaatacgctgtagaaggtaggtgtggaacctccatgctaccatgtgcacaaacctaattatgctttgggtcacttgtcagttcagtaaatctgccttcctcttctcccaaatcatgtcatctttaggttgttcacctgcagctgctttaaatgaattagtatctttcagatagataaccttacaaggagaatgtttgttttgagcagctgaccaaaaatatatcaaacaggattatggccaaaaagtcactcaaatttctagagattcctttaaaagatgtatgttgatgaaattgcccctttataagaaaaacaacagcaagtcttttagtagaaatttgaaagaagtgtttgctaccattttgacccattattcccttacctatcagatgaatttgccattcactggatagaaaccattcttggatttggtaagaggtgagcaagacaaatcttgtaccatactcttatgtaccagcacttctgatggagaagcagtgaagttcagaacgttcttcacatagtccagatactgttagagtcaggcaaatcagcaaagcactttgttatggagatgacccatgatggctgcagttgtaagtgggcatacatgttctatcattttgaaggagaaagaaaaccgttctcacatgttgcaaatatgtgaatcatactatattcccctaaagtaaaaccagtgacttagtggtttttggtttatttagaagttggtttagacccttatgaaacattatttacgagttggccttatccttaagggaaaagttctaaatttttaaatttatttttaattccctagtctgagggaaatgtctttattgtccattacataaaaatgttgactccagtaatttatttttctctattttttcctccatgtatttactccatttttctctattttttccttccctgatggatttgcagaaatgttaaccaattagctcaacttttctctacctttgttgagtcttaatcttttagaagataggcttatcgtatatttatgaagcataatatattaaaagaaaacaaatctaggatgcttgcatgacataaagtatttgcctgcagttttcattaaaaactgcaagaatatcatgcttgtctgcttcttagtaaatgttaagtctgaaatggaagtgaggatgtaactctactgaataatcaaagatcatcttagatttggcttgatctgtgtttattgcttctattaatgtaaatcaactctgtgccaaatcctcctccacaaaccatttattgtcttagttctagtggtatcaatgaagatagttacagtatatgaattctaagtcctgaggaagaaattttatggggtttgttaagtttcacattcgtgaaagaggaaattagtagagtattcagactttgatatttggctgttaatgggatgcatatcaaatttttaaaagaaggcttggcctaaggagtttattggtacaggtgcagatgattttaaggcattaaaggattatagagttatgtcatttagactgtttctaataactgagaccatctaacatttttcttttggagtctcatttttatttgtgcaatattttcaggcatataggctactgttcattgtatttatatatatattagaatttactaagtactttaacaagtaaaaatctgaatatgaaagaaaatatcagatttgcactttaaatgagcttaattgcttgaagttgtgcctgaaatatcgaattgcctcctattgggtgtggctttgttgaaataaatttgtaattgttgctgtttgaagatatcagtacagctgttcacagaaatatattcccagcatgtcacttttccattaaagcactaagttttctttgaatgttccattgttccgataagtattttacttttttctcagtacatcagagagagcgtgatccccctacagctgtcacttccaaatgttcctgtagcataaatggtgttacagacactgaggtgcactcttggtttctgagcagagttgtcatactggtttcctggtctctagggcactggggatgtactttgaaatcaccgaacaggcttgcaattaagatcaataaggctgcagcaccatttcaatttactttccatcttacccagtagtttttgtgtttttaaattcgtttgggtggttatgtttgcatgcttaagcacacatttgaaaattaattatagctgtactacccgatgtttttccttggggatgatggccttgttcctttttaaattctgatgcttgaattctattttctagtgatttttcacatctccctttaagtttttgctgcagcaatttgagagagtacttttgattaaatgattctgatggtgggcaccaatctacaactatgtcattaactgaagatacatgttttaatcttgttgggaataagcttacccactttctccttggtaaagcgtttacttaacaaaataatacccgagaatgtaaggtctctaagtcattactaacaaagagcaaaaataatatctgcagtattgtttttcccattgattttaagtcagtttagagtacaaactgtatattagaatttgcctgtaaaatgaattctaaaaagcagatgtaaagtctctcctgaaaatgttggcatagtaaataaaaataaagttcataattataaaa

SEQ ID NO: 121306 - DNA, 2066 bp, Homo sapiens
  Payload ID: 3783
  Gene Symbol: CCSER2
  Gene Name: coiled-coil serine-rich protein 2
  Uniprot ID: Q9H7U1
  ENST ID: ENST00000359979
  CDS Start-End: 263-1966
ggcggagtccgggcgggcgccggccgagggagggggcgcggcggctttggagtccggcgctccctcaggccgcggacgcgatgctggttgctgcggctcgggcggcggggctggcggggatgtgacgggcggcccttcgtctcaccttccgtcctcgggcccgcaggtcgcagggcggcctgcagctgggccgcggccgaggaggcagcgcgacctccgcacgattctttcaacttttaagaacaaatgcaccttatagctcatggaagaaaaaacacaaatcaagacatttttgggttccaagttgccaaagtatggaacaaaatctgtaagaagtacattgcagccaatgccaaatgggacacctgttaatttattaggaacttccaagaatagtaatgtcaaaagttacatcaaaaataatggctctgattgtccatcatctcattcatttaattggaggaaagcaaataaatatcagctttgtgcacaaggtgtcgaagagcctaacaatactcaaaattcacatgataaaataattgatcctgaaaaacgtgttcctactcaaggaatgtttgataaaaatgggataaagggaggtttgaaaagtgtttctttattcacatcaaagttagcaaagccatccactatgtttgtgtcatctacagaggagttaaaccaaaagtctttttctggaccatctaatttgggtaaattcaccaaaggcacattattaggaaggacttcatattcttcgatcaatactccaaaatcacagttgaatggattttatggaaaccgatcagctggtagcatgcaaaggcctagagcgaactcctgtgccaccagaagcagttctggagaaagcttagctcaatccccagacagtagtaaatctattaattgtgaaaaaatggtaaggtcacaaagtttttcacattccattcagaattcattccttccaccttcatctataaccagatcacattcctttaatagagctgtggatcttacaaagccttatcagaaccaacagctatccattagagtgcctctacggtcaagtatgctaacaagaaattcccggcagccagaagtactcaatgggaatgaacatttggggtatggatttaataggccttatgctgctggtggaaagaagttggctttaccaaatggcccaggtgtaacttctactttaggttatagaatggttcatccctctctactgaaatctagccgatctccattttctgggactatgacagttgatggaaataaaaattcacctgctgacacatgtgtagaggaagatgctacagttttggctaaggacagagctgctaataaggaccaagaactgattgaaaatgaaagttatagaacaaaaaacaaccagaccatgaaacatgatgctaaaatgagatacctgagtgatgatgtggatgacatttccttgtcgtctttgtcatcttctgataagaatgatttaagtgaagactttagtgatgattttatagatatagaagactccaacagaactagaataactccagaggaaatgtctctcaaagaagagaaacatgaaaatgggccaccacaggatatgtttgattcccccaaggaaaatgaaaaagccttcagtaaaactgatgaatggatagatataagtgtctctgacaggagtgaatgtacaaaacatacttctgggaataatttggtttcaccagatacagactacagagctggttcttcgtttgaactctctccatctgatagctctgatggaacatacatgtgggatgaagaaggcttggaacccattggaaatgtccatccagttgggagctatgagtcctctgaaatgaacagcatagtatgtatggatttatatactcttggaatattttgtttaccctactatagagagacttgtgatatgattgattttgtaaaaaatttatgaattaactttactactttgagaaatggaaattcatatttgttaagagcctataaaatatctgactctaatatgaaataaagcatggagaatatatgacatt

SEQ ID NO: 121307 - DNA, 7657 bp, Homo sapiens
  Payload ID: 3783
  Gene Symbol: CCSER2
  Gene Name: coiled-coil serine-rich protein 2
  Uniprot ID: Q9H7U1
  ENST ID: ENST00000372088
  CDS Start-End: 260-3403
ggagtccgggcgggcgccggccgagggagggggcgcggcggctttggagtccggcgctccctcaggccgcggacgcgatgctggttgctgcggctcgggcggcggggctggcggggatgtgacgggcggcccttcgtctcaccttccgtcctcgggcccgcaggtcgcagggcggcctgcagctgggccgcggccgaggaggcagcgcgacctccgcacgattctttcaacttttaagaacaaatgcaccttatagctcatggaagaaaaaacacaaatcaagacatttttgggttccaagttgccaaagtatggaacaaaatctgtaagaagtacattgcagccaatgccaaatgggacacctgttaatttattaggaacttccaagaatagtaatgtcaaaagttacatcaaaaataatggctctgattgtccatcatctcattcatttaattggaggaaagcaaataaatatcagctttgtgcacaaggtgtcgaagagcctaacaatactcaaaattcacatgataaaataattgatcctgaaaaacgtgttcctactcaaggaatgtttgataaaaatgggataaagggaggtttgaaaagtgtttctttattcacatcaaagttagcaaagccatccactatgtttgtgtcatctacagaggagttaaaccaaaagtctttttctggaccatctaatttgggtaaattcaccaaaggcacattattaggaaggacttcatattcttcgatcaatactccaaaatcacagttgaatggattttatggaaaccgatcagctggtagcatgcaaaggcctagagcgaactcctgtgccaccagaagcagttctggagaaagcttagctcaatccccagacagtagtaaatctattaattgtgaaaaaatggtaaggtcacaaagtttttcacattccattcagaattcattccttccaccttcatctataaccagatcacattcctttaatagagctgtggatcttacaaagccttatcagaaccaacagctatccattagagtgcctctacggtcaagtatgctaacaagaaattcccggcagccagaagtactcaatgggaatgaacatttggggtatggatttaataggccttatgctgctggtggaaagaagttggctttaccaaatggcccaggtgtaacttctactttaggttatagaatggttcatccctctctactgaaatctagccgatctccattttctgggactatgacagttgatggaaataaaaattcacctgctgacacatgtgtagaggaagatgctacagttttggctaaggacagagctgctaataaggaccaagaactgattgaaaatgaaagttatagaacaaaaaacaaccagaccatgaaacatgatgctaaaatgagatacctgagtgatgatgtggatgacatttccttgtcgtctttgtcatcttctgataagaatgatttaagtgaagactttagtgatgattttatagatatagaagactccaacagaactagaataactccagaggaaatgtctctcaaagaagagaaacatgaaaatgggccaccacaggatatgtttgattcccccaaggaaaatgaaaaagccttcagtaaaactgatgaatggatagatataagtgtctctgacaggagtgaatgtacaaaacatacttctgggaataatttggtttcaccagatacagactacagagctggttcttcgtttgaactctctccatctgatagctctgatggaacatacatgtgggatgaagaaggcttggaacccattggaaatgtccatccagttgggagctatgagtcctctgaaatgaacagcatagatattttgaataatcttgaatcatgtgaccttgaggatgatgatcttatgcttgatgtggatctgcctgaggatgcacctcttgaaaatgtggagtgtgacaatatgaaccgctttgaccgaccagacagaaatgttcggcagcctcaggaaggtttttggaaaaggccaccccagaggtggagtggacaggagcattaccacctcagccaccctgaccactatcatcaccatggaaaaagtgacttgagcagaggctctccctatagagaatctcctttgggtcattttgaaagctatggagggatgccctttttccaggctcagaagatgtttgttgatgtaccagaaaatacagtgatactggatgagatgacccttcggcacatggttcaggattgcactgctgtaaaaactcagttactcaaactgaaacgtctcctgcatcagcatgatggaagtggttcattgcatgatattcaactgtcattgccatccagtccagaaccagaagatggtgataaagtatataagaatgaagatttattaaatgaaataaaacaacttaaagacgaaataaagaaaaaagatgaaaagatccaactattagaacttcagcttgcaactcagcatatctgccaccaaaaatgtaaagaggaaaaatgcacttatgctgataaatatacccaaacaccctggagacgaattcctcctcaagtactacagccttccagcagccttcccagacccacagatcacacccagggaaaactaataaagccacaacgtatcgaggcccgcagtgaatgctcaatccaagacatgcatcagggcggtgcacatccggaagaaagctttacacacgtcttgcaccaagaaagcaactatggtttggaagagcagcctttttcatcaggcccacaattaacaatggatgtggctaagagtacaccttctgaagcaaacttaaacattactgtaaatgctcaagagccttatcatttggcaaacaatcaaattagtgacatgcagtttatacccacttctcttcagacacctcccgagtcaagtacagtagaccaggctaagagagttggaagaaatcagtctccgccagtgggttatatgtctcagcccaagtccttgcagcttttaaagccatccatattgagttctttggtaccgcctccagtttctgaatcatctccaagtaggactcccacttgtaaaaagtcaccaataatcacaacatgtaattcagcaaaacttcagccaacatctagtcaaacaaatcttgcaaataatcagaatctgaaagcatctaagctccgccccccctcaggctctttcaaacaaaaacaaacaaacagcccccaactagagcctcaaagcttccaggccaagacaagcatcccaaggccactaacacaacgaaaagaaatcatgcagaatccaaatggcaatttgcattctggggattgtttggcctctaatcgatattctcgtcttcctaaaccaaagatacattaagtacatagccatcacctgccaatttgtttcttaaaaacaatctcttctgtaatagctttatgtgcagcttgcagcttgctactgtggtggaggttccattgaaagcctgcaaatcttaaattaaaatgtggaagcttctactagtttggctccttcattttatatcctggttgaagtacatgccatttgagcataattatctcaggtaaacacgaaagtttgcttacccatttcagaggcctgccaaaggcccaaatcatgttatccatccctctccacgtcagaaaattcataatattttactgagcaggcaagaagtgtgctttgctggtttagtcctattaaggtctgtatttattgtggttgtcagaacctcaccccttttcacttgtctctcctgtgaatatggctactattttaactaaagatatggtgataatggaagatggtagtctgtaagcagagttctggccagtgttttgtatatttaaaaggtctatgcaaaagctttgtgatgaataaaggagattaggcttttaatggaaagtctatgtaagttttatttttccttgccagggtcagtcagctaatgttactgttgattcatttcccaaattccccagactgaaagtgtttcttattacatataaatcagttatatattcctttacatcttgttttacaaacacatgtgcatgcacacacacatatacacacacataccatttatgtttgtatttgttactgggtaaattttggagcgcttgagatacaccttgaaacctgtacctaaagatgtattcatttgtaacatatgttggtgctagagttttgctggtaattcaggcttgaacccttaggcttgtggatccatgatagccattttaaggttccacagcattatgtctttaattgtaatatttatatttattgattttctgctaatatctgaagactgaaataatgaacttgaaacatttgcacaaaactttgatggggtataaatataccatatatagggattgtaaactattttctatagcaaaacaagttaaaatattttgagaaaaataacaaatttaaataagactatcttgagaaagctggagttcataatattctccccctcccccatctccagtctcctaggtttcccttttctgtgttttttgtttttttctgtttgttttttgagacagagtcttgctccattgcccaggctggattacagtggcgcaatctcggctcactgcaacttctgcctcccgggttcaagcgattctcctgcctcagcctcctgagtagctgggactacaggcatgtgccaccatgcctggctaatttttttgtatttttagtagagatgagatttcaccttgttggtcaggctggtctcgaactcctgacctcaagtgatccacccacctcgtctatggtgtatttttgaaagacaattttttaaaggtagatttgggaaaaaaatagaattgaagatgggaaattttgttttattaaaaaggtgctagaagatgtttcaaagacaatattcttattttaatacgctgtagaaggtaggtgtggaacctccatgctaccatgtgcacaaacctaattatgctttgggtcacttgtcagttcagtaaatctgccttcctcttctcccaaatcatgtcatctttaggttgttcacctgcagctgctttaaatgaattagtatctttcagatagataaccttacaaggagaatgtttgttttgagcagctgaccaaaaatatatcaaacaggattatggccaaaaagtcactcaaatttctagagattcctttaaaagatgtatgttgatgaaattgcccctttataagaaaaacaacagcaagtcttttagtagaaatttgaaagaagtgtttgctaccattttgacccattattcccttacctatcagatgaatttgccattcactggatagaaaccattcttggatttggtaagaggtgagcaagacaaatcttgtaccatactcttatgtaccagcacttctgatggagaagcagtgaagttcagaacgttcttcacatagtccagatactgttagagtcaggcaaatcagcaaagcactttgttatggagatgacccatgatggctgcagttgtaagtgggcatacatgttctatcattttgaaggagaaagaaaaccgttctcacatgttgcaaatatgtgaatcatactatattcccctaaagtaaaaccagtgacttagtggtttttggtttatttagaagttggtttagacccttatgaaacattatttacgagttggccttatccttaagggaaaagttctaaatttttaaatttatttttaattccctagtctgagggaaatgtctttattgtccattacataaaaatgttgactccagtaatttatttttctctattttttcctccatgtatttactccatttttctctattttttccttccctgatggatttgcagaaatgttaaccaattagctcaacttttctctacctttgttgagtcttaatcttttagaagataggcttatcgtatatttatgaagcataatatattaaaagaaaacaaatctaggatgcttgcatgacataaagtatttgcctgcagttttcattaaaaactgcaagaatatcatgcttgtctgcttcttagtaaatgttaagtctgaaatggaagtgaggatgtaactctactgaataatcaaagatcatcttagatttggcttgatctgtgtttattgcttctattaatgtaaatcaactctgtgccaaatcctcctccacaaaccatttattgtcttagttctagtggtatcaatgaagatagttacagtatatgaattctaagtcctgaggaagaaattttatggggtttgttaagtttcacattcgtgaaagaggaaattagtagagtattcagactttgatatttggctgttaatgggatgcatatcaaatttttaaaagaaggcttggcctaaggagtttattggtacaggtgcagatgattttaaggcattaaaggattatagagttatgtcatttagactgtttctaataactgagaccatctaacatttttcttttggagtctcatttttatttgtgcaatattttcaggcatataggctactgttcattgtatttatatatatattagaatttactaagtactttaacaagtaaaaatctgaatatgaaagaaaatatcagatttgcactttaaatgagcttaattgcttgaagttgtgcctgaaatatcgaattgcctcctattgggtgtggctttgttgaaataaatttgtaattgttgctgtttgaagatatcagtacagctgttcacagaaatatattcccagcatgtcacttttccattaaagcactaagttttctttgaatgttccattgttccgataagtattttacttttttctcagtacatcagagagagcgtgatccccctacagctgtcacttccaaatgttcctgtagcataaatggtgttacagacactgaggtgcactcttggtttctgagcagagttgtcatactggtttcctggtctctagggcactggggatgtactttgaaatcaccgaacaggcttgcaattaagatcaataaggctgcagcaccatttcaatttactttccatcttacccagtagtttttgtgtttttaaattcgtttgggtggttatgtttgcatgcttaagcacacatttgaaaattaattatagctgtactacccgatgtttttccttggggatgatggccttgttcctttttaaattctgatgcttgaattctattttctagtgatttttcacatctccctttaagtttttgctgcagcaatttgagagagtacttttgattaaatgattctgatggtgggcaccaatctacaactatgtcattaactgaagatacatgttttaatcttgttgggaataagcttacccactttctccttggtaaagcgtttacttaacaaaataatacccgagaatgtaaggtctctaagtcattactaacaaagagcaaaaataatatctgcagtattgtttttcccattgattttaagtcagtttagagtacaaactgtatattagaatttgcctgtaaaatgaattctaaaaagcagatgtaaagtctctcctgaaaatgttggcatagtaaataaaaataaagttcataattataaaagttc

SEQ ID NO: 121308 - DNA, 5888 bp, Homo sapiens
  Payload ID: 3783
  Gene Symbol: CCSER2
  Gene Name: coiled-coil serine-rich protein 2
  Uniprot ID: Q9H7U1
  ENST ID: ENST00000543283
  CDS Start-End: 125-910
agtgccttgggtacaactatgtctgagtaggcagccggtaacacaatgtctcccttgtgcaaagtaactctcttagtgagtgctcagatatgtgaggaaaaagtatttggtggagtgtgacaatatgaaccgctttgaccgaccagacagaaatgttcggcagcctcaggaaggtttttggaaaaggccaccccagaggtggagtggacaggagcattaccacctcagccaccctgaccactatcatcaccatggaaaaagtgacttgagcagaggctctccctatagagaatctcctttgggtcattttgaaagctatggagggatgccctttttccaggctcagaagatgtttgttgatgtaccagaaaatacagtgatactggatgagatgacccttcggcacatggttcaggattgcactgctgtaaaaactcagttactcaaactgaaacgtctcctgcatcagcatgatggaagtggttcattgcatgatattcaactgtcattgccatccagtccagaaccagaagatggtgataaagtatataagaatgaagatttattaaatgaaataaaacaacttaaagacgaaataaagaaaaaagatgaaaagatccaactattagaacttcagcttgcaactcagcatatctgccaccaaaaatgtaaagaggaaaaatgcacttatgctgataaatatacccaaacaccctggagacgaattcctggtgggtattctgctccctccttctctccttggcagggctccttccaggggatcccacggactgttccaccgcaccgcagacagacctcaagtactacagccttccagcagccttcccagacccacagatcacacccagggaaaactaataaagccacaacgtatcgaggcccgcagtgaatgctcaatccaagacatgcatcagggcggtgcacatccggaagaaagctttacacacgtcttgcaccaagaaagcaactatggtttggaagagcagcctttttcatcaggcccacaattaacaatggatgtggctaagagtacaccttctgaagcaaacttaaacattactgtaaatgctcaagagccttatcatttggcaaacaatcaaattagtgacatgcagtttatacccacttctcttcagacacctcccgagtcaagtacagtagaccaggctaagagagttggaagaaatcagtctccgccagtgggttatatgtctcagcccaagtccttgcagcttttaaagccatccatattgagttctttggtaccgcctccagtttctgaatcatctccaagtaggactcccacttgtaaaaagtcaccaataatcacaacatgtaattcagcaaaacttcagccaacatctagtcaaacaaatcttgcaaataatcagaatctgaaagcatctaagctccgccccccctcaggctctttcaaacaaaaacaaacaaacagcccccaactagagcctcaaagcttccaggccaagacaagcatcccaaggccactaacacaacgaaaagaaatcatgcagaatccaaatggcaatttgcattctggggattgtttggcctctaatcgatattctcgtcttcctaaaccaaagatacattaagtacatagccatcacctgccaatttgtttcttaaaaacaatctcttctgtaatagctttatgtgcagcttgcagcttgctactgtggtggaggttccattgaaagcctgcaaatcttaaattaaaatgtggaagcttctactagtttggctccttcattttatatcctggttgaagtacatgccatttgagcataattatctcaggtaaacacgaaagtttgcttacccatttcagaggcctgccaaaggcccaaatcatgttatccatccctctccacgtcagaaaattcataatattttactgagcaggcaagaagtgtgctttgctggtttagtcctattaaggtctgtatttattgtggttgtcagaacctcaccccttttcacttgtctctcctgtgaatatggctactattttaactaaagatatggtgataatggaagatggtagtctgtaagcagagttctggccagtgttttgtatatttaaaaggtctatgcaaaagctttgtgatgaataaaggagattaggcttttaatggaaagtctatgtaagttttatttttccttgccagggtcagtcagctaatgttactgttgattcatttcccaaattccccagactgaaagtgtttcttattacatataaatcagttatatattcctttacatcttgttttacaaacacatgtgcatgcacacacacatatacacacacataccatttatgtttgtatttgttactgggtaaattttggagcgcttgagatacaccttgaaacctgtacctaaagatgtattcatttgtaacatatgttggtgctagagttttgctggtaattcaggcttgaacccttaggcttgtggatccatgatagccattttaaggttccacagcattatgtctttaattgtaatatttatatttattgattttctgctaatatctgaagactgaaataatgaacttgaaacatttgcacaaaactttgatggggtataaatataccatatatagggattgtaaactattttctatagcaaaacaagttaaaatattttgagaaaaataacaaatttaaataagactatcttgagaaagctggagttcataatattctccccctcccccatctccagtctcctaggtttcccttttctgtgttttttgtttttttctgtttgttttttgagacagagtcttgctccattgcccaggctggattacagtggcgcaatctcggctcactgcaacttctgcctcccgggttcaagcgattctcctgcctcagcctcctgagtagctgggactacaggcatgtgccaccatgcctggctaatttttttgtatttttagtagagatgagatttcaccttgttggtcaggctggtctcgaactcctgacctcaagtgatccacccacctcgtctatggtgtatttttgaaagacaattttttaaaggtagatttgggaaaaaaatagaattgaagatgggaaattttgttttattaaaaaggtgctagaagatgtttcaaagacaatattcttattttaatacgctgtagaaggtaggtgtggaacctccatgctaccatgtgcacaaacctaattatgctttgggtcacttgtcagttcagtaaatctgccttcctcttctcccaaatcatgtcatctttaggttgttcacctgcagctgctttaaatgaattagtatctttcagatagataaccttacaaggagaatgtttgttttgagcagctgaccaaaaatatatcaaacaggattatggccaaaaagtcactcaaatttctagagattcctttaaaagatgtatgttgatgaaattgcccctttataagaaaaacaacagcaagtcttttagtagaaatttgaaagaagtgtttgctaccattttgacccattattcccttacctatcagatgaatttgccattcactggatagaaaccattcttggatttggtaagaggtgagcaagacaaatcttgtaccatactcttatgtaccagcacttctgatggagaagcagtgaagttcagaacgttcttcacatagtccagatactgttagagtcaggcaaatcagcaaagcactttgttatggagatgacccatgatggctgcagttgtaagtgggcatacatgttctatcattttgaaggagaaagaaaaccgttctcacatgttgcaaatatgtgaatcatactatattcccctaaagtaaaaccagtgacttagtggtttttggtttatttagaagttggtttagacccttatgaaacattatttacgagttggccttatccttaagggaaaagttctaaatttttaaatttatttttaattccctagtctgagggaaatgtctttattgtccattacataaaaatgttgactccagtaatttatttttctctattttttcctccatgtatttactccatttttctctattttttccttccctgatggatttgcagaaatgttaaccaattagctcaacttttctctacctttgttgagtcttaatcttttagaagataggcttatcgtatatttatgaagcataatatattaaaagaaaacaaatctaggatgcttgcatgacataaagtatttgcctgcagttttcattaaaaactgcaagaatatcatgcttgtctgcttcttagtaaatgttaagtctgaaatggaagtgaggatgtaactctactgaataatcaaagatcatcttagatttggcttgatctgtgtttattgcttctattaatgtaaatcaactctgtgccaaatcctcctccacaaaccatttattgtcttagttctagtggtatcaatgaagatagttacagtatatgaattctaagtcctgaggaagaaattttatggggtttgttaagtttcacattcgtgaaagaggaaattagtagagtattcagactttgatatttggctgttaatgggatgcatatcaaatttttaaaagaaggcttggcctaaggagtttattggtacaggtgcagatgattttaaggcattaaaggattatagagttatgtcatttagactgtttctaataactgagaccatctaacatttttcttttggagtctcatttttatttgtgcaatattttcaggcatataggctactgttcattgtatttatatatatattagaatttactaagtactttaacaagtaaaaatctgaatatgaaagaaaatatcagatttgcactttaaatgagcttaattgcttgaagttgtgcctgaaatatcgaattgcctcctattgggtgtggctttgttgaaataaatttgtaattgttgctgtttgaagatatcagtacagctgttcacagaaatatattcccagcatgtcacttttccattaaagcactaagttttctttgaatgttccattgttccgataagtattttacttttttctcagtacatcagagagagcgtgatccccctacagctgtcacttccaaatgttcctgtagcataaatggtgttacagacactgaggtgcactcttggtttctgagcagagttgtcatactggtttcctggtctctagggcactggggatgtactttgaaatcaccgaacaggcttgcaattaagatcaataaggctgcagcaccatttcaatttactttccatcttacccagtagtttttgtgtttttaaattcgtttgggtggttatgtttgcatgcttaagcacacatttgaaaattaattatagctgtactacccgatgtttttccttggggatgatggccttgttcctttttaaattctgatgcttgaattctattttctagtgatttttcacatctccctttaagtttttgctgcagcaatttgagagagtacttttgattaaatgattctgatggtgggcaccaatctacaactatgtcattaactgaagatacatgttttaatcttgttgggaataagcttacccactttctccttggtaaagcgtttacttaacaaaataatacccgagaatgtaaggtctctaagtcattactaacaaagagcaaaaataatatctgcagtattgtttttcccattgattttaagtcagtttagagtacaaactgtatattagaatttgcctgtaaaatgaattctaaaaagcagatgtaaagtctctcctgaaaatgttggcatagtaaataaaaataaagttcataattataaaagttc

SEQ ID NO: 121309 - DNA, 835 bp, Homo sapiens
  Payload ID: 3784
  Gene Symbol: CHCHD1
  Gene Name: coiled-coil-helix-coiled-coil-helix domain containing 1
  Uniprot ID: Q96BP2
  ENST ID: ENST00000372833
  CDS Start-End: 14-370
agcttggtgcgctatggcgacacccagcctgcggggtcgtctggcgcggtttgggaacccgcggaagcctgtgctgaagcccaataaacctctcattctagctaaccgcgtcggggagcggcgccgggagaagggcgaggcgacttgcatcacggagatgtcggtgatgatggcttgctggaagcagaatgaattccgcgacgatgcgtgcagaaaagagatccagggcttcctcgattgtgccgcgagggctcaggaagcccgaaagatgagatcaatacaggaaaccctgggagagtctgggagtttacttccaaataaattgaataagttgttacagaggtttcctaacaaaccttacctcagctgaaaatggacaagtattttcaatgactgaaatatagcttctgacaactatgcagaggcattttagagacattggcattgccatgccctctttggagggtagaagaggcaaaacacttttttcaccctttggaatcatagtatgggtagaagttatgatttatcttgaaataaaatcctctgaacagaacttggccttttgttgtgaattaggtactctcttcattcttgagcctcccctagaccctggaaattctttccttcctgatttgccctaggagcaggacaaataccgttgtattgtctttccctgcatttgaagtcttttacaccatttagtgcccttgcttttggatgcaataaggaagttgaagttgccttcgtctgtaaatacttagtgattgcctattttgtgcgtagtccctgcaaggtgctctctgaataataaagttaacaaactggtgaccta

SEQ ID NO: 121310 - DNA, 1202 bp, Homo sapiens
  Payload ID: 3784
  Gene Symbol: CHCHD1
  Gene Name: coiled-coil-helix-coiled-coil-helix domain containing 1
  ENST ID: ENST00000372837
  CDS Start-End: 30-323
cgcaaagcctgccgggagcttggtgcgctatggcgacacccagcctgcggggtcgtctggcgcggtttgggaacccgcggaagcctgtgctgaagcccaataaacctctcattctagctaaccgcgtcggggagcggcgccgggagaagggcgaggcgacttgcatcacggagatgtcggtgatgatggcttgctggaagcagaatgaattccgcgacgatgcgtgcagaaaagagatccagggcttcctcgattgtgccgcgagggctcaggtgaccgatggctcctggggtgctttctcaggaaaagaatgggggagatagaagtaatgattctccctgccttttgctaggaaaggccctttcattcatttgggaggtatattattcacgccaaagtgggaaaggttacagttttgaaggctgtgtgatcttgacggatttattcattgctctgaactttcgagttactgtacgtaaaatgaggctaaccaataccaccttaaagaatgttgtgagtgtcagatgaagtaatgaatgggaaaatcattttgaaaaatgtaaattgctgctcaagtagacattattgtgtgaaatagaactaaagagactaaaactaaataatgacaatagtttggtttcctgtctaggcttaattgttagctgagatagtagcttctgaacatagtctcatttgtaggtcccaacgcccttttgttgaaaagaggctgacatagatctctccaggctggttaacatcttcatgtgctttagggcattgtgagaactatgggcctacatcaggacaaacttgattgattgattggttttttgggtcagatcttaaaagtctggactagacaaactgtagagctgtcattcttgtatttgttttgtgttttcaggaagcccgaaagatgagatcaatacaggaaaccctgggagagtctgggagtttacttccaaataaattgaataagttgttacagaggtttcctaacaaaccttacctcagctgaaaatggacaagtattttcaatgactgaaatatagcttctgacaactatgcagaggcattttagagacattggcattgccatgccctctttggagggtagaagaggcaaaacacttttttcaccctttggaatcatagtatgggtagaagttatgatttatcttgaaataaaatcctctgaacag

SEQ ID NO: 121311 - DNA, 691 bp, Homo sapiens
  Payload ID: 3785
  Gene Symbol: CHCHD10
  Gene Name: coiled-coil-helix-coiled-coil-helix domain containing 10
  ENST ID: ENST00000401675
  CDS Start-End: 69-518
ggcatttgtccccgcgacagcaccgctgccgccgtctctaaggtcgcccgggtcccaccgccgccaccatgcctcggggaagccgcagcgcggcctcccggccagccagccgcccagccgcgccctctgcccacccgcccgcgcacccaccgccctcggcagccgccccagcccccgccccttcgggccagccggggctcatggctcagatggcgaccacggccgcaggggtagccgtgggctcggctgtgggacacgtcatgggcagcgccctgaccggagccttcagcggggggagctcggagccctcccagcctgctgtccagcagcctcttgcactgtacccccaggcccccacccccgctgccccccagcccctgcagatggggccctgcgcctacgagatcaggcagttcctggactgttccaccactcagagtgacctgtccctgtgtgagggcttcagcgaggccctgaagcagtgcaagtactaccatggtctgagctccctgccctgaagaggtcggtgcagactcgggggccagtcctgcacccacctctacccctcgccgacagccagaccacaacaccagattgtacccagatagctgggattggaagtgaggaggtttctcaccccacagataacccaagacacaaatgtgcaattaaaagtttattttagaccaca

SEQ ID NO: 121312 - DNA, 1171 bp, Homo sapiens
  Payload ID: 3785
  Gene Symbol: CHCHD10
  Gene Name: coiled-coil-helix-coiled-coil-helix domain containing 10
  Uniprot ID: Q8WYQ3
  ENST ID: ENST00000484558
  CDS Start-End: 570-998
cagggccgcgcttcacttccctaggccaccggagactcccaggccacgcggtggtcagcagaccctgtctggagggaggggacagacagccgagtccgggagggggcagagagcggagtccagcctggagcctcgcgtccccttcccagctggccccatcccgtcgcctccccgtctcctctcccctccagggctcgcaacaacccccaactccgctccctgccctctgcggtggtcctaacagaaggcactgtcgccctccttaagccctcggcgctttgcgacactggcccctgtccccagaacccgcacagcctgccaggcgcagggagggagcagggtcccatttccagccgagacccggagctgctggaagggagatgtccggaggacgggagaagggggatagggttgggggcagtgccgcctcccgctgggggcgtgttcctgaggccccgcccggggccccgccttttttgcgccggctgtgacaagcgctgcggcatttgtccccgcgacagcaccgctgccgccgtctctaaggtcgcccgggtcccaccgccgccaccatgcctcggggaagccgcagcgcggcctcccggccagccagccgcccagccgcgccctctgcccacccgcccgcgcacccaccgccctcggcagccgccccagcccccgccccttcgggccagccggggctcatggctcagatggcgaccacggccgcaggggtagccgtgggctcggctgtgggacacgtcatgggcagcgccctgaccggagccttcagcggggggagctcggagccctcccagcctgctgtccagcaggcccccacccccgctgccccccagcccctgcagatggggccctgcgcctacgagatcaggcagttcctggactgttccaccactcagagtgacctgtccctgtgtgagggcttcagcgaggccctgaagcagtgcaagtactaccatggtctgagctccctgccctgaagaggtcggtgcagactcgggggccagtcctgcacccacctctacccctcgccgacagccagaccacaacaccagattgtacccagatagctgggattggaagtgaggaggtttctcaccccacagataacccaagacacaaatgtgcaattaaaagtttattttagaccaca

SEQ ID NO: 121313 - DNA, 494 bp, Homo sapiens
  Payload ID: 3785
  Gene Symbol: CHCHD10
  Gene Name: coiled-coil-helix-coiled-coil-helix domain containing 10
  ENST ID: ENST00000517886
  CDS Start-End: 47-346
ccgctgccgccgtctctaaggtcgcccgggtcccaccgccgccaccatgcctcggggaagccgcagcgcggcctcccggccagccagccgccccagcccccgccccttcgggccagccggggctcatggctcagatggcgaccacggccgcaggggtagccgtgggctcggctgtgggacacgtcatgggcagcgccctgaccggagccttcagcggggggagctcggagccctcccagcctgctgtccagcaggcccccacccccgctgccccccagcccctgcagatggggccctgcgcctacgagatcaggcagttcctggactgttccaccactcagagtgacctgtccctgtgtgagggcttcagcgaggccctgaagcagtgcaagtactaccatggtctgagctccctgccctgaagaggtcggtgcagactcgggggccagtcctgcacccacctctacccctcgccgacagccagaccacaacac

SEQ ID NO: 121314 - DNA, 384 bp, Homo sapiens
  Payload ID: 3785
  Gene Symbol: CHCHD10
  Gene Name: coiled-coil-helix-coiled-coil-helix domain containing 10
  ENST ID: ENST00000520222
  CDS Start-End: 3-170
ccatgcctcggggaagccgcagcgcggcctcccggccagccaggcccccacccccgctgccccccagcccctgcagatggggccctgcgcctacgagatcaggcagttcctggactgttccaccactcagagtgacctgtccctgtgtgagggcttcagcgaggccctgaagcagtgcaagtactaccatggtctgagctccctgccctgaagaggtcggtgcagactcgggggccagtcctgcacccacctctacccctcgccgacagccagaccacaacaccagattgtacccagatagctgggattggaagtgaggaggtttctcaccccacagataacccaagacacaaatgtgcaattaaaagtttattttagaccaca

SEQ ID NO: 121315 - DNA, 691 bp, Homo sapiens; identical to SEQ ID NO: 121311
  Payload ID: 3785
  Gene Symbol: CHCHD10
  Gene Name: coiled-coil-helix-coiled-coil-helix domain containing 10
  ENST ID: ENST00000620558
  CDS Start-End: 69-518

SEQ ID NO: 121316 - DNA, 384 bp, Homo sapiens; identical to SEQ ID NO: 121314
  Payload ID: 3785
  Gene Symbol: CHCHD10
  Gene Name: coiled-coil-helix-coiled-coil-helix domain containing 10
  ENST ID: ENST00000631145
  CDS Start-End: 3-170

SEQ ID NO: 121317 - DNA, 494 bp, Homo sapiens; identical to SEQ ID NO: 121313
  Payload ID: 3785
  Gene Symbol: CHCHD10
  Gene Name: coiled-coil-helix-coiled-coil-helix domain containing 10
  ENST ID: ENST00000626041
  CDS Start-End: 47-346

SEQ ID NO: 121318 - DNA, 1171 bp, Homo sapiens; identical to SEQ ID NO: 121312
  Payload ID: 3785
  Gene Symbol: CHCHD10
  Gene Name: coiled-coil-helix-coiled-coil-helix domain containing 10
  Uniprot ID: Q8WYQ3
  ENST ID: ENST00000629095
  CDS Start-End: 570-998

SEQ ID NO: 121319 - DNA, 901 bp, Homo sapiens
  Payload ID: 3786
  Gene Symbol: CHCHD2
  Gene Name: coiled-coil-helix-coiled-coil-helix domain containing 2
  Uniprot ID: Q9Y6H1
  ENST ID: ENST00000395422
  CDS Start-End: 164-619
cttcaggcctgcggagacgacggagaacggaagttctctgcctgtgtgctggttggttgcgcgttgaggccagccccgcctcccatcttccggtctcctcagaagtcgcttagctcttcggtggttgtcccacgtccggaggcctagccgtcgcttacctaggatgccgcgtggaagccgaagccgcacctcccgcatggcccctccggccagccgggcccctcagatgagagctgcacccaggccagcaccagtcgctcagccaccagcagcggcacccccatctgcagttggctcttctgctgctgcgccccggcagccaggtctgatggcccagatggcaaccactgcagctggcgtggctgtgggctctgctgtggggcacacattgggtcacgccattactgggggcttcagtggaggaagtaatgctgagcctgcgaggcctgacatcacttaccaggagcctcagggaacccagccagcacagcagcagcagccttgcctctatgagatcaaacagtttctggagtgtgcccagaaccagggtgacatcaagctctgtgagggtttcaatgaggtgctgaaacagtgccgacttgcaaacggattggcctaatgaagaagttcaacctggagagatggaaaatcagctctcataactaagttaatttagtataaaaatagaattgatagtgagggtataaagtgtaaccatcagttaaacctctcctgtcattcctggcttccttgcttcagaattgaaatggaagtgggggtgtccctactctgtagaatctgggactgggcaaatgtttgtgtggcctccttaaactagctgttatgttatgattttattctttgtgagttaattagaataaagtcattttcttccaaggta

SEQ ID NO: 121320 - DNA, 1598 bp, Homo sapiens
  Payload ID: 3787
  Gene Symbol: CHCHD3
  Gene Name: coiled-coil-helix-coiled-coil-helix domain containing 3
  Uniprot ID: Q9NX63
  ENST ID: ENST00000262570
  CDS Start-End: 146-829
cgccttctccttgcttctgggggtcgtggccttgctcccgctgtgcgggaaaagaatccaggcccttccacgcgcgtgtgggtgcgggggccccgaagtgctcgtggttccccgctaggtctccgctggggcaggaaccggaatcatgggtgggaccaccagcacccgccgggtcaccttcgaggcggacgagaatgagaacatcaccgtggtgaagggcatccggctttcggaaaatgtgattgatcgaatgaaggaatcctctccatctggttcgaagtctcagcggtattctggtgcttatggtgcctcagtttctgatgaagaattgaaaagaagagtagctgaggagctggcattggagcaagccaagaaagaatccgaagatcagaaacgactaaagcaagccaaagagctggaccgagagagggctgctgccaatgagcagttaaccagagccatccttcgggagaggatatgtagcgaggaggaacgcgctaaggcaaagcacctggctaggcagctggaagagaaagaccgagtgctaaagaagcaggatgcattctacaaagaacagctggctagactggaggagaggagctcagagttctacagagtcaccactgaacaatatcagaaagctgctgaagaggtggaagcaaagttcaagcgatatgagtctcatccagtctgtgctgatctgcaggccaaaattcttcagtgttaccgtgagaacacccaccagaccctcaaatgctccgctctggccacccagtatatgcactgtgtcaatcatgccaaacagagcatgcttgagaagggaggataaaaactttcagaatgagcaaaacaccatcaacgttaattccagagatggaacattttttttcctagtgagaaaacaacccatttgaagagaagaccactaatgagaagaccactaaagagagacatcaagaatggattcagcagaatcatttcacgttttgaacagcagcagtttgaagggccaaagccttgatcagggatcagtcattaaaggacactcttgagtattagtaaaccctcttatgatgattaaaagagaagggcagccctctccaccttttggtactttctattcaacttgcactgaccataaaatgtttctcttctgaacaagccccatcatttggtgaacctccaccctaacaaagtaggatggggttgggggctaaattaattggagtggggcgaggagagagccagaaaacatagatccgagggcagcagtgctgggtggagagagccagaaaacagatctggaggcagcagtgctggatggaattgtctaggctgtggcatgttggttttgtctttcttttctcctttgattatgtaagagctatttcattataacttattatggtgattatacaggcaagaagacaaaaaggagagaaaatgtacctcttctactggaataatgtttatgattacaagtgagataaggtatttttatcaatatgaaggcaaccttggctgataaaacctctatagtgaatactcacatctttacttcactcactatcaataataaatatattttctgacaaaga

SEQ ID NO: 121321 - DNA, 1570 bp, Homo sapiens
  Payload ID: 3787
  Gene Symbol: CHCHD3
  Gene Name: coiled-coil-helix-coiled-coil-helix domain containing 3
  ENST ID: ENST00000448878
  CDS Start-End: 118-816
gccttgctcccgctgtgcgggaaaagaatccaggcccttccacgcgcgtgtgggtgcgggggccccgaagtgctcgtggttccccgctaggtctccgctggggcaggaaccggaatcatgggtgggaccaccagcacccgccgggtcaccttcgaggcggacgagaatgagaacatcaccgtggtgaagggcatccggctttcggaaaatgtgattgatcgaatgaaggaatcctctccatctggttcgaagtctcagcggtattctggtgcttatggtgcctcagtttctgatgaagaattgaaaagaagagtagctgaggagctggcattggagcaagccaagaaagaatccgaagatcagaaacgactaaagcaagccaaagagctggaccgagagagggctgctgccaatgagcagttaaccagagccatccttcgggagaggatatgtagcgaggaggaacgcgctaaggcaaagcacctggtgagtattaaaaatgctaggcagctggaagagaaagaccgagtgctaaagaagcaggatgcattctacaaagaacagctggctagactggaggagaggagctcagagttctacagagtcaccactgaacaatatcagaaagctgctgaagaggtggaagcaaagttcaagcgatatgagtctcatccagtctgtgctgatctgcaggccaaaattcttcagtgttaccgtgagaacacccaccagaccctcaaatgctccgctctggccacccagtatatgcactgtgtcaatcatgccaaacagagcatgcttgagaagggaggataaaaactttcagaatgagcaaaacaccatcaacgttaattccagagatggaacattttttttcctagtgagaaaacaacccatttgaagagaagaccactaatgagaagaccactaaagagagacatcaagaatggattcagcagaatcatttcacgttttgaacagcagcagtttgaagggccaaagccttgatcagggatcagtcattaaaggacactcttgagtattagtaaaccctcttatgatgattaaaagagaagggcagccctctccaccttttggtactttctattcaacttgcactgaccataaaatgtttctcttctgaacaagccccatcatttggtgaacctccaccctaacaaagtaggatggggttgggggctaaattaattggagtggggcgaggagagagccagaaaacatagatccgagggcagcagtgctgggtggagagagccagaaaacagatctggaggcagcagtgctggatggaattgtctaggctgtggcatgttggttttgtctttcttttctcctttgattatgtaagagctatttcattataacttattatggtgattatacaggcaagaagacaaaaaggagagaaaatgtacctcttctactggaataatgtttatgattacaagtgagataaggtatttttatcaatatgaaggcaaccttggctgataaaacctctatagtgaatactcacatctttacttcactcactatcaataataaatat

SEQ ID NO: 121322 - DNA, 559 bp, Homo sapiens
  Payload ID: 3787
  Gene Symbol: CHCHD3
  Gene Name: coiled-coil-helix-coiled-coil-helix domain containing 3
  ENST ID: ENST00000457942
  CDS Start-End: 152-343
gaccggcgccttctccttgcttctgggggtcgtggccttgctcccgctgtgcgggaaaagaatccaggcccttccacgcgcgtgtgggtgcgggggccccgaagtgctcgtggttccccgctaggtctccgctggggcaggaaccggaatcatgggtgggaccaccagcacccgccgggtcaccttcgaggcggacgagaatgagaacatcaccgtggtgaagggcatccggctttcggaaaatgtgattgatcgaatgaaggaatcctctccatctggttcgaagtctcagcggtattctggtgcttatggtgcctcagttcccctaaggacccctacctgataacacttttaagactggatccagcctttctttgcggaatcaccatggcggctgggaccctgtacacgtatcctgaaaactggagggccttcaaggctctcatcgctgctcagtacagcggggctcagatccgcgtgctctccgcaccaccccacttccattttggccaaaccaaccgcacctctgaatttcttcgcaaatttcctgccggcaagg

SEQ ID NO: 121323 - DNA, 1310 bp, Homo sapiens
  Payload ID: 3787
  Gene Symbol: CHCHD3
  Gene Name: coiled-coil-helix-coiled-coil-helix domain containing 3
  ENST ID: ENST00000423635
  CDS Start-End: 134-859
gcttctgggggtcgtggccttgctcccgctgtgcgggaaaagaatccaggcccttccacgcgcgtgtgggtgcgggggccccgaagtgctcgtggttccccgctaggtctccgctggggcaggaaccggaatcatgggtgggaccaccagcacccgccgggtcaccttcgaggcggacgagaatgagaacatcaccgtggtgaagggcatccggctttcggaaaatgtgattgatcgaatgaaggaatcctctccatctggttcgaagtctcagcggtattctggtgcttatggtgcctcagtttctgatgaagaattgaaaagaagagtagctgaggagctggcattggagcaagccaagaaagaatccgaagatcagaaacgagaagaaacttcagaaacagcattaagaaagttttgtgtgcagtcttttagcagcaactttttggagtcacagaacatgtatacgttattactaaagcaagccaaagagctggaccgagagagggctgctgccaatgagcagttaaccagagccatccttcgggagaggatatgtagcgaggaggaacgcgctaaggcaaagcacctggctaggcagctggaagagaaagaccgagtgctaaagaagcaggatgcattctacaaagaacagctggctagactggaggagaggagctcagagttctacagagtcaccactgaacaatatcagaaagctgctgaagaggtggaagcaaagttcaagtttggtgaaatgaaatatcacaaaacaggactctttattttgttacctcttgtcccagtatggctcctagtaggagaactcgttacttctccctcatttcaggcaacctgagcaccagtgaaactgtgactggcatttgcagggacctaaaaggcttactcagtgccagacactgtgtggagagcttaaacgttatcttactaatcttcacaacaatgttaaacagtaggaaatgaggaaaaatttgcatcttagagagatcaagaaacttgcccaagcttccactgcaagcgatatgagtctcatccagtctgtgctgatctgcaggccaaaattcttcagtgttaccgtgagaacacccaccagaccctcaaatgctccgctctggccacccagtatatgcactgtgtcaatcatgccaaacagagcatgcttgagaagggaggataaaaactttcagaatgagcaaaacaccatcaacgttaattccagagatggaacattttttttcctagtgagaaaacaacccatttgaagagaagaccactaatgagaagaccac

SEQ ID NO: 121324 - DNA, 1603 bp, Homo sapiens
  Payload ID: 3788
  Gene Symbol: CHCHD4
  Gene Name: coiled-coil-helix-coiled-coil-helix domain containing 4
  Uniprot ID: Q8N4Q1
  ENST ID: ENST00000295767
  CDS Start-End: 326-793
agtttccggctgaggttggcctggccgcggttgcgagggcgccgaggcaggcgcgcggcgggcaggcctgggagggggcgggtccgcgcgggcttcggaggagcccgccctgccagaggagagggaggtcacggcgtaaaggtgcagctgccgccaccgccgcttctgcaaggtctcagggacgggctgcagccatgtcctattgccggcaggaaggctttgcccaggatggttccttctggaatgtctattcccctccttccctccctgaagctctttgtcagggacaaaggtaggatccctccccttccgtcttctccactggatgcctgtgtcgtattcatctgtgaccaccaggtactaccacagagctggagctgaggaagggaaggatcgaatcatatttgtaaccaaagaagatcatgaaactccaagcagtgcagaattggtggctgatgaccccaacgatccatacgaggagcatggattgatactgccaaatggaaacattaactggaactgcccatgccttgggggaatggccagcggtccctgtggagaacagtttaagtcagccttttcctgcttccactatagcacggaggagatcaaggggtcagactgtgtagaccagttccgggccatgcaggaatgcatgcagaaatacccagacctctatccccaagaggatgaggatgaggaagaggaaagagagaagaagccagcagaacaagcagaagaaacagctcccattgaggccactgcaaccaaagaagaggagggatcaagttaatgaaggccacaaggcactgggcaccagtccttttggagtggaccttttgcaaaaggccttgtcatcaccttccaagaaagtttccttctgttgtcctgtgcattataatatacaaaataacttattttgatgatcagaggtcttgaggtcttgacatcttgacatatacactgaaaaaaatgggggttgtatgtatgtgtgtcctacccaaacctgtggccgccacttttgaattctcagattgccctgaattttgccacttttaaataatgtgctgaataagctcagcaactaaaaaccattacccaagaacgtttcttgtgagtgagctgatttattctgattcattatattccttttggtagattttataccccttggggaaataatacaacaaaaacatctcttaaaaatgctgggatggggccatatctactagcagaggccagatggtcagatatgatttctgcaaacccatcttgaccttgagtatgtgaaggggtactgtactttattcctgatacattttggtttccatgtaggtgttgagctcctggttttctgtgtttggatgatgaagatttggacccttccattcataatccctttctaagtgaagggagaggctggcttggctgttccttgttattccgaaagccctggtttggggcccatgttcacactggctctcagtctagtcaggtgcaatgttcttgagaggtggggacctaattattaccagagtagcagcaagagaggaaacgttgtgaattaagtattcaattaaaaggaaacatgatttctacctga

SEQ ID NO: 121325 - DNA, 1405 bp, Homo sapiens
  Payload ID: 3788
  Gene Symbol: CHCHD4
  Gene Name: coiled-coil-helix-coiled-coil-helix domain containing 4
  Uniprot ID: Q8N4Q1
  ENST ID: ENST00000396914
  CDS Start-End: 183-611
aggttggcctggccgcggttgcgagggcgccgaggcaggcgcgcggcgggcaggcctgggagggggcgggtccgcgcgggcttcggaggagcccgccctgccagaggagagggaggtcacggcgtaaaggtgcagctgccgccaccgccgcttctgcaaggtctcagggacgggctgcagccatgtcctattgccggcaggaagggaaggatcgaatcatatttgtaaccaaagaagatcatgaaactccaagcagtgcagaattggtggctgatgaccccaacgatccatacgaggagcatggattgatactgccaaatggaaacattaactggaactgcccatgccttgggggaatggccagcggtccctgtggagaacagtttaagtcagccttttcctgcttccactatagcacggaggagatcaaggggtcagactgtgtagaccagttccgggccatgcaggaatgcatgcagaaatacccagacctctatccccaagaggatgaggatgaggaagaggaaagagagaagaagccagcagaacaagcagaagaaacagctcccattgaggccactgcaaccaaagaagaggagggatcaagttaatgaaggccacaaggcactgggcaccagtccttttggagtggaccttttgcaaaaggccttgtcatcaccttccaagaaagtttccttctgttgtcctgtgcattataatatacaaaataacttattttgatgatcagaggtcttgaggtcttgacatcttgacatatacactgaaaaaaatgggggttgtatgtatgtgtgtcctacccaaacctgtggccgccacttttgaattctcagattgccctgaattttgccacttttaaataatgtgctgaataagctcagcaactaaaaaccattacccaagaacgtttcttgtgagtgagctgatttattctgattcattatattccttttggtagattttataccccttggggaaataatacaacaaaaacatctcttaaaaatgctgggatggggccatatctactagcagaggccagatggtcagatatgatttctgcaaacccatcttgaccttgagtatgtgaaggggtactgtactttattcctgatacattttggtttccatgtaggtgttgagctcctggttttctgtgtttggatgatgaagatttggacccttccattcataatccctttctaagtgaagggagaggctggcttggctgttccttgttattccgaaagccctggtttggggcccatgttcacactggctctcagtctagtcaggtgcaatgttcttgagaggtggggacctaattattaccagagtagcagcaagagaggaaacgttgtgaattaagtattcaattaaaaggaaa

SEQ ID NO: 121326 - DNA, 584 bp, Homo sapiens
  Payload ID: 3788
  Gene Symbol: CHCHD4
  Gene Name: coiled-coil-helix-coiled-coil-helix domain containing 4
  ENST ID: ENST00000420103
  CDS Start-End: 74-175
agggaggtcacggcgtaaaggtgcagctgccgccaccgccgcttctgcaaggtctcagggacgggctgcagccatgtcctattgccggcaggaaggctttgcccaggatggttccttctggaatgtctattcccctccttccctccctgaagctctttgtcagggacaaaggtaggatccctccccttccgtcttctccactggatgcctgtgtcgtattcatctgtgaccaccaggtactaccacagagctggagctgaggaagatcctgtggtctctgtaaaatggagataaagtaatacccaccagtgaactcacagatgtaataaaacacattgcatgggacaaaaatgtgtaaaagatacagctgttactgttctactttcgatccagtgtgaactgtgctgcaagggaaaatgtccaggaaggcacatggaaggatcgaatcatatttgtaaccaaagaagatcatgaaactccaagcagtgcagaattggtggctgatgaccccaacgatccatacgaggagcatggattgatactgccaaatggaaacattaactggaactgcccatgccttgggg

SEQ ID NO: 121327 - DNA, 691 bp, Homo sapiens
  Payload ID: 3789
  Gene Symbol: CHCHD5
  Gene Name: coiled-coil-helix-coiled-coil-helix domain containing 5
  Uniprot ID: Q9BSY4
  ENST ID: ENST00000324913
  CDS Start-End: 208-540
gtggctactcagggcgccgccatgacgagccgggccggaagaagaggtagggcgccgccgtgacagattagtcctaaagggaacggggttgttagttcaattggctaccggaaaaaaccaggctgggctgggcgccgccatgacaaccgataccggaaaaggcgggtcgttccccccggacagccctacgccggcaaaggtctcgagatgcaggcggccctagaggtcaccgctcgctactgtggccgggagctggagcagtatggccagtgtgtggcggccaagccggaatcctggcagcgggactgtcactaccttaagatgagcattgcccagtgcacatcctcccacccaatcatccgccagatccgccaggcctgtgctcagccttttgaggccttcgaggagtgtcttcgacagaacgaggcagctgtgggcaactgtgcagagcatatgcgccgcttcctgcagtgcgctgagcaggtgcagccgccacgctcacctgcaactgtggaggcacagccacttcctgcctcctgaggactcctctgacggcaggaaaactggacatgaatgactgcccccacgcccctcccctgcagagtggccagatggagtcctgagccctggacatgggcccggctttcctggatatcaggacttccaataaataaagactctgtatactggg

SEQ ID NO: 121328 - DNA, 3272 bp, Homo sapiens
  Payload ID: 3789
  Gene Symbol: CHCHD5
  Gene Name: coiled-coil-helix-coiled-coil-helix domain containing 5
  Uniprot ID: Q9BSY4
  ENST ID: ENST00000409719
  CDS Start-End: 54-530
ggaaaaggcgggtcgttccccccggacagccctacgccggcaaaggtctcgagatgcaggcggccctagaggtcaccgctcgctactgtggccgggagctggagcagtatggccagtgtgtggcggccaagccggaatcctggcagcgggactgtcactaccttaagatgagcattgcccagtgcacatcctcccacccaatcatccgccagatccgccaggcctgtgctcagccttttgaggccttcgaggagtgtcttcgacagaacgaggcagctgtgggcaactgtgcagagcatatgcgccgcttcctgcagtgcgctgagcaggtgcagccgccacgctcacctgcaactgtggaggtaagaggggctcacctcagttcatctcttttctccataacatccccttcatccttctggttgttcagggtaaagactttggagtcatcctcagccccaccccatcaccacacaggcctttgccatgcatccagaatccagaacatcatcacttcttgccccatatagcccctgctttaatccaccaccaccctcaccctccacctccaggatacctgccccagccttctccctggtctcccttcctccctcttttcttgcctccataaagcggcctgggtgagcatgtaaggactgaaatctggtctcatcacacctatgcttaaagctctccagtggctttgtgtcacattgagaacaaaagtccaggtccttgctgggttctctgtgttcttccctaggctgacttcatctgcctcctgcctcaccctctctcttctttctcactactcctcatctgcaactgcagaggggctgggctggggtggccaaaaaaaggtcactcttttaaatgtatctaatatgtaaaccagatatacagtatatctgtgatatgtaagtttcatggttgggcaattagaacaaaagtctaaaatgactccttgaggagaggcagtaacggaaaaaggttgaaaaatgctcttttagatgtttactaccctcctcactggactgtgagctccaaaggtgaaagtcacatctttccccagcccctgtgagtaccctctcctggggccctctctctgcccctgcagccctggcttctctcttgggccacctggccatccttctcctgggccccatgctccatcttgactttccagtcattcttggtgatcatcctagactgatctcagaggaaatctgaccatgttctgcttctacttacaaacctttccatggttctcaattccaccagcccaagtcttaatgccagcacagcccacagggccctgtgggatgcagtccctgcgacccgtggtcccacctctcctctctttcccccttaagctctatgttccagccccagtgaacatgcagttactcaagtgcacgtctccgctgcttttgtccagctgtttccctctgctgggactgcccttcctaatccatctcctggctaattcctattccagcttagacggcacgtctctcagaaaacctccctgatgtcccacccacttcccgcccctgtcttcaagttcccaaggtccctgagcccctccatcaaggctcacatcctatgcctgtgtcaagggagctcttggctgaagattggggtgatgcccttcttaccaggccctataggcattaattgtttctgtaaggcaaggataagtgaatagttcagacccctagggcagaaactacgacccctgagagccggaaggaacttaattctcctcaggaaacgttacctaacgatcacatactgttctcagtcagctgctggggacatttctgtctttcaagttttttgggcatctgaacagtaaagaccccatcctcctatcttagagccatttgctgcttccctccctggaccagcaaccagcctctctctggtctccttgtggccacccctgccctgacagtcttctcttccctggcagccaaagaagcttttaaaaatgggaattagggccgggtgcggtggcacatgcctgtaatcccagcacttggggaggccgaggtgggtggatcacctgaggtcaggagtttgagaccagcctggccaacatggtgaaaccccatctctactaaaaatacaaatattagccaggtgtggtggcaggtacctgtaatcccagctacttgggaggctgaggcaggagaattgcttgaacccaggaggcagaggttgcagtgagccaagattgcaccattgcactctagcctgggcgatagagcgagactctgtcttccaaaaaaaaaaaaaaaagggaattaggtcacatctcctcatcatcccctccttcctggggatggcatcccagttacagtttttccttcctagctaggggcagtgagatttgttgtctggtctacacaatagcgaacacaaacattctcatctcctgcagcatggcatacagactttacagaatgtcctgtgtttttgtggctgacaatcaaagtggtacatgtccctcccattccgcacacacctctgctctttaccctgattaaattttcttcatcgaatttcttggatgttgacatatttattgtccgtctctccctgcttgagtcagagagttttgcctgctgggtacacggcaggtgctcagtaaatatagcagaatggcgcgttccctgcctcccatgacacttcaccacagctgactttttcacatggctcagggccaaggtcattgcccaacacccttctccctccagactgtgggctctgcagggtctccctctgtggtgtctacataggctccccaggctgggcacagaggaggtgctactagatgttgatgtactttctccacaggcacagccacttcctgcctcctgaggactcctctgacggcaggaaaactggacatgaatgactgcccccacgcccctcccctgcagagtggccagatggagtcctgagccctggacatgggcccggctttcctggatatcaggacttccaataaataaagactctgtatactgggctttgattcctgccatccgtacctgagagggtcctaggagagctggctgggcagagtcatctgttccccagcttcaccgggtgtgccaaggaagtgcctgggaagaacaggactctgcagctgtgccccagggttgagactaccctgcctcccttgtgaactctgccacacagccatttcctgacttctgctgcatgtgcctggggtaaagaccctcaatcccttccactctagc

SEQ ID NO: 121329 - DNA, 748 bp, Homo sapiens
  Payload ID: 3789
  Gene Symbol: CHCHD5
  Gene Name: coiled-coil-helix-coiled-coil-helix domain containing 5
  ENST ID: ENST00000454841
  CDS Start-End: 180-326
gccgggccggaagaagaggtagggcgccgccgtgacagattagtcctaaagggaacggggttgttagttcaattggctaccggaaaaaaccaggctgggctgggcgccgccatgacaaccgataccggaaaaggcgggtcgttccccccggacagccctacgccggcaaaggtctcgagatgcaggcggccctagaggtcaccgctcgctactgtggccgggagctggagcagtatggccagtgtgtggcggccaagccggaatcctggcagcgggactgtcactaccttaagatgagcattgcccagtgcacatcctcccagtgagtgcgggcaagtatgagacagtgtggggggtgggcagtggggtgggaatctcccaggggctgaactgccctacccccacagcccaatcatccgccagatccgccaggcctgtgctcagccttttgaggccttcgaggagtgtcttcgacagaacgaggcagctgtgggcaactgtgcagagcatatgcgccgcttcctgcagtgcgctgagcaggtgcagccgccacgctcacctgcaactgtggaggcacagccacttcctgcctcctgaggactcctctgacggcaggaaaactggacatgaatgactgcccccacgcccctcccctgcagagtggccagatggagtcctgagccctggacatgggcccggctttcctggatatcaggacttccaataaataaagactctgtatactggg

SEQ ID NO: 121330 - DNA, 1006 bp, Homo sapiens
  Payload ID: 3790
  Gene Symbol: CHCHD6
  Gene Name: coiled-coil-helix-coiled-coil-helix domain containing 6
  Uniprot ID: Q9BRQ6
  ENST ID: ENST00000290913
  CDS Start-End: 94-801
cgcggccgcgcgagtcctggaaagcgttgttggcccggttgctctggagccgggtctcgggtctggtggctgccggccctgcggcatctcgccatggggagcacggagagcagcgagggccgcagggtgtccttcggagtggacgaggaggagcgggtccgggtgctgcagggtgtccggctgtctgaaaacgtggtgaaccgcatgaaggagcccagctctccaccccctgctcccacatcttctacctttggccttcaagatggcaacttgagagcccctcacaaagaatccacactgcccaggtcggggagcagtggtggccagcagccctcagggatgaaggagggtgtcaagaggtatgaacaggagcatgctgctatccaggataagctcttccaggtggcaaagagggaaagagaggctgccaccaagcactccaaggcatccctgcccacgggcgaaggcagcatcagccatgaggagcagaagtcagtccggctggccagggagctggagagcagagaggcagagctaagacgccgtgacaccttctacaaggagcagctggagcgtattgagaggaagaatgctgagatgtataaactgtcttcagagcaattccatgaggcagcctcaaagatggagagcacaataaagccccgcagggtggagcccgtctgctcagggttgcaggcccagattctccactgctaccgagatcgcccgcatgaggtgctgctgtgctcggacctggtcaaggcataccagcgctgcgtgagcgccgcccacaagggctgaggagcagacatcattccctgccctggcagtgacttggagccctgaagaagggaccaatcatgggaccacagccactgtgccctgccgtttcctgctgggcccctgcatatgcccctgagcctggggctgccacgtgtttaggaaacaaagtatgcgctactgtctgaaaacaaataaagcagatgcctttgttttcagtcgttga

SEQ ID NO: 121331 - DNA, 690 bp, Homo sapiens
  Payload ID: 3790
  Gene Symbol: CHCHD6
  Gene Name: coiled-coil-helix-coiled-coil-helix domain containing 6
  ENST ID: ENST00000513253
  CDS Start-End: 1-500
ccacactgcccaggtcggggagcagtggtggccagcagccctcagggatgaaggagggtgtcaagaggtatgaacaggagcatgctgctatccaggataagctcttccaggtggcaaagagggaaagagaggctgccaccaagcactccaaggcatccctgcccacgggcgaaggcagcatcagccatgaggagcagaagtcagtccggctggccagggagctggagagcagagaggcagagctaagacgccgtgacaccttctacaaggagcagctggagcgtattgagaggaagaatgctgagatgtataaactgtcttcagagcaattccatgaggcagcctcaaagatggagagcacaataaaggtggagcccgtctgctcagggttgcaggcccagattctccactgctaccgagatcgcccgcatgaggtgctgctgtgctcggacctggtcaaggcataccagcgctgcgtgagcgccgcccacaagggctgaggagcagacatcattccctgccctggcagtgacttggagccctgaagaagggaccaatcatgggaccacagccactgtgccctgccgtttcctgctgggcccctgcatatgcccctgagcctggggctgccacgtgtttaggaaacaaagtatgcgctactgtctgaaaacaaataaagcagatgccttt

SEQ ID NO: 121332 - DNA, 1159 bp, Homo sapiens
  Payload ID: 3790
  Gene Symbol: CHCHD6
  Gene Name: coiled-coil-helix-coiled-coil-helix domain containing 6
  ENST ID: ENST00000508789
  CDS Start-End: 73-843
aagcgttgttggcccggttgctctggagccgggtctcgggtctggtggctgccggccctgcggcatctcgccatggggagcacggagagcagcgagggccgcagggtgtccttcggagtggacgaggaggagcgggtccgggtgctgcagggtgtccggctgtctgaaaacgtggtgaaccgcatgaaggagcccagctctccaccccctgctcccacatcttctacctttggccttcaagatggcaacttgagagcccctcacaaagaatccacactgcccaggtcggggagcagtggtggccagcagccctcagggatgaaggagggtgtcaagaggtatgaacaggagcatgctgctatccaggataagctcttccaggtggcaaagagggaaagagaggctgccaccaagcactccaaggcatccctgcccacgggcgaaggcagcatcagccatgaggagcagaagtcagtccggctgcaggccagggagctggagagcagagaggcagagctaagacgccgtgacaccttctacaaggagcagctggagcgtattgagaggaagaatgctgagatgtataaactgtcttcagagcaattccatgaggcagcctcaaagatggagagcacaataaagccccgcagggtggagcccgtctgctcagggttgcaggcccagattctccactgctaccgagatcgcccgcatgaggtgctgctgtgctcggacctggtcaaggcataccagcgctgcgtgagcgccgcccacaaggtaaggccttgcctgcctcccaggtttccaagggccttgggaggtaggcgaggtacctctatctagcattggagatctctgcctgccttttcctgttagaatcagatgctccacttggaggtctctgcatttgccaagggagggattcttcgctttcctcagtcacctgcacactctcctggctgcttccaggagcgccttggacatctggccccagggagatgatccctgttgcgtttgccctattaggctgggtgggagcaggctgggtaaagtcaggccccaccttcaagggccgggccccttgtgggtgccggggacttcttagccctcggcacttaggggtgggagggtggcagaggcccgagtgcagagtgggggt

SEQ ID NO: 121333 - DNA, 1148 bp, Homo sapiens
  Payload ID: 3790
  Gene Symbol: CHCHD6
  Gene Name: coiled-coil-helix-coiled-coil-helix domain containing 6
  ENST ID: ENST00000503119
  CDS Start-End: 74-496
aaagcgttgttggcccggttgctctggagccgggtctcgggtctggtggctgccggccctgcggcatctcgccatggggagcacggagagcagcgagggccgcagggtgtccttcggagtggacgaggaggagcgggtccgggtgctgcagggtgtccggctgtctgaaaacgtggtgaaccgcatgaaggagcccagctctccaccccctgctcccacatcttctacctttggccttcaagatggcaacttgagagcccctcacaaagaatccacactgcccaggtcggggagcagtggtggccagcagccctcagggatgaaggagggtgtcaagaggtatgaacaggagcatgctgctatccaggataagctcttccaggtggcaaagagggaaagagaggctgccaccaagcactccaaggcatccctgcccacgggcgaaggcagcatcagccatgaggagcagaagtcagtccggctgataatacattgacatgattcaaaagtccaaaggtatccaataaaaaggctccatcactccaatcttccagccgcctggctccctgccttgggccagggagctggagagcagagaggcagagctaagacgccgtgacaccttctacaaggagcagctggagcgtattgagaggaagaatgctgagatgtataaactgtcttcagagcaattccatgaggcagcctcaaagatggagagcacaataaagccccgcagggtggagcccgtctgctcagggttgcaggcccagattctccactgctaccgagatcgcccgcatgaggtgctgctgtgctcggacctggtcaaggcataccagcgctgcgtgagcgccgcccacaaggtaaggccttgcctgcctcccaggtttccaagggccttgggaggtaggcgaggtacctctatctagcattggagatctctgcctgccttttcctgttagaatcagatgctccacttggaggtctctgcatttgccaagggagggattcttcgctttcctcagtcacctgcacactctcctggctgcttccaggagcgccttggacatctggccccagggagatgatccctgttgcgtttgccctattaggctgggtgggagcaggctgggtaaagtcaggcc

SEQ ID NO: 121334 - DNA, 1684 bp, Homo sapiens
  Payload ID: 3791
  Gene Symbol: CHCHD7
  Gene Name: coiled-coil-helix-coiled-coil-helix domain containing 7
  Uniprot ID: Q9BUK0
  ENST ID: ENST00000303759
  CDS Start-End: 172-504
gctacttaaggtcctgctgcgtgagccattgacgtgtttggagctggagacggcctgggtgctggcgaagcggaggccggagttaatacacgaggaactcatgcaaaggaggggactttcggaaatccaaacttagagtgccttgtatttagaatccggaaggaaaaggaaatgaaatgtgaagaaactcatgcaccaaactcgaactgggtatatgtgatgttacctagtaagaagactgttagaatgccctcggtaacacagaggctgagagatcctgacataaatccttgtttgtcggaatctgatgcttccaccagatgtctggatgaaaataactatgacagggaaaggtgttccacttacttcttgaggtacaaaaactgccggagattctggaattctatcgtgatgcagagaagaaagaacggagtgaagccatttatgcctacggcagcagaaagagatgaaatcttgagagcagtgggaaatatgccctattgaatgtttgcattaaaagtgtttatataacttagaagcagatgaatatttctaataaatgattgctgtaatatttaagactgtacacccctcacccagacagaccttaagttcttcaagtggagacagtgaagtcaccccgtgtcctttttgcttgctctcagtgccatgccgatggtatgttgctgttggctgtgttgtggcatgagtttgcatgactttctggaggcatggagttaggtaaggctacatgagaaattgagcttttccactgggttttgaaagaagagtatgatgtgaacaagtaaagactgaatggggctgagatgaaggcaatgtttccaaggaaaggaaatgttatgagcaagagtgtgaggcaagagaagctggaaccacattcagagagtatcctgtagattgctccacctagaatctcaggtgggtggagcagtggtgggagaagactggaaaggtaagttgaaggtaaggaatgtgtggtgggcctcagatcccaggctcattcctcaaatcacttcttacttccctcacttatctttgtttaaataaggttagtacattcactaggggcaaatgggtttttctaaataaatgacataaaaaagaactggttgtctttctttaaagaaagtcttagttacaggattctgtgattaaaatccttaaatattgggttgccttctgcagctgtagtatcagtttttgaaccacagtaatgggaagaaagacaaatggattcccttagaagtaagatttctatttgcaggatgagttgggcagggaaaagggtcagggttcatcaggtgaactcaacactgggatgagactagaacttcactttatgatataaacacaatacgattattcaatgtggtgactggggtagactgtgaagcagccctccttatgcccactgccttttagaatcgtttgttttattcatggtagttttatgaagacatactattattgaatgaaatttaatgtgtacttgaaaacattgcttttgtcccttctcttcatctggtcttgggtcaagaacattgttttaatggctgccgacaatgaactgtctgtctgagtctaaaaccaagctcaggtttctaagccacatgaccttgattgttaaatgtagttatatttgaataaaaaatgaatcatttcc

SEQ ID NO: 121335 - DNA, 1535 bp, Homo sapiens
  Payload ID: 3791
  Gene Symbol: CHCHD7
  Gene Name: coiled-coil-helix-coiled-coil-helix domain containing 7
  Uniprot ID: Q9BUK0
  ENST ID: ENST00000355315
  CDS Start-End: 100-357
cgctacttaaggtcctgctgcgtgagccattgacgtgtttggagctggagacggcctgggtgctggcgaagcggaggccggagtaagaagactgttagaatgccctcggtaacacagaggctgagagatcctgacataaatccttgtttgtcggaatctgatgcttccaccagatgtctggatgaaaataactatgacagggaaaggtgttccacttacttcttgaggtacaaaaactgccggagattctggaattctatcgtgatgcagagaagaaagaacggagtgaagccatttatgcctacggcagcagaaagagatgaaatcttgagagcagtgggaaatatgccctattgaatgtttgcattaaaagtgtttatataacttagaagcagatgaatatttctaataaatgattgctgtaatatttaagactgtacacccctcacccagacagaccttaagttcttcaagtggagacagtgaagtcaccccgtgtcctttttgcttgctctcagtgccatgccgatggtatgttgctgttggctgtgttgtggcatgagtttgcatgactttctggaggcatggagttaggtaaggctacatgagaaattgagcttttccactgggttttgaaagaagagtatgatgtgaacaagtaaagactgaatggggctgagatgaaggcaatgtttccaaggaaaggaaatgttatgagcaagagtgtgaggcaagagaagctggaaccacattcagagagtatcctgtagattgctccacctagaatctcaggtgggtggagcagtggtgggagaagactggaaaggtaagttgaaggtaaggaatgtgtggtgggcctcagatcccaggctcattcctcaaatcacttcttacttccctcacttatctttgtttaaataaggttagtacattcactaggggcaaatgggtttttctaaataaatgacataaaaaagaactggttgtctttctttaaagaaagtcttagttacaggattctgtgattaaaatccttaaatattgggttgccttctgcagctgtagtatcagtttttgaaccacagtaatgggaagaaagacaaatggattcccttagaagtaagatttctatttgcaggatgagttgggcagggaaaagggtcagggttcatcaggtgaactcaacactgggatgagactagaacttcactttatgatataaacacaatacgattattcaatgtggtgactggggtagactgtgaagcagccctccttatgcccactgccttttagaatcgtttgttttattcatggtagttttatgaagacatactattattgaatgaaatttaatgtgtacttgaaaacattgcttttgtcccttctcttcatctggtcttgggtcaagaacattgttttaatggctgccgacaatgaactgtctgtctgagtctaaaaccaagctcaggtttctaagccacatgaccttgattgttaaatgtagttatatttgaataaaaaatgaatcattt

SEQ ID NO: 121336 - DNA, 1550 bp, Homo sapiens
  Payload ID: 3791
  Gene Symbol: CHCHD7
  Gene Name: coiled-coil-helix-coiled-coil-helix domain containing 7
  ENST ID: ENST00000396723
  CDS Start-End: 177-461
ctggagacggcctgggtgctggcgaagcggaggccggagttaatacacgaggaactcatgcaaaggaggggactttcggaaatccaaacttagagtgccttgtatttagaatccggaaggaaaaggaaatgaaatgtgaagaaactcatgcaccaaactcgaactgggtatatgtgatgttacctagtaagaagactgttagaatgccctcggtaacacagaggctgagagatcctgacataaatccttgtttgtcggaatctgatgcttccaccagatgtctggatgaaaataactatgacagggaaaggtgttccacttacttcttgaggtacaaaaactgccggagattctggaattctatcgtgatgcagagaagaaagaacggagtgaagccatttatgcctacggcagcagaaagagatgaaatcttgagagcagtgggaaatatgccctattgaatgtttgcattaaaagtgtttatataacttagaagcagatgaatatttctaataaatgattgctgtaatatttaagactgtacacccctcacccagacagaccttaagttcttcaagtggagacagtgaagtcaccccgtgtcctttttgcttgctctcagtgccatgccgatggtatgttgctgttggctgtgttgtggcatgagtttgcatgactttctggaggcatggagttaggtaaggctacatgagaaattgagcttttccactgggttttgaaagaagagtatgatgtgaacaagtaaagactgaatggggctgagatgaaggcaatgtttccaaggaaaggaaatgttatgagcaagagtgtgaggcaagagaagctggaaccacattcagagagtatcctgtagattgctccacctagaatctcaggtgggtggagcagtggtgggagaagactggaaaggtaagttgaaggtaaggaatgtgtggtgggcctcagatcccaggctcattcctcaaatcacttcttacttccctcacttatctttgtttaaataaggttagtacattcactaggggcaaatgggtttttctaaataaatgacataaaaaagaactggttgtctttctttaaagaaagtcttagttacaggattctgtgattaaaatccttaaatattgggttgccttctgcagctgtagtatcagtttttgaaccacagtaatgggaagaaagacaaatggattcccttagaagtaagatttctatttgcaggatgagttgggcagggaaaagggtcagggttcatcaggtgaactcaacactgggatgagactagaacttcactttatgatataaacacaatacgattattcaatgtggtgactggggtagactgtgaagcagccctccttatgcccactgccttttagaatcgtttgttttattcatggtagttttatgaagacatactattattgaatgaaatttaatgtgtacttgaaaacattgcttttgtcccttctcttcatctggtcttgggtcaagaacattgttttaatggctgccgacaatgaactgtc

SEQ ID NO: 121337 - DNA, 442 bp, Homo sapiens
  Payload ID: 3791
  Gene Symbol: CHCHD7
  Gene Name: coiled-coil-helix-coiled-coil-helix domain containing 7
  Uniprot ID: Q9BUK0
  ENST ID: ENST00000519367
  CDS Start-End: 107-277
gaaaaacacgttcaagtttttattcacaaagtacagagaatacatgaagttcctcactaagtgatcattatgccaaaatcaaaatttcagtaagaagactgttagaatgccctcggtaacacagaggctgagagatcctgacataaatccttgtttgtcgatcctgttctaccttttaaatgatgcctctcttatatctgtaaggaatctgatgcttccaccagatgtctggatgaaaataactatgacagggaaaggtgttccacttacttcttgaggtacaaaaactgccggagattctggaattctatcgtgatgcagagaagaaagaacggagtgaagccatttatgcctacggcagcagaaagagatgaaatcttgagagcagtgggaaatatgccctattgaatgtttgcattaaaagtgtttatataacttagaa

SEQ ID NO: 121338 - DNA, 1670 bp, Homo sapiens
  Payload ID: 3791
  Gene Symbol: CHCHD7
  Gene Name: coiled-coil-helix-coiled-coil-helix domain containing 7
  Uniprot ID: Q9BUK0
  ENST ID: ENST00000518801
  CDS Start-End: 149-355
gctggagacggcctgggtgctggcgaagcggaggccggagttaatacacgaggaactcatgcaaaggaggggactttcggaaatccaaacttagagtgccttgtatttagaatccggaaggaaaaggaaatgaaatgtgaagaaactcatgcaccaaactcgaactggtaagaagactgttagaatgccctcggtaacacagaggctgagagatcctgacataaatccttgtttgtcgatcctgttctaccttttaaatgatgcctctcttatatctgtaaggaatctgatgcttccaccagatgtctggatgaaaataactatgacagggaaaggtgttccacttacttcttgaggtacaaaaactgccggagattctggaattctatcgtgatgcagagaagaaagaacggagtgaagccatttatgcctacggcagcagaaagagatgaaatcttgagagcagtgggaaatatgccctattgaatgtttgcattaaaagtgtttatataacttagaagcagatgaatatttctaataaatgattgctgtaatatttaagactgtacacccctcacccagacagaccttaagttcttcaagtggagacagtgaagtcaccccgtgtcctttttgcttgctctcagtgccatgccgatggtatgttgctgttggctgtgttgtggcatgagtttgcatgactttctggaggcatggagttaggtaaggctacatgagaaattgagcttttccactgggttttgaaagaagagtatgatgtgaacaagtaaagactgaatggggctgagatgaaggcaatgtttccaaggaaaggaaatgttatgagcaagagtgtgaggcaagagaagctggaaccacattcagagagtatcctgtagattgctccacctagaatctcaggtgggtggagcagtggtgggagaagactggaaaggtaagttgaaggtaaggaatgtgtggtgggcctcagatcccaggctcattcctcaaatcacttcttacttccctcacttatctttgtttaaataaggttagtacattcactaggggcaaatgggtttttctaaataaatgacataaaaaagaactggttgtctttctttaaagaaagtcttagttacaggattctgtgattaaaatccttaaatattgggttgccttctgcagctgtagtatcagtttttgaaccacagtaatgggaagaaagacaaatggattcccttagaagtaagatttctatttgcaggatgagttgggcagggaaaagggtcagggttcatcaggtgaactcaacactgggatgagactagaacttcactttatgatataaacacaatacgattattcaatgtggtgactggggtagactgtgaagcagccctccttatgcccactgccttttagaatcgtttgttttattcatggtagttttatgaagacatactattattgaatgaaatttaatgtgtacttgaaaacattgcttttgtcccttctcttcatctggtcttgggtcaagaacattgttttaatggctgccgacaatgaactgtctgtctgagtctaaaaccaagctcaggtttctaagccacatgaccttgattgttaaatgtagttatatttgaataaaaaatgaatcatttccaaaa

SEQ ID NO: 121339 - DNA, 1805 bp, Homo sapiens
  Payload ID: 3791
  Gene Symbol: CHCHD7
  Gene Name: coiled-coil-helix-coiled-coil-helix domain containing 7
  Uniprot ID: Q9BUK0
  ENST ID: ENST00000523975
  CDS Start-End: 149-442
gctggagacggcctgggtgctggcgaagcggaggccggagttaatacacgaggaactcatgcaaaggaggggactttcggaaatccaaacttagagtgccttgtatttagaatccggaaggaaaaggaaatgaaatgtgaagaaactcatgcaccaaactcgaactggtaagaagactgttagaatgccctcggtaacacagaggctgagagatcctgacataaatccttgtttgtcggaatctgatgcttccaccagatgtctggatgaaaataactatgacagggaaaggtgttccacttacttcttgaggtacaaaaactgccggagattctggaattctatcgtgatgcagagaagaaagaacggagtgaagccatttatgcctacggcagcagaaagagatgaaatcttgagagcagtgggaaatatgccctattgaatgtttgcattaaaagtgtttatataacttagaagcagatgaatatttctaataaatgattgctgtaatatttaagactgtacacccctcacccagacagaccttaagttcttcaagtggagacagtgaagtcaccccgtgtcctttttgcttgctctcagtgccatgccgatggtatgttgctgttggctgtgttgtggcatgagtttgcatgactttctggaggcatggagttaggtaaggctacatgagaaattgagcttttccactgggttttgaaagaagagtatgatgtgaacaagtaaagactgaatggggctgagatgaaggcaatgtttccaaggaaaggaaatgttatgagcaagagtgtgaggcaagagaagctggaaccacattcagagagtatcctgtagattgctccacctagaatctcaggtgggtggagcagtggtgggagaagactggaaaggtaagttgaaggtaaggaatgtgtggtgggcctcagatcccaggctcattcctcaaatcacttcttacttccctcacttatctttgtttaaataaggttagtacattcactaggggcaaatgggtttttctaaataaatgacataaaaaagaactggttgtctttctttaaagaaagtcttagttacaggattctgtgattaaaatccttaaatattgggttgccttctgcagctgtagtatcagtttttgaaccacagtaatgggaagaaagacaaatggattcccttagaagtaagatttctatttgcaggatgagttgggcagggaaaagggtcagggttcatcaggtgaactcaacactgggatgagactagaacttcactttatgatataaacacaatacgattattcaatgtggtgactggggtagactgtgaagcagccctccttatgcccactgccttttagaatcgtttgttttattcatggtagttttatgaagacatactattattgaatgaaatttaatgtgtacttgaaaacattgcttttgtcccttctcttcatctggtcttgggtcaagaacattgttttaatggctgccgacaatgaactgtctgtctgagtctaaaaccaagctcaggtttctaagccacatgaccttgattgttaaatgtagttatatttgaataaaaaatgaatcatttccaaaattcttttgatttgtattgactgctataaaaatgatggattaaaataggaccagaaaagaatgaatgcctacctgtgtaagaagtatttttgtatttttaagcacacttgttaaagggcttggaattttaatgtcactcctttgaaggtacataccaatatcaacattcatcttgtaact

SEQ ID NO: 121340 - DNA, 559 bp, Homo sapiens
  Payload ID: 3791
  Gene Symbol: CHCHD7
  Gene Name: coiled-coil-helix-coiled-coil-helix domain containing 7
  ENST ID: ENST00000523667
  CDS Start-End: 187-384
gtgtttggagctggagacggcctgggtgctggcgaagcggaggccggagttaatacacgaggaactcatgcaaaggaggggactttcggaaatccaaacttagagtgccttgtatttagaatccggaaggaaaaggaaatgaaatgtgaagaaactcatgcaccaaactcgaactgggtatatgtgatgttacctagtaagaagactgttagaatgccctcggtaacacagaggctgagagatcctgacataaatccttgtttgtcgatcctgttctaccttttaaatgatgcctctcttatatctgtaaggaatctgatgcttccaccagatgtctggatgaaaataactatgacagggaaaggtgttccacttacttcttgagccgtgaaagatccttgagagctcttgttagctgcctcgtcgtcctctaagctataagaatgcagttttaatatagaattctatcgtgatgcagagaagaaagaacggagtgaagccatttatgcctacggcagcagaaagagatgaaatcttgagagcagtgggaaatatgccc

SEQ ID NO: 121341 - DNA, 536 bp, Homo sapiens
  Payload ID: 3791
  Gene Symbol: CHCHD7
  Gene Name: coiled-coil-helix-coiled-coil-helix domain containing 7
  ENST ID: ENST00000517636
  CDS Start-End: 403-536
gtgtttggagctggagacggcctgggtgctggcgaagcggaggccggaggtgagtggttcccccgccctacctccgaagcggccgcagaaaagcggggagagaggggtgcccttgggccgtagcggggcccgaatgcacttctgcggcgcggaggcgctcccgccaggcttcgccgcagcgcggacctcttcccgttgctcttcctcccgccacacgggtctgttcgctccgggggcgaggaagatgacctctgcctagtccgggcaaccccagctcttcttccactctcctgtgtagcctctgaagcgcagttaccggccccacccccagttccctgcgttttcctcgccccttgtctctctcggcatggtctcggcacagcaagtaagaagactgttagaatgccctcggtaacacagaggctgagagatcctgacataaatccttgtttgtcggaatctgatgcttccaccagatgtctggatgaaaataactatgacagggaaaggtgttccacttacttcttgaggtacaa

SEQ ID NO: 121342 - DNA, 573 bp, Homo sapiens
  Payload ID: 3791
  Gene Symbol: CHCHD7
  Gene Name: coiled-coil-helix-coiled-coil-helix domain containing 7
  Uniprot ID: Q9BUK0
  ENST ID: ENST00000521831
  CDS Start-End: 169-339
agtctggcggcggcgcgcgccgattgggcgggctgccgccggggagcgggggcagcaagttgggatgcgcgctacttaaggtcctgctgcgtgagccattgacgtgtttggagctggagacggcctgggtgctggcgaagcggaggccggagtaagaagactgttagaatgccctcggtaacacagaggctgagagatcctgacataaatccttgtttgtcgatcctgttctaccttttaaatgatgcctctcttatatctgtaaggaatctgatgcttccaccagatgtctggatgaaaataactatgacagggaaaggtgttccacttacttcttgaggtacaaaaactgccggagattctggaattctatcgtgatgcagagaagaaagaacggagtgaagccatttatgcctacggcagcagaaagagatgaaatcttgagagcagtgggaaatatgccctattgaatgtttgcattaaaagtgtttatataacttagaagcagatgaatatttctaataaatgattgctgtaatatttaagactgtacacccctcacccagacagacc

SEQ ID NO: 121343 - DNA, 580 bp, Homo sapiens
  Payload ID: 3791
  Gene Symbol: CHCHD7
  Gene Name: coiled-coil-helix-coiled-coil-helix domain containing 7
  ENST ID: ENST00000517933
  CDS Start-End: 66-248
gtgtttggagctggagacggcctgggtgctggcgaagcggaggccggagtaagaagactgttagaatgccctcggtaacacagaggctgagagatcctgacataaatccttgtttgtcggaatctgatgcttccaccagatgtctggatgaaaataactatgacagggaaaggtgttccacttacttcttgaggtacaaaaactgccggagattctgggtaagcctagattggttagctttgtgttaaaacccatctcctagggttgaaactgaagcctaaaattagtcagtacccacaatcctttcccactgatggctgtagggaaacttaacttttcaactttatcctctgtgtgctactttagccgtgaaagatccttgagagctcttgttagctgcctcgtcgtcctctaagctataagaatgcagttttaatataggtgggtcttcttagacatttaagtatctgcagccctaaaacaatgtctttgttataaatttagttttcctggagatgaacagaatgtttaacttcccttgtcataacacatcatgttaggcttcaatttctgccttttt

SEQ ID NO: 121344 - DNA, 703 bp, Homo sapiens
  Payload ID: 3791
  Gene Symbol: CHCHD7
  Gene Name: coiled-coil-helix-coiled-coil-helix domain containing 7
  Uniprot ID: Q9BUK0
  ENST ID: ENST00000521524
  CDS Start-End: 137-343
ctgggtgctggcgaagcggaggccggagttaatacacgaggaactcatgcaaaggaggggactttcggaaatccaaacttagagtgccttgtatttagaatccggaaggaaaaggaaatgaaatgtgaagaaactcatgcaccaaactcgaactggtaagaagactgttagaatgccctcggtaacacagaggctgagagatcctgacataaatccttgtttgtcgatcctgttctaccttttaaatgatgcctctcttatatctgtaaggaatctgatgcttccaccagatgtctggatgaaaataactatgacagggaaaggtgttccacttacttcttgagaattctatcgtgatgcagagaagaaagaacggagtgaagccatttatgcctacggcagcagaaagagatgaaatcttgagagcagtgggaaatatgccctattgaatgtttgcattaaaagtgtttatataacttagaagcagatgaatatttctaataaatgattgctgtaatatttaagactgtacacccctcacccagacagaccttaagttcttcaagtggagacagtgaagtcaccccgtgtcctttttgcttgctctcagtgccatgccgatggtatgttgctgttggctgtgttgtggcatgagtttgcatgactttctggaggcatggagttaggtaaggctacatgagaa

SEQ ID NO: 121345 - DNA, 567 bp, Homo sapiens
  Payload ID: 3791
  Gene Symbol: CHCHD7
  Gene Name: coiled-coil-helix-coiled-coil-helix domain containing 7
  ENST ID: ENST00000523532
  CDS Start-End: 187-384
gtgtttggagctggagacggcctgggtgctggcgaagcggaggccggagttaatacacgaggaactcatgcaaaggaggggactttcggaaatccaaacttagagtgccttgtatttagaatccggaaggaaaaggaaatgaaatgtgaagaaactcatgcaccaaactcgaactgggtatatgtgatgttacctagtaagaagactgttagaatgccctcggtaacacagaggctgagagatcctgacataaatccttgtttgtcgatcctgttctaccttttaaatgatgcctctcttatatctgtaaggaatctgatgcttccaccagatgtctggatgaaaataactatgacagggaaaggtgttccacttacttcttgaggtacaaaaactgccggagattctggccgtgaaagatccttgagagctcttgttagctgcctcgtcgtcctctaagctataagaatgcagttttaatatagaattctatcgtgatgcagagaagaaagaacggagtgaagccatttatgcctacggcagcagaaagagatgaaatcttgagag

SEQ ID NO: 121346 - DNA, 552 bp, Homo sapiens
  Payload ID: 3791
  Gene Symbol: CHCHD7
  Gene Name: coiled-coil-helix-coiled-coil-helix domain containing 7
  ENST ID: ENST00000521982
  CDS Start-End: 187-372
gtgtttggagctggagacggcctgggtgctggcgaagcggaggccggagttaatacacgaggaactcatgcaaaggaggggactttcggaaatccaaacttagagtgccttgtatttagaatccggaaggaaaaggaaatgaaatgtgaagaaactcatgcaccaaactcgaactgggtatatgtgatgttacctagtaagaagactgttagaatgccctcggtaacacagaggctgagagatcctgacataaatccttgtttgtcggaatctgatgcttccaccagatgtctggatgaaaataactatgacagggaaaggtgttccacttacttcttgaggtacaaaaactgccggagattctggccgtgaaagatccttgagagctcttgttagctgcctcgtcgtcctctaagctataagaatgcagttttaatatagaattctatcgtgatgcagagaagaaagaacggagtgaagccatttatgcctacggcagcagaaagagatgaaatcttgagagcagtgggaaatatgccctattgaatgttt

SEQ ID NO: 121347 - DNA, 557 bp, Homo sapiens
  Payload ID: 3791
  Gene Symbol: CHCHD7
  Gene Name: coiled-coil-helix-coiled-coil-helix domain containing 7
  ENST ID: ENST00000523061
  CDS Start-End: 47-187
gcctgggtgctggcgaagcggaggccggagtaagaagactgttagaatgccctcggtaacacagaggctgagagatcctgacataaatccttgtttgtcggaatctgatgcttccaccagatgtctggatgaaaataactatgacagggaaaggtgttccacttacttcttgagaattctatcgtgatgcagagaagaaagaacggagtgaagccatttatgcctacggcagcagaaagagatgaaatcttgagagcagtgggaaatatgccctattgaatgtttgcattaaaagtgtttatataacttagaagcagatgaatatttctaataaatgattgctgtaatatttaagactgtacacccctcacccagacagaccttaagttcttcaagtggagacagtgaagtcaccccgtgtcctttttgcttgctctcagtgccatgccgatggtatgttgctgttggctgtgttgtggcatgagtttgcatgactttctggaggcatggagttaggtaaggctacatgagaaattgagcttttccactgggttttg

SEQ ID NO: 121348 - DNA, 2650 bp, Homo sapiens
  Payload ID: 3792
  Gene Symbol: COIL
  Gene Name: coilin
  Uniprot ID: P38432
  ENST ID: ENST00000240316
  CDS Start-End: 36-1766
tggtatctctcggcttccgttgagcaccaagcaagatggcagcttccgagacggttaggctacggcttcaatttgattacccgccgccagctaccccgcactgtacggccttctggcttctggtcgacttgaacagatgccgagtcgtcacagatctcattagtctcatccgccagcgcttcggcttcagttctggggccttcctaggcctctacctggagggggggctcttgccccccgccgagagcgcgcgccttgtgagagacaacgactgcctcagagttaaattagaagagagaggagttgctgagaattctgtagtcatcagtaatggtgacattaatttatctcttagaaaagcaaagaagcgggcatttcagttagaggagggtgaagaaactgaaccagattgcaaatattcaaagaagcattggaagagtcgagagaacaataacaataatgagaaggtcttggatctggaaccaaaagctgtcacagatcagactgtcagcaaaaaaaacaagagaaaaaataaagcaacctgtggcacagtgggtgatgataacgaagaggccaaaagaaaatcaccaaagaaaaaggagaaatgtgaatataaaaaaaaggctaagaatcccaagtctccgaaagtacaggcagtgaaagactgggccaatcagagatgtagttctccaaaaggttctgctagaaacagccttgttaaagccaaaaggaaaggtagtgtaagcgtttgctcaaaagagagtcccagttcctcctcggagtctgaatcttgtgatgaatctatcagtgatggtcccagcaaagtcactttggaggccagaaattcctcagagaaattaccaactgagttatcaaaggaagaaccctctaccaaaaatacaactgcagacaaactggctataaaacttggctttagccttacccccagcaagggcaagacctctggaacaacatcttccagttcagactctagtgcagagtcagacgaccaatgcttgatgtcatcgagcaccccggagtgtgctgcgggtttcttaaagacagtaggcctttttgcaggaagaggtcgtccaggcccagggctgtcatcacagactgcaggtgctgctggatggaggcgttctggctcaaatggtggtggacaggctcctggtgcttctcccagtgtgtctctccctgctagtttaggaagaggatggggtagagaagagaaccttttttcttggaagggagctaagggacggggcatgcgggggagaggtcgaggacgagggcatcctgtttcctgtgttgtaaatagaagcactgacaaccagaggcaacagcaattaaatgacgtggtaaaaaattcatctactattatccagaatccagtagagacacccaagaaggactatagtctgttaccactgttagcagctgcccctcaagttggagaaaagattgcatttaagcttttggagctaacatccagttactctcctgatgtctctgactacaaggaaggaagaatattaagccacaatccagagacccagcaagtagatatagaaattctttcatccttacctgccttgagagaacctgggaaatttgatttagtttatcacaatgaaaatggagccgaggtagtggagtacgctgtgacacaggagagcaagatcactgtattttggaaagagttgattgacccaagactgattattgaatctccaagtaacacatcaagtacagaacctgcctgagtatgacctctccaccttatagtttatgaatgtcttgtttgtgaaagtgactataacccaaacttttttttttttttaaagaggatttggaagttgtatggatttttttgttatcttcactttactgcataggaaacaatctacctcatcatttaaaatgacatgggtgtcggttttgtagatctttggtttttttgtcaggtttaatttcagttaacaaaatgtaaaacatgacattccctgcagatattgttgtataccagtatggtttcttctctttctttaaatgtttttggccatcaagtagcagtcgtcagtaggagtttataataccaagaatgtgctgcgtatcttgtctcaataagttttaagtaacatttaaaaatattaaagcatgttatttgacctaattttttagcatttgagttgttccattaaatggagcatcttgtaaatttcaagtattttatacttgcaattgttaagagttaacaggtagttggatttgtcgcagacaatgagttaaggaatcctttcacgtttttcccaactttaaaattaaggattctcaggtccctgtgtagagcagtgaaaataagatgtgcgtatgtgtgtgtatgcctggagaattggtgtttcacttcagtgagaggattggctgtgagcttcagaccaggaaatgtgtcatcttgccaggcacctggctgagtgtgctggagtgaggatcttgaacagaaacttccttttctgttattattcactacgaagctaaaatggccaaatatataccgtgaaaattggtttcatttaacaaaagatcagatccctccttcagctgtacacatttttaaataaaatcatattgaactaaacatctctaccga

SEQ ID NO: 121349 - DNA, 466 bp, Homo sapiens
  Payload ID: 3792
  Gene Symbol: COIL
  Gene Name: coilin
  ENST ID: ENST00000573008
  CDS Start-End: 354-466
aggtgcgcggcgcagggagcgggacggccgggtgggcggcgggcgggggacgcgcctgcgcacgcccgggcctgaagccgctagacctgctttgttgatgctcttgagagcatcagccaagacattcatgtgcaccactgtggtggtatggaaagagccagcgtaattttaaccagatatctggacgtccaatagcccggacaaattgatacataaaattaagcttcacagagtgttgtggaattgtacagatggctgtcactaccctagagaacataaattgtttagtattcacctaaattaaaacaggagtaaaatcttattaaagaaagaagcccacattctgaaacaaaatggataatcagcattatcaccttttaggagttaaattagaagagagaggagttgctgagaattctgtagtcatcagtaatggtgacattaatttatctcttagaaaagcaaa

SEQ ID NO: 121350 - DNA, 1328 bp, Homo sapiens
  Payload ID: 3793
  Gene Symbol: CIRBP
  Gene Name: cold inducible RNA binding protein
  Uniprot ID: Q14011
  ENST ID: ENST00000320936
  CDS Start-End: 81-599
tcgcgcgttaggaggctcgggtcgttgtggtgcgctgtcttcccgcttgcgtcagggacctgcccgactcagtggccgccatggcatcagatgaaggcaaactttttgttggagggctgagttttgacaccaatgagcagtcgctggagcaggtcttctcaaagtacggacagatctctgaagtggtggttgtgaaagacagggagacccagagatctcggggatttgggtttgtcacctttgagaacattgacgacgctaaggatgccatgatggccatgaatgggaagtctgtagatggacggcagatccgagtagaccaggcaggcaagtcgtcagacaaccgatcccgtgggtaccgtggtggctctgccgggggccggggcttcttccgtgggggccgaggacggggccgtgggttctctagaggaggaggggaccgaggctatggggggaaccggttcgagtccaggagtgggggctacggaggctccagagactactatagcagccggagtcagagtggtggctacagtgaccggagctcgggcgggtcctacagagacagttatgacagttacgctacacacaacgagtaaaaacccttcctgctcaagatcgtccttccaatggctgtgtgtttaaagattgtgggagcttcgctgaacgttaatgtgtagtaaatgcacctccttgtattcccactttcgtagtcatttcggttctgatcttgtcaaacccagcctgaccgcttctgacgccgggatggcctcgttactagacttttctttttaaggaagtgctgtttttttttgagggttttcaaaacattttgaaaagcatttacttttttgaccacgagccatgagttttcaaaaaaatcgggggttgtgtgggtttttggtttttgttttagtttttggttgcgttgcctttttttttttagtggggttggccccatgaagtgggtgccccactcacttctctgagatcgaacggactgtgaatccgctctttgtcggaagctgagcaagctgtggcttttttccaactccgtgtgacgtttctgagtgtagtgtggtaggaccccggcgggtgtggcagcaactgccctggagccccagcccctgcgtccatctgtgctgtgcgccccacagtagacgtgcagacgtccctgagaggttcttgaagatgtttatttatattgtccttttttactggaagacgtacgcatactccatcgatgttgtatttgcagtggctgaggaattcttgtacgcagttttctttggctttacgaagccgattaaaagaccgtgtgaaatgaa

SEQ ID NO: 121351 - DNA, 584 bp, Homo sapiens
  Payload ID: 3793
  Gene Symbol: CIRBP
  Gene Name: cold inducible RNA binding protein
  ENST ID: ENST00000444172
  CDS Start-End: 1-177
cggagtcagagtggtggctacagtgaccggagctcgggcgggtcctacagagacagttatgacagttacgaagcaggccagagagcagaggcacgtggcatcccagggcgacctcagacggccagccggttagctagttctgctgttgcttcacgagttctgagcattctctgctagcctatggaagctgcagccctcggaggacagaagtgttgtgcgcccaacagaaccctctgagacgcaagctgctcccttggctagctcatatgtggaaatagccctgtaattcgaggttgaaggggcccggccaggactcggggaagggtggcctgagagcagcgatgacctctggggtcactgtcccaggagggacttcacctggaacaagagctggaggcagccgcttgcccaggaggcttgtcccctgaggcgcttcgccagtgaggtgcgggctcagggcctcgagtctctcctggagcacgggctgcggtgcgccggcagcttacggggcggccagtccttgcccacaacgatgtggagccctgtgaaagtcggattcgaataaagggccacgtgtgcaccca

SEQ ID NO: 121352 - DNA, 1606 bp, Homo sapiens
  Payload ID: 3793
  Gene Symbol: CIRBP
  Gene Name: cold inducible RNA binding protein
  Uniprot ID: Q14011
  ENST ID: ENST00000413636
  CDS Start-End: 86-877
ctcactcgcgcgttaggaggctcgggtcgttgtggtgcgctgtcttcccgcttgcgtcagggacctgcccgactcagtggccgccatggcatcagatgaaggcaaactttttgttggagggctgagttttgacaccaatgagcagtcgctggagcaggtcttctcaaagtacggacagatctctgaagtggtggttgtgaaagacagggagacccagagatctcggggatttgggtttgtcacctttgagaacattgacgacgctaaggatgccatgatggccatgaatgggaagtctgtagatggacggcagatccgagtagaccaggcaggaggaggggaccgaggctatggggggaaccggttcgagtccaggagtgggggctacggaggctccagagactactatagcagccggagtcagagtggtggctacagtgaccggagctcgggcgggtcctacagagacagttatgacagttacggtaagtcacactccgagggcgccacgctgctgtggcctgcggtgggagctcggttcaccttggtgccctctccaagcactttaggctggacactcagaccttgtcactgtgcttgcccagaagaggcgcatctgtcctctcagagccatttctatcgcaggacgcaaaagccaaatgagactgaccaaaaaggcaagggagagcgagggcccgctgggcagtcagctaggtgcatgtgtggccgcaggccagcctccctcggctgtggggggtggttgctccccggccgcaggccgcgccctggtctggcctctggggtgaagctgcctcttgttgcttcggtgcctttacactgtgcctgcttcttgtcctcagctacacacaacgagtaaaaacccttcctgctcaagatcgtccttccaatggctgtgtgtttaaagattgtgggagcttcgctgaacgttaatgtgtagtaaatgcacctccttgtattcccactttcgtagtcatttcggttctgatcttgtcaaacccagcctgaccgcttctgacgccgggatggcctcgttactagacttttctttttaaggaagtgctgtttttttttgagggttttcaaaacattttgaaaagcatttacttttttgaccacgagccatgagttttcaaaaaaatcgggggttgtgtgggtttttggtttttgttttagtttttggttgcgttgcctttttttttttagtggggttggccccatgaagtgggtgccccactcacttctctgagatcgaacggactgtgaatccgctctttgtcggaagctgagcaagctgtggcttttttccaactccgtgtgacgtttctgagtgtagtgtggtaggaccccggcgggtgtggcagcaactgccctggagccccagcccctgcgtccatctgtgctgtgcgccccacagtagacgtgcagacgtccctgagaggttcttgaagatgtttatttatattgtccttttttactggaagacgtacgcatactccatcgatgttgtatttgcagtggctgaggaattcttgtacgcagttttctttggctttacgaagccgattaaaagaccgtgtgaaatgaa

SEQ ID NO: 121353 - DNA, 905 bp, Homo sapiens
  Payload ID: 3793
  Gene Symbol: CIRBP
  Gene Name: cold inducible RNA binding protein
  ENST ID: ENST00000590171
  CDS Start-End: 62-244
ggtcgttgtggtgcgctgtcttcccgcttgcgtcagggacctgcccgactcagtggccgccatggcatcagatgaaggcaaactttttgttggagggctgagttttgacaccaatgagcagtcgctggagcaggtcttctcaaagtacggacagatctctgaagacctctctcccctgcacagtggtggttgtgaaagacagggagacccagagatctcggggatttgggtttgtcacctttgagaacattgacgacgctaaggatgccatgatggccatgaatgggaagtctgtagatggacggcagatccgagtagaccaggcaggcaagtcgtcagacaaccgatcccgtgggtaccgtggtggctctgccgggggccggggcttcttccgtgggggccgaggacggggccgtgggttctctagaggaggaggggaccgaggctatggggggaaccggttcgagtccaggagtgggggctacggaggctccagagactactatagcagccggagtcagagtggtggctacagtgaccggagctcgggcgggtcctacagagacagttatgacagttacggtaagtcacactccgagggcgccacgctgctgtggcctgcggtgggagctcggttcaccttggtgccctctccaagcactttaggctggacactcagaccttgtcactgtgcttgcccagaagaggcgcatctgtcctctcagagccatttctatcgcaggacgcaaaagccaaatgagactgaccaaaaaggcaagggagagcgagggcccgctgggcagtcagctaggtgcatgtgtggccgcaggccagcctccctcggctgtggggggtggttgctccccggccgcaggccgcgccctggtctggcctctggggtgaag

SEQ ID NO: 121354 - DNA, 830 bp, Homo sapiens
  Payload ID: 3793
  Gene Symbol: CIRBP
  Gene Name: cold inducible RNA binding protein
  ENST ID: ENST00000591376
  CDS Start-End: 70-309
gaggctcgggtcgttgtggtgcgctgtcttcccgcttgcgtcagggacctgcccgactcagtggccgccatggcatcagatgaaggcaaactttttgttggagggctgagttttgacaccaatgagcagtcgctggagcaggtcttctcaaagtacggacagatctctgaagtctgtagatggacggcagatccgagtagaccaggcaggcaagtcgtcagacaaccgatcccgtgggtaccgtggtggctctgccgggggccggggcttcttccgtgggggccgaggacggggccgtgggttctctagaggaggaggggaccgaggctatggggggaaccggttcgagtccaggagtgggggctacggaggctccagagactactatagcagccggagtcagagtggtggctacagtgaccggagctcgggcgggtcctacagagacagttatgacagttacggttgaaggggcccggccaggactcggggaagggtggcctgagagcagcgatgacctctggggtcactgtcccaggagggacttcacctggaacaagagctggaggcagccgcttgcccaggaggcttgtcccctgaggcgcttcgccagtgaggtgcgggctcagggcctcgagtctctcctggagcacgggctgcggtgcgccggcagcttacggggcggccagtccttgcccacaacgatgtggagccctgtgaaagtcggattcgaataaagggccacgtgtgcacccagaaagccgagtctgtggttcaggggggtctgtcggcggagcggggccactggaagaaaagcctgcggacctcgg

SEQ ID NO: 121355 - DNA, 938 bp, Homo sapiens
  Payload ID: 3793
  Gene Symbol: CIRBP
  Gene Name: cold inducible RNA binding protein
  ENST ID: ENST00000586636
  CDS Start-End: 71-577
ggaggctcgggtcgttgtggtgcgctgtcttcccgcttgcgtcagggacctgcccgactcagtggccgccatggcatcagatgaaggcaaactttttgttggagggctgagttttgacaccaatgagcagtcgctggagcaggtcttctcaaagtacggacagatctctgaagtggtggttgtgaaagacagggagacccagagatctcggggatttgggtttgtcacctttgagaacattgacgacgctaaggatgccatgatggccatgaatgggaagtctgtagatggacggcagatccgagtagaccaggcaggcaagtcgtcagacaaccgatcccgtgggtaccgtggtggctctgccgggggccggggcttcttccgtgggggccgaggacggggccgtgggttctctagaggaggaggggaccgaggctatggggggaaccggttcgagtccaggagtgggggctacggaggctccagagactactatagcagccggagtcagagtggtggctacagtgaccggagctcgggcgggtcctacagagacagttatgacagttacggttgaaggggcccggccaggactcggggaagggtggcctgagagcagcgatgacctctggggtcactgtcccaggagggacttcacctggaacaagagctggaggcagccgcttgcccaggaggcttgtcccctgaggcgcttcgccagtgaggtgcgggctcagggcctcgagtctctcctggagcacgggctgcggtgcgccggcagcttacggggcggccagtccttgcccacaacgatgtggagccctgtgaaagtcggattcgaataaagggccacgtgtgcacccagaaagccgagtctgtggttcaggggggtctgtcggcggagcggggccactggaagaaaagcctgcggacctcgg

SEQ ID NO: 121356 - DNA, 1092 bp, Homo sapiens
  Payload ID: 3793
  Gene Symbol: CIRBP
  Gene Name: cold inducible RNA binding protein
  ENST ID: ENST00000587323
  CDS Start-End: 92-985
ccctcactcgcgcgttaggaggctcgggtcgttgtggtgcgctgtcttcccgcttgcgtcagggacctgcccgactcagtgtgtggccgccatggcatcagatgaaggcaaactttttgttggagggctgagttttgacaccaatgagcagtcgctggagcaggtcttctcaaagtacggacagatctctgaagtggtggttgtgaaagacagggagacccagagatctcggggatttgggtttgtcacctttgagaacattgacgacgctaaggatgccatgatggccatgaatgggaagtctgtagatggacggcagatccgagtagaccaggcaggcaagtcgtcagacaaccgatcccgtgggtaccgtggtggctctgccgggggccggggcttcttccgtgggggccgaggacggggccgtgggttctctagaggaggaggggaccgaggctatggggggaaccggttcgagtccaggagtgggggctacggaggctccagagactactatagcagccggagtcagagtggtggctacagtgaccggagctcgggcgggtcctacagagacagttatgacagttacggtaagtcacactccgagggcgccacgctgctgtggcctgcggtgggagctcggttcaccttggtgccctctccaagcactttaggctggacactcagaccttgtcactgtgcttgcccagaagaggcgcatctgtcctctcagagccatttctatcgcaggacgcaaaagccaaatgagactgaccaaaaaggcaagggagagcgagggcccgctgggcagtcagctaggtgcatgtgtggccgcaggccagcctccctcggctgtggggggtggttgctccccggccgcaggccgcgccctggtctggcctctggggtgaagctgcctcttgttgcttcggtgcctttacactgtgcctgcttcttgtcctcagctacacacaacgagtaaaaacccttcctgctcaagatcgtccttccaatggctgtgtgtttaaagattgtgggagcttcgctgaacgttaatgtgtagtaaatgcacctccttgtattcccact

SEQ ID NO: 121357 - DNA, 3028 bp, Homo sapiens
  Payload ID: 3793
  Gene Symbol: CIRBP
  Gene Name: cold inducible RNA binding protein
  ENST ID: ENST00000587169
  CDS Start-End: 83-322
actcgcgcgttaggaggctcgggtcgttgtggtgcgctgtcttcccgcttgcgtcagggacctgcccgactcagtggccgccatggcatcagatgaaggcaaactttttgttggagggctgagttttgacaccaatgagcagtcgctggagcaggtcttctcaaagtacggacagatctctgaagtctgtagatggacggcagatccgagtagaccaggcaggcaagtcgtcagacaaccgatcccgtgggtaccgtggtggctctgccgggggccggggcttcttccgtgggggccgaggacggggccgtgggttctctagaggaggaggggaccgaggctatggggggaaccggttcgagtccaggagtgggggctacggaggctccagagactactatagcagccggagtcagagtggtggctacagtgaccggagctcgggcgggtcctacagagacagttatgacagttacggtaagtcacactccgagggcgccacgctgctgtggcctgcggtgggagctcggttcaccttggtgccctctccaagcactttaggctggacactcagaccttgtcactgtgcttgcccagaagaggcgcatctgtcctctcagagccatttctatcgcaggacgcaaaagccaaatgagactgaccaaaaaggcaagggagagcgagggcccgctgggcagtcagctaggtgcatgtgtggccgcaggccagcctccctcggctgtggggggtggttgctccccggccgcaggccgcgccctggtctggcctctggggtgaagctgcctcttgttgcttcggtgcctttacactgtgcctgcttcttgtcctcagctacacacaacgagtaaaaacccttcctgctcaagatcgtccttccaatggctgtgtgtttaaagattgtgggagcttcgctgaacgttaatgtgtagtaaatgcacctccttgtattcccactttcgtagtcatttcggttctgatcttgtcaaacccagcctgaccgcttctgacgccgggatggcctcgttactagacttttctttttaaggaagtgctgtttttttttgagggttttcaaaacattttgaaaagcatttacttttttgaccacgagccatgagttttcaaaaaaatcgggggttgtgtgggtttttggtttttgttttagtttttggttgcgttgcctttttttttttagtggggttggccccatgaagtgggtgccccactcacttctctgagatcgaacggactgtgaatccgctctttgtcggaagctgagcaagctgtggcttttttccaactccgtgtgacgtttctgagtgtagtgtggtaggaccccggcgggtgtggcagcaactgccctggagccccagcccctgcgtccatctgtgctgtgcgccccacagtagacgtgcagacgtccctgagaggttcttgaagatgtttatttatattgtccttttttactggaagacgtacgcatactccatcgatgttgtatttgcagtggctgaggaattcttgtacgcagttttctttggctttacgaagccgattaaaagaccgtgtgaaatgaaccttgctctgacaattcccttgcattgcaccacacactccttgctgcgggctcctgcagccagacctgagcagagagagaaggtggagaagcagcgggtctgcaagccttccctggggcctgcagagctagaaagggaggcccagcagactggcgctggtcagggtaggggagccaggcgggggacgggagcgggcagctcaggcctcagggcagccctgggaggcttctggcagtggtggccagagggctggactgtgcgggcagcttagcagggacagtggacgtgcacctgacgctgacctggactgcctcagtctagaagcaggccagagagcagaggcacgtggcatcccagggcgacctcagacggccagccggttagctagttctgctgttgcttcacgagttctgagcattctctgctagcctatggaagctgcagccctcggaggacagaagtgttgtgcgcccaacagaaccctctgagacgcaagctgctcccttggctagctcatatgtggaaatagccctgtaattcgaggtaactccttccgctcgtgtccacatccctcttgttgagagctcactgaaagtcatgtgcccggggaatgttcctgtgactgttttttgtttttccttttttttttaactttgtttttgtttttttcaattaagctggaactaaagtcaggcccagccattacgctccccacgtgcagccaggtgcagcctgggcccagtcatgcctggctcatagatgaaatcccttaagcaggattgaagaccagtgaacgcccccgccttttggattttttgctcaattgaccgtcttttccagacctctttaagtcacactcttaacttagctttctctgatgtctgttgccgccattagtttttttctagagcccacactggcccacatagctccatcccatacgggtagctggctccagctgcgccaaggtgcagacccgccctgggcatgctggcctgtgacggagcctgaggtcacagccccctgactagcctgagaccttcctaggggctgtggctgtttccggggaggccgggaggggcagctgtgagccctgtggaggacgttgggagtaacgctgctttgctttggcaggttgaaggggcccggccaggactcggggaagggtggcctgagagcagcgatgacctctggggtcactgtcccaggagggacttcacctggaacaagagctggaggcagccgcttgcccaggaggcttgtcccctgaggcgcttcgccagtgaggtgcgggctcagggcctcgagtctctcctggagcacgggctgcggtgcgccggcagcttacggggcggccagtccttgcccacaacgatgtggagccctgtgaaagtcggattcgaataaagggccacgtgtgcacccagaaa

SEQ ID NO: 121358 - DNA, 532 bp, Homo sapiens
  Payload ID: 3793
  Gene Symbol: CIRBP
  Gene Name: cold inducible RNA binding protein
  ENST ID: ENST00000589686
  CDS Start-End: 87-532
cctcactcgcgcgttaggaggctcgggtcgttgtggtgcgctgtcttcccgcttgcgtcagggacctgcccgactcagtggccgccatggcatcagatgaaggcaaactttttgttggagggctgagttttgacaccaatgagcagtcgctggagcaggtcttctcaaagtacggacagatctctgaagtggtggttgtgaaagacagggagacccagagatctcggggatttgggtttgtcacctttgagaacattgacgacgctaaggatgccatgatggccatgaatgggaagtctgtagatggacggcagatccgagtagaccaggcaggcaagtcgtcagacaaccgatcccgtgggtaccgtggtggctctgccgggggccggggcttcttccgtgggggccgaggacggggccgtgggttctctagaggaggaggggaccgaggctatggggggaaccggttcgagtccaggagtgggggctacggaggctccagagactactatagcagccggagtcagagtgg

SEQ ID NO: 121359 - DNA, 619 bp, Homo sapiens
  Payload ID: 3793
  Gene Symbol: CIRBP
  Gene Name: cold inducible RNA binding protein
  ENST ID: ENST00000588411
  CDS Start-End: 305-619
ccgagggtctgacggctgcggcggggcctggacggaagagggggcgagccccggggcgccgcacgtggacccccggcacgggcacgctcacgtgcacccgtcctttcacgccaacgcgtttcctgctgcccccacccctgcaccactgcacgtcccagaccccggcccagcctccccgcggtccctaggctgggggagctcagacaggaggctaggaggagggggactttggggctgaggctttgccaaaggagcaggagtttgccaagtgttgtaggaagcgggaagggtgcgccaggccgccatggcatcagatgaaggcaaactttttgttggagggctgagttttgacaccaatgagcagtcgctggagcaggtcttctcaaagtacggacagatctctgaagtggtggttgtgaaagacagggagacccagagatctcggggatttgggtttgtcacctttgagaacattgacgacgctaaggatgccatgatggccatgaatgggaagtctgtagatggacggcagatccgagtagaccaggcaggcaagtcgtcagacaaccgatcccgtgggtaccgtggtggctctgccgggggccggggcttcttccgt

SEQ ID NO: 121360 - DNA, 1013 bp, Homo sapiens
  Payload ID: 3793
  Gene Symbol: CIRBP
  Gene Name: cold inducible RNA binding protein
  ENST ID: ENST00000588230
  CDS Start-End: 86-979
ctcactcgcgcgttaggaggctcgggtcgttgtggtgcgctgtcttcccgcttgcgtcagggacctgcccgactcagtggccgccatggcatcagatgaaggcaaactttttgttggagggctgagttttgacaccaatgagcagtcgctggagcaggtcttctcaaagtacggacagatctctgaagtggtggttgtgaaagacagggagacccagagatctcggggatttgggtttgtcacctttgagaacattgacgacgctaaggatgccatgatggccatgaatgggaagtctgtagatggacggcagatccgagtagaccaggcaggcaagtcgtcagacaaccgatcccgtgggtaccgtggtggctctgccgggggccggggcttcttccgtgggggccgaggacggggccgtgggttctctagaggaggaggggaccgaggctatggggggaaccggttcgagtccaggagtgggggctacggaggctccagagactactatagcagccggagtcagagtggtggctacagtgaccggagctcgggcgggtcctacagagacagttatgacagttacggtaagtcacactccgagggcgccacgctgctgtggcctgcggtgggagctcggttcaccttggtgccctctccaagcactttaggctggacactcagaccttgtcactgtgcttgcccagaagaggcgcatctgtcctctcagagccatttctatcgcaggacgcaaaagccaaatgagactgaccaaaaaggcaagggagagcgagggcccgctgggcagtcagctaggtgcatgtgtggccgcaggccagcctccctcggctgtggggggtggttgctccccggccgcaggccgcgccctggtctggcctctggggtgaagctgcctcttgttgcttcggtgcctttacactgtgcctgcttcttgtcctcagctacacacaacgagtaaaaacccttcctgctcaagatcgtccttccaatgg

SEQ ID NO: 121361 - DNA, 1303 bp, Homo sapiens
  Payload ID: 3793
  Gene Symbol: CIRBP
  Gene Name: cold inducible RNA binding protein
  Uniprot ID: Q14011
  ENST ID: ENST00000586472
  CDS Start-End: 56-574
cgacgccccgcaggggaggaggcccgggaggagtatcagggtgcaggaggccgccatggcatcagatgaaggcaaactttttgttggagggctgagttttgacaccaatgagcagtcgctggagcaggtcttctcaaagtacggacagatctctgaagtggtggttgtgaaagacagggagacccagagatctcggggatttgggtttgtcacctttgagaacattgacgacgctaaggatgccatgatggccatgaatgggaagtctgtagatggacggcagatccgagtagaccaggcaggcaagtcgtcagacaaccgatcccgtgggtaccgtggtggctctgccgggggccggggcttcttccgtgggggccgaggacggggccgtgggttctctagaggaggaggggaccgaggctatggggggaaccggttcgagtccaggagtgggggctacggaggctccagagactactatagcagccggagtcagagtggtggctacagtgaccggagctcgggcgggtcctacagagacagttatgacagttacgctacacacaacgagtaaaaacccttcctgctcaagatcgtccttccaatggctgtgtgtttaaagattgtgggagcttcgctgaacgttaatgtgtagtaaatgcacctccttgtattcccactttcgtagtcatttcggttctgatcttgtcaaacccagcctgaccgcttctgacgccgggatggcctcgttactagacttttctttttaaggaagtgctgtttttttttgagggttttcaaaacattttgaaaagcatttacttttttgaccacgagccatgagttttcaaaaaaatcgggggttgtgtgggtttttggtttttgttttagtttttggttgcgttgcctttttttttttagtggggttggccccatgaagtgggtgccccactcacttctctgagatcgaacggactgtgaatccgctctttgtcggaagctgagcaagctgtggcttttttccaactccgtgtgacgtttctgagtgtagtgtggtaggaccccggcgggtgtggcagcaactgccctggagccccagcccctgcgtccatctgtgctgtgcgccccacagtagacgtgcagacgtccctgagaggttcttgaagatgtttatttatattgtccttttttactggaagacgtacgcatactccatcgatgttgtatttgcagtggctgaggaattcttgtacgcagttttctttggctttacgaagccgattaaaagaccgtgtgaaatgaa

SEQ ID NO: 121362 - DNA, 1081 bp, Homo sapiens
  Payload ID: 3793
  Gene Symbol: CIRBP
  Gene Name: cold inducible RNA binding protein
  ENST ID: ENST00000587896
  CDS Start-End: 81-974
tcgcgcgttaggaggctcgggtcgttgtggtgcgctgtcttcccgcttgcgtcagggacctgcccgactcagtggccgccatggcatcagatgaaggcaaactttttgttggagggctgagttttgacaccaatgagcagtcgctggagcaggtcttctcaaagtacggacagatctctgaagtggtggttgtgaaagacagggagacccagagatctcggggatttgggtttgtcacctttgagaacattgacgacgctaaggatgccatgatggccatgaatgggaagtctgtagatggacggcagatccgagtagaccaggcaggcaagtcgtcagacaaccgatcccgtgggtaccgtggtggctctgccgggggccggggcttcttccgtgggggccgaggacggggccgtgggttctctagaggaggaggggaccgaggctatggggggaaccggttcgagtccaggagtgggggctacggaggctccagagactactatagcagccggagtcagagtggtggctacagtgaccggagctcgggcgggtcctacagagacagttatgacagttacggtaagtcacactccgagggcgccacgctgctgtggcctgcggtgggagctcggttcaccttggtgccctctccaagcactttaggctggacactcagaccttgtcactgtgcttgcccagaagaggcgcatctgtcctctcagagccatttctatcgcaggacgcaaaagccaaatgagactgaccaaaaaggcaagggagagcgagggcccgctgggcagtcagctaggtgcatgtgtggccgcaggccagcctccctcggctgtggggggtggttgctccccggccgcaggccgcgccctggtctggcctctggggtgaagctgcctcttgttgcttcggtgcctttacactgtgcctgcttcttgtcctcagctacacacaacgagtaaaaacccttcctgctcaagatcgtccttccaatggctgtgtgtttaaagattgtgggagcttcgctgaacgttaatgtgtagtaaatgcacctccttgtattcccact

SEQ ID NO: 121363 - DNA, 870 bp, Homo sapiens
  Payload ID: 3793
  Gene Symbol: CIRBP
  Gene Name: cold inducible RNA binding protein
  Uniprot ID: Q14011
  ENST ID: ENST00000585630
  CDS Start-End: 213-731
ccaggatgtgtagggggcggggcccggcggaagcgtatataaggccgggctcggggacgcccccccctcactcgcgcgttaggaggctcgggtcgttgtggtgcgctgtcttcccgcttgcgtcagggacctgcccgactcagtggaagcggggagaggtggtgagagatgacccctgttgaggatttcattggtgtctgccacaggccgccatggcatcagatgaaggcaaactttttgttggagggctgagttttgacaccaatgagcagtcgctggagcaggtcttctcaaagtacggacagatctctgaagtggtggttgtgaaagacagggagacccagagatctcggggatttgggtttgtcacctttgagaacattgacgacgctaaggatgccatgatggccatgaatgggaagtctgtagatggacggcagatccgagtagaccaggcaggcaagtcgtcagacaaccgatcccgtgggtaccgtggtggctctgccgggggccggggcttcttccgtgggggccgaggacggggccgtgggttctctagaggaggaggggaccgaggctatggggggaaccggttcgagtccaggagtgggggctacggaggctccagagactactatagcagccggagtcagagtggtggctacagtgaccggagctcgggcgggtcctacagagacagttatgacagttacgctacacacaacgagtaaaaacccttcctgctcaagatcgtccttccaatggctgtgtgtttaaagattgtgggagcttcgctgaacgttaatgtgtagtaaatgcacctccttgtattcccactttcgtagtcatttcggttctgatcttgtcaaa

SEQ ID NO: 121364 - DNA, 571 bp, Homo sapiens
  Payload ID: 3793
  Gene Symbol: CIRBP
  Gene Name: cold inducible RNA binding protein
  ENST ID: ENST00000592234
  CDS Start-End: 1-220
tctgaaggaggaggggaccgaggctatggggggaaccggttcgagtccaggagtgggggctacggaggctccagagactactatagcagccggagtcagagtggtggctacagtgaccggagctcgggcgggtcctacagagacagttatgacagttacgcctatggaagctgcagccctcggaggacagaagtgttgtgcgcccaacagaaccctctgagacgcaagctgctcccttggctagctcatatgtggaaatagccctgtaattcgaggttgaaggggcccggccaggactcggggaagggtggcctgagagcagcgatgacctctggggtcactgtcccaggagggacttcacctggaacaagagctggaggcagccgcttgcccaggaggcttgtcccctgaggcgcttcgccagtgaggtgcgggctcagggcctcgagtctctcctggagcacgggctgcggtgcgccggcagcttacggggcggccagtccttgcccacaacgatgtggagccctgtgaaagtcggattcgaataaagggccacgtgtgcacccagaaa

SEQ ID NO: 121365 - DNA, 1459 bp, Homo sapiens
  Payload ID: 3793
  Gene Symbol: CIRBP
  Gene Name: cold inducible RNA binding protein
  Uniprot ID: Q14011
  ENST ID: ENST00000588090
  CDS Start-End: 212-730
aaacgccgcggacggagcgaggccgcagcgccccctggtgtccgcaacgggcagcgcgtcccggtcgggtcccgcatggtcagtggccagcaggggtggatgaaggggtcccagccgcctgagacccccggtggggacacaggatcgcggtgagatacctgggagtcacgggtgctcgcagacgcagctgaccccagaggcacaggccgccatggcatcagatgaaggcaaactttttgttggagggctgagttttgacaccaatgagcagtcgctggagcaggtcttctcaaagtacggacagatctctgaagtggtggttgtgaaagacagggagacccagagatctcggggatttgggtttgtcacctttgagaacattgacgacgctaaggatgccatgatggccatgaatgggaagtctgtagatggacggcagatccgagtagaccaggcaggcaagtcgtcagacaaccgatcccgtgggtaccgtggtggctctgccgggggccggggcttcttccgtgggggccgaggacggggccgtgggttctctagaggaggaggggaccgaggctatggggggaaccggttcgagtccaggagtgggggctacggaggctccagagactactatagcagccggagtcagagtggtggctacagtgaccggagctcgggcgggtcctacagagacagttatgacagttacgctacacacaacgagtaaaaacccttcctgctcaagatcgtccttccaatggctgtgtgtttaaagattgtgggagcttcgctgaacgttaatgtgtagtaaatgcacctccttgtattcccactttcgtagtcatttcggttctgatcttgtcaaacccagcctgaccgcttctgacgccgggatggcctcgttactagacttttctttttaaggaagtgctgtttttttttgagggttttcaaaacattttgaaaagcatttacttttttgaccacgagccatgagttttcaaaaaaatcgggggttgtgtgggtttttggtttttgttttagtttttggttgcgttgcctttttttttttagtggggttggccccatgaagtgggtgccccactcacttctctgagatcgaacggactgtgaatccgctctttgtcggaagctgagcaagctgtggcttttttccaactccgtgtgacgtttctgagtgtagtgtggtaggaccccggcgggtgtggcagcaactgccctggagccccagcccctgcgtccatctgtgctgtgcgccccacagtagacgtgcagacgtccctgagaggttcttgaagatgtttatttatattgtccttttttactggaagacgtacgcatactccatcgatgttgtatttgcagtggctgaggaattcttgtacgcagttttctttggctttacgaagccgattaaaagaccgtgtgaaatgaa

SEQ ID NO: 121366 - DNA, 928 bp, Homo sapiens
  Payload ID: 3793
  Gene Symbol: CIRBP
  Gene Name: cold inducible RNA binding protein
  ENST ID: ENST00000591055
  CDS Start-End: 70-477
gaggctcgggtcgttgtggtgcgctgtcttcccgcttgcgtcagggacctgcccgactcagtggccgccatggcatcagatgaaggcaaactttttgttggagggctgagttttgacaccaatgagcagtcgctggagcaggtcttctcaaagtacggacagatctctgaagtggtggttgtgaaagacagggagacccagagatctcggggatttgggtttgtcacctttgagaacattgacgacgctaaggatgccatgatggccatgaatgggaaggtgaggatcagggtgctgagcaggagtcccgtctcgaggatggggcacccacctgctaacccgtcccgccctctgtctccagtctgtagatggacggcagatccgagtagaccaggcaggaggaggggaccgaggctatggggggaaccggttcgagtccaggagtgggggctacggaggctccagagactactatagcagccggagtcagagtggtggctacagtgaccggagctcgggcgggtcctacagagacagttatgacagttacgctacacacaacgagtaaaaacccttcctgctcaagatcgtccttccaatggctgtgtgtttaaagattgtgggagcttcgctgaacgttaatgtgtagtaaatgcacctccttgtattcccactttcgtagtcatttcggttctgatcttgtcaaacccagcctgaccgcttctgacgccgggatggcctcgttactagacttttctttttaaggaagtgctgtttttttttgagggttttcaaaacattttgaaaagcatttacttttttgaccacgagccatgagttttcaaaaaaatcgggggttgtgtgggtttttggtttttgttttagtttttggttgcgttgcctttttttttttagtggggttggcccc

SEQ ID NO: 121367 - DNA, 370 bp, Homo sapiens
  Payload ID: 3793
  Gene Symbol: CIRBP
  Gene Name: cold inducible RNA binding protein
  ENST ID: ENST00000588344
  CDS Start-End: 1-270
gatgaaggcaaactttttgttggagggctgagttttgacaccaatgagcagtcgctggagcaggtcttctcaaagtacggacagatctctgaagtggtggttgtgaaagacagggagacccagagatctcggggatttgggtttgtcacctttgagaacattgacgacgctaaggatgccatgatggccatgaatgggaagtctgtagatggacggcagatccgagtagaccagcccctgcgtccatctgtgctgtgcgccccacagtagacgtgcagacgtccctgagaggttcttgaagatgtttatttatattgtccttttttactggaagacgtacgcatactccatcgatgttgtatttgcagtg

SEQ ID NO: 121368 - DNA, 1734 bp, Homo sapiens
  Payload ID: 3793
  Gene Symbol: CIRBP
  Gene Name: cold inducible RNA binding protein
  ENST ID: ENST00000586548
  CDS Start-End: 112-590
acagatgcaaagcggcaggtgtgcgcaggtgcgtgtcaacgccaccctgggaacccaggatggctgcggacactcacggagcccgcacccaggaacccgctcgtagccgccatggcatcagatgaaggcaaactttttgttggagggctgagttttgacaccaatgagcagtcgctggagcaggtcttctcaaagtacggacagatctctgaagtggtggttgtgaaagacagggagacccagagatctcggggatttgggtttgtcacctttgagaacattgacgacgctaaggatgccatgatggccatgaatgggaagtctgtagatggacggcagatccgagtagaccaggcaggcaagtcgtcagacaaccgatcccgtgggtaccgtggtggctctgccgggggccggggcttcttccgtgggggccgaggacggggccgtgggttctctagaggaggaggggaccgaggctatggggggaaccggttcgagtccaggagtgggggctacggaggctccagagactactatagcagccggagtcagagtggtggctacagtgaccggagctcgggcgggtcctacagagacagttatgacagttacggtaagtcacactccgagggcgccacgctgctgtggcctgcggtgggagctcggttcaccttggtgccctctccaagcactttaggctggacactcagaccttgtcactgtgcttgcccagaagaggcgcatctgtcctctcagagccatttctatcgcaggacgcaaaagccaaatgagactgaccaaaaaggcaagggagagcgagggcccgctgggcagtcagctaggtgcatgtgtggccgcaggccagcctccctcggctgtggggggtggttgctccccggccgcaggccgcgccctggtctggcctctggggtgaagctgcctcttgttgcttcggtgcctttacactgtgcctgcttcttgtcctcagctacacacaacgagtaaaaacccttcctgctcaagatcgtccttccaatggctgtgtgtttaaagattgtgggagcttcgctgaacgttaatgtgtagtaaatgcacctccttgtattcccactttcgtagtcatttcggttctgatcttgtcaaacccagcctgaccgcttctgacgccgggatggcctcgttactagacttttctttttaaggaagtgctgtttttttttgagggttttcaaaacattttgaaaagcatttacttttttgaccacgagccatgagttttcaaaaaaatcgggggttgtgtgggtttttggtttttgttttagtttttggttgcgttgcctttttttttttagtggggttggccccatgaagtgggtgccccactcacttctctgagatcgaacggactgtgaatccgctctttgtcggaagctgagcaagctgtggcttttttccaactccgtgtgacgtttctgagtgtagtgtggtaggaccccggcgggtgtggcagcaactgccctggagccccagcccctgcgtccatctgtgctgtgcgccccacagtagacgtgcagacgtccctgagaggttcttgaagatgtttatttatattgtccttttttactggaagacgtacgcatactccatcgatgttgtatttgcagtggctgaggaattcttgtacgcagttttctttggctttacgaagccgattaaaagaccgtgtgaaatgaa

SEQ ID NO: 121369 - DNA, 1835 bp, Homo sapiens
  Payload ID: 3793
  Gene Symbol: CIRBP
  Gene Name: cold inducible RNA binding protein
  ENST ID: ENST00000589710
  CDS Start-End: 213-1106
ccaggatgtgtagggggcggggcccggcggaagcgtatataaggccgggctcggggacgcccccccctcactcgcgcgttaggaggctcgggtcgttgtggtgcgctgtcttcccgcttgcgtcagggacctgcccgactcagtggaagcggggagaggtggtgagagatgacccctgttgaggatttcattggtgtctgccacaggccgccatggcatcagatgaaggcaaactttttgttggagggctgagttttgacaccaatgagcagtcgctggagcaggtcttctcaaagtacggacagatctctgaagtggtggttgtgaaagacagggagacccagagatctcggggatttgggtttgtcacctttgagaacattgacgacgctaaggatgccatgatggccatgaatgggaagtctgtagatggacggcagatccgagtagaccaggcaggcaagtcgtcagacaaccgatcccgtgggtaccgtggtggctctgccgggggccggggcttcttccgtgggggccgaggacggggccgtgggttctctagaggaggaggggaccgaggctatggggggaaccggttcgagtccaggagtgggggctacggaggctccagagactactatagcagccggagtcagagtggtggctacagtgaccggagctcgggcgggtcctacagagacagttatgacagttacggtaagtcacactccgagggcgccacgctgctgtggcctgcggtgggagctcggttcaccttggtgccctctccaagcactttaggctggacactcagaccttgtcactgtgcttgcccagaagaggcgcatctgtcctctcagagccatttctatcgcaggacgcaaaagccaaatgagactgaccaaaaaggcaagggagagcgagggcccgctgggcagtcagctaggtgcatgtgtggccgcaggccagcctccctcggctgtggggggtggttgctccccggccgcaggccgcgccctggtctggcctctggggtgaagctgcctcttgttgcttcggtgcctttacactgtgcctgcttcttgtcctcagctacacacaacgagtaaaaacccttcctgctcaagatcgtccttccaatggctgtgtgtttaaagattgtgggagcttcgctgaacgttaatgtgtagtaaatgcacctccttgtattcccactttcgtagtcatttcggttctgatcttgtcaaacccagcctgaccgcttctgacgccgggatggcctcgttactagacttttctttttaaggaagtgctgtttttttttgagggttttcaaaacattttgaaaagcatttacttttttgaccacgagccatgagttttcaaaaaaatcgggggttgtgtgggtttttggtttttgttttagtttttggttgcgttgcctttttttttttagtggggttggccccatgaagtgggtgccccactcacttctctgagatcgaacggactgtgaatccgctctttgtcggaagctgagcaagctgtggcttttttccaactccgtgtgacgtttctgagtgtagtgtggtaggaccccggcgggtgtggcagcaactgccctggagccccagcccctgcgtccatctgtgctgtgcgccccacagtagacgtgcagacgtccctgagaggttcttgaagatgtttatttatattgtccttttttactggaagacgtacgcatactccatcgatgttgtatttgcagtggctgaggaattcttgtacgcagttttctttggctttacgaagccgattaaaagaccgtgtgaaatgaa

SEQ ID NO: 121370 - DNA, 334 bp, Homo sapiens
  Payload ID: 3793
  Gene Symbol: CIRBP
  Gene Name: cold inducible RNA binding protein
  ENST ID: ENST00000592815
  CDS Start-End: 220-334
gggtcccgcatggtcagtggccagcaggggtggatgaaggggtcccagccgcctgagacccccggtggggacacaggatcgcggtgagatacctgggagtcacgggtgctcgcagacgcagctgaccccagaggcacaggtaccgacacaggtccacacctggaagccggtgcacagtgctcggcacagatgcaaagcggcaggtgtgcgcaggccgccatggcatcagatgaaggcaaactttttgttggagggctgagttttgacaccaatgagcagtcgctggagcaggtcttctcaaagtacggacagatctctgaagtggtggttgtga

SEQ ID NO: 121371 - DNA, 616 bp, Homo sapiens
  Payload ID: 3793
  Gene Symbol: CIRBP
  Gene Name: cold inducible RNA binding protein
  ENST ID: ENST00000589266
  CDS Start-End: 375-616
actctgactgatccccgcgcctcgccgggcaggggcgagccccgcgcgtcgggcccggaatagcagtctcgcccccgcccggcgcggctattttgagctcctccgttggggccgaggcgcgggggcggcgggaggctgggggtcgacacgcaggctgcgtcctcgccccgcgagattggacccctcgaggactgtgcgctgtggccgcgcagggctgggcggcggggccccctctcccacgcgaggcgtctgcgtggagcggcggcaccgggagcccggccgctcgagccaaacgccgcggacggagcgaggccgcagcgccccctggtgtccgcaacgggcagcgcgtcccggtcgggtcccgcatggccgccatggcatcagatgaaggcaaactttttgttggagggctgagttttgacaccaatgagcagtcgctggagcaggtcttctcaaagtacggacagatctctgaagtggtggttgtgaaagacagggagacccagagatctcggggatttgggtttgtcacctttgagaacattgacgacgctaaggatgccatgatggccatgaatgggaagtctgtagatggacggcagatccgagtagacca

SEQ ID NO: 121372 - DNA, 3117 bp, Homo sapiens
  Payload ID: 3793
  Gene Symbol: CIRBP
  Gene Name: cold inducible RNA binding protein
  ENST ID: ENST00000590347
  CDS Start-End: 85-492
tcactcgcgcgttaggaggctcgggtcgttgtggtgcgctgtcttcccgcttgcgtcagggacctgcccgactcagtggccgccatggcatcagatgaaggcaaactttttgttggagggctgagttttgacaccaatgagcagtcgctggagcaggtcttctcaaagtacggacagatctctgaagtggtggttgtgaaagacagggagacccagagatctcggggatttgggtttgtcacctttgagaacattgacgacgctaaggatgccatgatggccatgaatgggaaggtgaggatcagggtgctgagcaggagtcccgtctcgaggatggggcacccacctgctaacccgtcccgccctctgtctccagtctgtagatggacggcagatccgagtagaccaggcaggaggaggggaccgaggctatggggggaaccggttcgagtccaggagtgggggctacggaggctccagagactactatagcagccggagtcagagtggtggctacagtgaccggagctcgggcgggtcctacagagacagttatgacagttacggtaagtcacactccgagggcgccacgctgctgtggcctgcggtgggagctcggttcaccttggtgccctctccaagcactttaggctggacactcagaccttgtcactgtgcttgcccagaagaggcgcatctgtcctctcagagccatttctatcgcaggacgcaaaagccaaatgagactgaccaaaaaggcaagggagagcgagggcccgctgggcagtcagctaggtgcatgtgtggccgcaggccagcctccctcggctgtggggggtggttgctccccggccgcaggccgcgccctggtctggcctctggggtgaagctgcctcttgttgcttcggtgcctttacactgtgcctgcttcttgtcctcagctacacacaacgagtaaaaacccttcctgctcaagatcgtccttccaatggctgtgtgtttaaagattgtgggagcttcgctgaacgttaatgtgtagtaaatgcacctccttgtattcccactttcgtagtcatttcggttctgatcttgtcaaacccagcctgaccgcttctgacgccgggatggcctcgttactagacttttctttttaaggaagtgctgtttttttttgagggttttcaaaacattttgaaaagcatttacttttttgaccacgagccatgagttttcaaaaaaatcgggggttgtgtgggtttttggtttttgttttagtttttggttgcgttgcctttttttttttagtggggttggccccatgaagtgggtgccccactcacttctctgagatcgaacggactgtgaatccgctctttgtcggaagctgagcaagctgtggcttttttccaactccgtgtgacgtttctgagtgtagtgtggtaggaccccggcgggtgtggcagcaactgccctggagccccagcccctgcgtccatctgtgctgtgcgccccacagtagacgtgcagacgtccctgagaggttcttgaagatgtttatttatattgtccttttttactggaagacgtacgcatactccatcgatgttgtatttgcagtggctgaggaattcttgtacgcagttttctttggctttacgaagccgattaaaagaccgtgtgaaatgaaccttgctctgacaattcccttgcattgcaccacacactccttgctgcgggctcctgcagccagacctgagcagagagagaaggtggagaagcagcgggtctgcaagccttccctggggcctgcagagctagaaagggaggcccagcagactggcgctggtcagggtaggggagccaggcgggggacgggagcgggcagctcaggcctcagggcagccctgggaggcttctggcagtggtggccagagggctggactgtgcgggcagcttagcagggacagtggacgtgcacctgacgctgacctggactgcctcagtctagaagcaggccagagagcagaggcacgtggcatcccagggcgacctcagacggccagccggttagctagttctgctgttgcttcacgagttctgagcattctctgctagcctatggaagctgcagccctcggaggacagaagtgttgtgcgcccaacagaaccctctgagacgcaagctgctcccttggctagctcatatgtggaaatagccctgtaattcgaggtaactccttccgctcgtgtccacatccctcttgttgagagctcactgaaagtcatgtgcccggggaatgttcctgtgactgttttttgtttttccttttttttttaactttgtttttgtttttttcaattaagctggaactaaagtcaggcccagccattacgctccccacgtgcagccaggtgcagcctgggcccagtcatgcctggctcatagatgaaatcccttaagcaggattgaagaccagtgaacgcccccgccttttggattttttgctcaattgaccgtcttttccagacctctttaagtcacactcttaacttagctttctctgatgtctgttgccgccattagtttttttctagagcccacactggcccacatagctccatcccatacgggtagctggctccagctgcgccaaggtgcagacccgccctgggcatgctggcctgtgacggagcctgaggtcacagccccctgactagcctgagaccttcctaggggctgtggctgtttccggggaggccgggaggggcagctgtgagccctgtggaggacgttgggagtaacgctgctttgctttggcaggttgaaggggcccggccaggactcggggaagggtggcctgagagcagcgatgacctctggggtcactgtcccaggagggacttcacctggaacaagagctggaggcagccgcttgcccaggaggcttgtcccctgaggcgcttcgccagtgaggtgcgggctcagggcctcgagtctctcctggagcacgggctgcggtgcgccggcagcttacggggcggccagtccttgcccacaacgatgtggagccctgtgaaagtcggattcgaataaagggccacgtgtgcacccagaaa

SEQ ID NO: 121373 - DNA, 833 bp, Homo sapiens
  Payload ID: 3793
  Gene Symbol: CIRBP
  Gene Name: cold inducible RNA binding protein
  ENST ID: ENST00000585913
  CDS Start-End: 39-545
tcacggagcccgcacccaggaacccgctcgtagccgccatggcatcagatgaaggcaaactttttgttggagggctgagttttgacaccaatgagcagtcgctggagcaggtcttctcaaagtacggacagatctctgaagtggtggttgtgaaagacagggagacccagagatctcggggatttgggtttgtcacctttgagaacattgacgacgctaaggatgccatgatggccatgaatgggaagtctgtagatggacggcagatccgagtagaccaggcaggcaagtcgtcagacaaccgatcccgtgggtaccgtggtggctctgccgggggccggggcttcttccgtgggggccgaggacggggccgtgggttctctagaggaggaggggaccgaggctatggggggaaccggttcgagtccaggagtgggggctacggaggctccagagactactatagcagccggagtcagagtggtggctacagtgaccggagctcgggcgggtcctacagagacagttatgacagttacggttgaaggggcccggccaggactcggggaagggtggcctgagagcagcgatgacctctggggtcactgtcccaggagggacttcacctggaacaagagctggaggcagccgcttgcccaggaggcttgtcccctgcgcttcgccagtgaggtgcgggctcagggcctcgagtctctcctggagcacgggctgcggtgcgccggcagcttacggggcggccagtccttgcccacaacgatgtggagccctgtgaaagtcggattcgaataaagggccacgtgtgcacccagaaa

SEQ ID NO: 121374 - DNA, 746 bp, Homo sapiens
  Payload ID: 3793
  Gene Symbol: CIRBP
  Gene Name: cold inducible RNA binding protein
  ENST ID: ENST00000591935
  CDS Start-End: 71-577
ggatcgcggtgagatacctgggagtcacgggtgctcgcagacgcagctgaccccagaggcacaggccgccatggcatcagatgaaggcaaactttttgttggagggctgagttttgacaccaatgagcagtcgctggagcaggtcttctcaaagtacggacagatctctgaagtggtggttgtgaaagacagggagacccagagatctcggggatttgggtttgtcacctttgagaacattgacgacgctaaggatgccatgatggccatgaatgggaagtctgtagatggacggcagatccgagtagaccaggcaggcaagtcgtcagacaaccgatcccgtgggtaccgtggtggctctgccgggggccggggcttcttccgtgggggccgaggacggggccgtgggttctctagaggaggaggggaccgaggctatggggggaaccggttcgagtccaggagtgggggctacggaggctccagagactactatagcagccggagtcagagtggtggctacagtgaccggagctcgggcgggtcctacagagacagttatgacagttacggttgaaggggcccggccaggactcggggaagggtggcctgagagcagcgatgacctctggggtcactgtcccaggagggacttcacctggaacaagagctggaggcagccgcttgcccaggaggcttgtcccctgtaagtgctttcgggaagagtggcatgtggcgctgagccc

SEQ ID NO: 121375 - DNA, 650 bp, Homo sapiens
  Payload ID: 3793
  Gene Symbol: CIRBP
  Gene Name: cold inducible RNA binding protein
  ENST ID: ENST00000593048
  CDS Start-End: 82-321
ctcgcgcgttaggaggctcgggtcgttgtggtgcgctgtcttcccgcttgcgtcagggacctgcccgactcagtggccgccatggcatcagatgaaggcaaactttttgttggagggctgagttttgacaccaatgagcagtcgctggagcaggtcttctcaaagtacggacagatctctgaagtctgtagatggacggcagatccgagtagaccaggcaggcaagtcgtcagacaaccgatcccgtgggtaccgtggtggctctgccgggggccggggcttcttccgtgggggccgaggacggggccgtgggttctctagaggaggaggggaccgaggctatggggggaaccggttcgagtccaggagtgggggctacggaggctccagagactactatagcagccggagtcagagtggtggctacagtgaccggagctcgggcgggtcctacagagacagttatgacagttacgctacacacaacgagtaaaaacccttcctgctcaagatcgtccttccaatggctgtgtgtttaaagattgtgggagcttcgctgaacgttaatgtgtagtaaatgcacctccttgtattcccactttcgtagtcatttcggttctgatcttgtcaaacccagcctgaccgcttct

SEQ ID NO: 121376 - DNA, 1073 bp, Homo sapiens
  Payload ID: 3793
  Gene Symbol: CIRBP
  Gene Name: cold inducible RNA binding protein
  ENST ID: ENST00000589235
  CDS Start-End: 68-574
ggctcgggtcgttgtggtgcgctgtcttcccgcttgcgtcagggacctgcccgactcagtggccgccatggcatcagatgaaggcaaactttttgttggagggctgagttttgacaccaatgagcagtcgctggagcaggtcttctcaaagtacggacagatctctgaagtggtggttgtgaaagacagggagacccagagatctcggggatttgggtttgtcacctttgagaacattgacgacgctaaggatgccatgatggccatgaatgggaagtctgtagatggacggcagatccgagtagaccaggcaggcaagtcgtcagacaaccgatcccgtgggtaccgtggtggctctgccgggggccggggcttcttccgtgggggccgaggacggggccgtgggttctctagaggaggaggggaccgaggctatggggggaaccggttcgagtccaggagtgggggctacggaggctccagagactactatagcagccggagtcagagtggtggctacagtgaccggagctcgggcgggtcctacagagacagttatgacagttacggttgaaggggcccggccaggactcggggaagggtggcctgagagcagcgatgacctctggggtcactgtcccaggagggacttcacctggaacaagagctggaggcagccgcttgcccaggaggcttgtcccctgtaagtgctttcgggaagagtggcatgtggcgctgagccctgtcccgggcggcacctgggcgtttcagtgagtcctgctctcccgcacctatggccccatggcgggcgcctttcggtgtgtgttgggtgcagggcagcgcctcccgggagcgccgggtcccccgcctggagcccgcgcctgttctccctcccttcctcctccttccaggaggcgcttcgccagtgaggtgcgggctcagggcctcgagtctctcctggagcacgggctgcggtgcgccggcagcttacggggcggccagtccttgcccacaacgatgtggagccctgtgaaagtcggattcgaataaagggccacgtgtgcacccagaaa

SEQ ID NO: 121377 - DNA, 532 bp, Homo sapiens
  Payload ID: 3793
  Gene Symbol: CIRBP
  Gene Name: cold inducible RNA binding protein
  ENST ID: ENST00000592412
  CDS Start-End: 148-387
cctcactcgcgcgttaggaggctcgggtcgttgtggtgcgctgtcttcccgcttgcgtcagggacctgcccgactcagtggaagcggggagaggtggtgagagatgacccctgttgaggatttcattggtgtctgccacaggccgccatggcatcagatgaaggcaaactttttgttggagggctgagttttgacaccaatgagcagtcgctggagcaggtcttctcaaagtacggacagatctctgaagtctgtagatggacggcagatccgagtagaccaggcaggcaagtcgtcagacaaccgatcccgtgggtaccgtggtggctctgccgggggccggggcttcttccgtgggggccgaggacggggccgtgggttctctagaggaggaggggaccgaggctatggggggaaccggttcgagtccaggagtgggggctacggaggctccagagactactatagcagccggagtcagagtggtggctacagtgaccggagctcgggcgggtcctacagagacagttat

SEQ ID NO: 121378 - DNA, 1052 bp, Homo sapiens
  Payload ID: 3793
  Gene Symbol: CIRBP
  Gene Name: cold inducible RNA binding protein
  ENST ID: ENST00000585914
  CDS Start-End: 66-674
ctcgggtcgttgtggtgcgctgtcttcccgcttgcgtcagggacctgcccgactcagtggccgccatggcatcagatgaaggcaaactttttgttggagggctgagttttgacaccaatgagcagtcgctggagcaggtcttctcaaagtacggacagatctctgaagtggtggttgtgaaagacagggagacccagagatctcggggatttgggtttgtcacctttgagaacattgacgacgctaaggatgccatgatggccatgaatgggaagtctgtagatggacggcagatccgagtagaccaggcaggcaagtcgtcagacaaccgatcccgtgggtaccgtggtggctctgccgggggccggggcttcttccgtgggggccgaggacggggccgtgggttctctagaggaggaggggaccgaggctatggggggaaccggttcgagtccaggagtgggggctacggaggctccagagactactatagcagccggagtcagagtggtggctacagtgaccggagctcgggcgggtcctacagagacagttatgacagttacgaagcaggccagagagcagaggcacgtggcatcccagggcgacctcagacggccagccggttagctagttctgctgttgcttcacgagttctgagcattctctgctagcctatggaagctgcagccctcggaggacagaagtgttgtgcgcccaacagaaccctctgagacgcaagctgctcccttggctagctcatatgtggaaatagccctgtaattcgaggttgaaggggcccggccaggactcggggaagggtggcctgagagcagcgatgacctctggggtcactgtcccaggagggacttcacctggaacaagagctggaggcagccgcttgcccaggaggcttgtcccctgtaagaggcgcttcgccagtgaggtgcgggctcagggcctcgagtctctcctggagcacgggctgcggtgcgccggcagcttacggggcggccagtccttgcccacaacgatgtggagccctgtgaaag

SEQ ID NO: 121379 - DNA, 573 bp, Homo sapiens
  Payload ID: 3793
  Gene Symbol: CIRBP
  Gene Name: cold inducible RNA binding protein
  ENST ID: ENST00000592051
  CDS Start-End: 478-573
ctttggggctgaggctttgccaaaggagcaggagtttgccaagtgttgtaggaagcgggaagggtgcgccaggtagggggcacggcgtgtgccaaggcccggaaacgtgaaaccgagtgcttttcgggggcaaccgggaagtcagttggtggagaaaaatcaaagatgggaggaaaggcgaggctgacaaggaccctaaacggtgattccccaagtcggccactggagggatgacttgggggaccagagaggaagagcagagacagggtctagctatgttgccccggctggtatcaaactcctggactcaaacgaaagtgctgggattccaggcatgagccagcgctcccggcctgcatacgggatgattccatgtggactgccacatcaaggaagcaaacaacaaggaaagcctggcgctgcgtggagctgtcttttgctgctaactgcccttgaccgacttcctaccaggccgccatggcatcagatgaaggcaaactttttgttggagggctgagttttgacaccaatgagcagtcgctggagcaggtcttctcaaagtacggacagatc

SEQ ID NO: 121380 - DNA, 587 bp, Homo sapiens
  Payload ID: 3793
  Gene Symbol: CIRBP
  Gene Name: cold inducible RNA binding protein
  ENST ID: ENST00000591659
  CDS Start-End: 67-587
gctcgggtcgttgtggtgcgctgtcttcccgcttgcgtcagggacctgcccgactcagtggccgccatggcatcagatgaaggcaaactttttgttggagggctgagttttgacaccaatgagcagtcgctggagcaggtcttctcaaagtacggacagatctctgaagtggtggttgtgaaagacagggagacccagagatctcggggatttgggtttgtcacctttgagaacattgacgacgctaaggatgccatgatggccatgaatgggaagtctgtagatggacggcagatccgagtagaccaggcaggcaagtcgtcagacaaccgatcccgtgggtaccgtggtggctctgccgggggccggggcttcttccgtgggggccgaggacggggccgtgggttctctagaggtgagtgccatgagtgggtcccttggggatgctgtgaggtactgctggtgggagctggtactcactttttcctgtatgtgcaggaggaggggaccgaggctatggggggaaccggttcgagtccaggagtgggggctacggaggctccagagactactatagcaggtgaggg

SEQ ID NO: 121381 - DNA, 1507 bp, Homo sapiens
  Payload ID: 3793
  Gene Symbol: CIRBP
  Gene Name: cold inducible RNA binding protein
  ENST ID: ENST00000591097
  CDS Start-End: 86-268
ctcactcgcgcgttaggaggctcgggtcgttgtggtgcgctgtcttcccgcttgcgtcagggacctgcccgactcagtggccgccatggcatcagatgaaggcaaactttttgttggagggctgagttttgacaccaatgagcagtcgctggagcaggtcttctcaaagtacggacagatctctgaagacctctctcccctgcacagtggtggttgtgaaagacagggagacccagagatctcggggatttgggtttgtcacctttgagaacattgacgacgctaaggatgccatgatggccatgaatgggaagtctgtagatggacggcagatccgagtagaccaggcaggcaagtcgtcagacaaccgatcccgtgggtaccgtggtggctctgccgggggccggggcttcttccgtgggggccgaggacggggccgtgggttctctagaggaggaggggaccgaggctatggggggaaccggttcgagtccaggagtgggggctacggaggctccagagactactatagcaggtgagggggaggccggcccaagcacaggggtggttgcgggatggccagcttccgtcccgggtcccaggtccctgggggagctgagatgagactggctgggcaaggagcagaggcaggtggggacccaggccaagaggagaggagactgctcaggacattcgcagaagcgggagggcctgggggacaggctggtggagattttgaacaatttccaagatgctgccctgctggggtccttgttgtgtccccagaagggacggctggcatgggggctggcggctcagcctgttgtggcagagcagaagtagacgggtaccttccggtactcaacgtttgtctgtcttgcagccggagtcagagtggtggctacagtgaccggagctcgggcgggtcctacagagacagttatgacagttacggtaagtcacactccgagggcgccacgctgctgtggcctgcggtgggagctcggttcaccttggtgccctctccaagcactttaggctggacactcagaccttgtcactgtgcttgcccagaagaggcgcatctgtcctctcagagccatttctatcgcaggacgcaaaagccaaatgagactgaccaaaaaggcaagggagagcgagggcccgctgggcagtcagctaggtgcatgtgtggccgcaggccagcctccctcggctgtggggggtggttgctccccggccgcaggccgcgccctggtctggcctctggggtgaagctgcctcttgttgcttcggtgcctttacactgtgcctgcttcttgtcctcagctacacacaacgagtaaaaacccttcctgctcaagatcgtccttccaatggctgtgtgtttaaagattgtgggagcttcgctgaacgttaatgtgtagtaaatgcacctccttgtattcccactttcgtagtcatttcggttctgatcttgtcaaacccagcctgaccgcttctgacg

SEQ ID NO: 121382 - DNA, 942 bp, Homo sapiens
  Payload ID: 3793
  Gene Symbol: CIRBP
  Gene Name: cold inducible RNA binding protein
  ENST ID: ENST00000586773
  CDS Start-End: 152-658
cccccctcactcgcgcgttaggaggctcgggtcgttgtggtgcgctgtcttcccgcttgcgtcagggacctgcccgactcagtggaagcggggagaggtggtgagagatgacccctgttgaggatttcattggtgtctgccacaggccgccatggcatcagatgaaggcaaactttttgttggagggctgagttttgacaccaatgagcagtcgctggagcaggtcttctcaaagtacggacagatctctgaagtggtggttgtgaaagacagggagacccagagatctcggggatttgggtttgtcacctttgagaacattgacgacgctaaggatgccatgatggccatgaatgggaagtctgtagatggacggcagatccgagtagaccaggcaggcaagtcgtcagacaaccgatcccgtgggtaccgtggtggctctgccgggggccggggcttcttccgtgggggccgaggacggggccgtgggttctctagaggaggaggggaccgaggctatggggggaaccggttcgagtccaggagtgggggctacggaggctccagagactactatagcagccggagtcagagtggtggctacagtgaccggagctcgggcgggtcctacagagacagttatgacagttacggttgaaggggcccggccaggactcggggaagggtggcctgagagcagcgatgacctctggggtcactgtcccaggagggacttcacctggaacaagagctggaggcagccgcttgcccaggaggcttgtcccctgtaagtgctttcgggaagagtggcatgtggcgctgagccctgtcccgggcggcacctgggcgtttcagtgagtcctgctctcccgcacctatggccccatggcgggcgcctttcggtgtgtgttgggtgcagggcagcgcctcccgggagcgccg

SEQ ID NO: 121383 - DNA, 1509 bp, Homo sapiens
  Payload ID: 3793
  Gene Symbol: CIRBP
  Gene Name: cold inducible RNA binding protein
  Uniprot ID: Q14011
  ENST ID: ENST00000588030
  CDS Start-End: 262-780
aagtcccttagggtgtggggcgagggcctgcctgcctgcttcgtggcctgggcaggaccctggccccctcaggacctgccagtatgggggagacgcgaccaccagctctccccagccacaggagtcggggactcccactctgccacacccacctgctccccttcctggagtctcacatctgtgtggcttgctgcagggagatcaccaggccgactgggaggacctaggactccgcagggtaccttgggctggcaggccgccatggcatcagatgaaggcaaactttttgttggagggctgagttttgacaccaatgagcagtcgctggagcaggtcttctcaaagtacggacagatctctgaagtggtggttgtgaaagacagggagacccagagatctcggggatttgggtttgtcacctttgagaacattgacgacgctaaggatgccatgatggccatgaatgggaagtctgtagatggacggcagatccgagtagaccaggcaggcaagtcgtcagacaaccgatcccgtgggtaccgtggtggctctgccgggggccggggcttcttccgtgggggccgaggacggggccgtgggttctctagaggaggaggggaccgaggctatggggggaaccggttcgagtccaggagtgggggctacggaggctccagagactactatagcagccggagtcagagtggtggctacagtgaccggagctcgggcgggtcctacagagacagttatgacagttacgctacacacaacgagtaaaaacccttcctgctcaagatcgtccttccaatggctgtgtgtttaaagattgtgggagcttcgctgaacgttaatgtgtagtaaatgcacctccttgtattcccactttcgtagtcatttcggttctgatcttgtcaaacccagcctgaccgcttctgacgccgggatggcctcgttactagacttttctttttaaggaagtgctgtttttttttgagggttttcaaaacattttgaaaagcatttacttttttgaccacgagccatgagttttcaaaaaaatcgggggttgtgtgggtttttggtttttgttttagtttttggttgcgttgcctttttttttttagtggggttggccccatgaagtgggtgccccactcacttctctgagatcgaacggactgtgaatccgctctttgtcggaagctgagcaagctgtggcttttttccaactccgtgtgacgtttctgagtgtagtgtggtaggaccccggcgggtgtggcagcaactgccctggagccccagcccctgcgtccatctgtgctgtgcgccccacagtagacgtgcagacgtccctgagaggttcttgaagatgtttatttatattgtccttttttactggaagacgtacgcatactccatcgatgttgtatttgcagtggctgaggaattcttgtacgcagttttctttggctttacgaagccgattaaaagaccgtgtgaaatgaa

SEQ ID NO: 121384 - DNA, 1043 bp, Homo sapiens
  Payload ID: 3793
  Gene Symbol: CIRBP
  Gene Name: cold inducible RNA binding protein
  ENST ID: ENST00000628979
  CDS Start-End: 150-1043
aggatgtgtagggggcggggcccggcggaagcgtatataaggccgggctcggggacgcccccccctcactcgcgcgttaggaggctcgggtcgttgtggtgcgctgtcttcccgcttgcgtcagggacctgcccgactcagtggccgccatggcatcagatgaaggcaaactttttgttggagggctgagttttgacaccaatgagcagtcgctggagcaggtcttctcaaagtacggacagatctctgaagtggtggttgtgaaagacagggagacccagagatctcggggatttgggtttgtcacctttgagaacattgacgacgctaaggatgccatgatggccatgaatgggaagtctgtagatggacggcagatccgagtagaccaggcaggcaagtcgtcagacaaccgatcccgtgggtaccgtggtggctctgccgggggccggggcttcttccgtgggggccgaggacggggccgtgggttctctagaggaggaggggaccgaggctatggggggaaccggttcgagtccaggagtgggggctacggaggctccagagactactatagcagccggagtcagagtggtggctacagtgaccggagctcgggcgggtcctacagagacagttatgacagttacggtaagtcacactccgagggcgccacgctgctgtggcctgcggtgggagctcggttcaccttggtgccctctccaagcactttaggctggacactcagaccttgtcactgtgcttgcccagaagaggcgcatctgtcctctcagagccatttctatcgcaggacgcaaaagccaaatgagactgaccaaaaaggcaagggagagcgagggcccgctgggcagtcagctaggtgcatgtgtggccgcaggccagcctccctcggctgtggggggtggttgctccccggccgcaggccgcgccctggtctggcctctggggtgaagctgcctcttgttgcttcggtgcctttacactgtgcctgcttcttgtcctcagctacacacaacgagtaa

SEQ ID NO: 121385 - DNA, 2777 bp, Homo sapiens
  Payload ID: 3794
  Gene Symbol: CSDC2
  Gene Name: cold shock domain containing C2, RNA binding
  Uniprot ID: Q9Y534
  ENST ID: ENST00000306149
  CDS Start-End: 545-1006
tcagcagctgccctcactgggcagggcaaattataccgtggcccgaccataaaagccactttccaaaaaaagaagctttaaggcccccgagagacgcagctgagcctctcacctggcagtgcctgactcaggaggtgatgtctgggccatgagccacagagcctggtgtccctttaagcagggagtacaaattctcatccctccctcctgctctccctgacgtcagctggaaggcgtgtgagtgagtgaggggctgaggtaccgcccgcgcgagcacacacagacacacacacacacacacacacacacacacacacacatcttccagacccatcccctgcctgccagctccacgagccagagagagacagagcgcggacgccgcaggaggcagtgcctggaccccagctgcccaggagagacggagcccgtggctggtgaggccgcagagcagggccaggccgggccctgcccgcaaggacgaccaaacccctcaccggcccctgggccccagagcccaccaggctctcctgctggccccaccatgacttcagagtcgacgtcacccccagttgtgcccccgctccactcccccaagtccccagtctggcccaccttccccttccacagggagggcagcagggtctgggagcggggtggtgtcccacctcgggacctacccagccctctgcccaccaagcggaccaggacctattcagcgacagcccgggcctcagctggccccgtgttcaagggcgtctgtaagcagttctcacgctcacagggccatggcttcatcacccccgagaacgggtccgaggacatcttcgtacatgtgtctgacatcgagggggagtacgtgccagtggagggcgacgaggtgacctacaagatgtgccctatccctcccaagaaccagaagttccaggccgtggaggtggtgctcactcagctggccccccacactccccacgagacgtggtctggccaggtcgtgggctcctaggctgagtggttcacaggccagctggccgggggttggggagccacacagggtgaacgggcagcagccggctccatgccccactgccctggctgatgagtccttcggtggcctcagtgtgcacgtctgtctgtccgtctgtgcttgtggctatgagcgtgtgcctccacccaccccacgacccgtgactactgtgcaagctggccaggaggtaggtggagggcaaggccaccagacctggcttcgcgctgtccactgcctctctcctcccctccctgccgcagacacgcaggacccgctcgccctcctgcttacccgtccccacggtgactgagctgcgagagcctgcgctgggctcactccctggcctccgcccctgagctgtcccgtgtcagtccctggcccggagccaggctctctgtgctacttacatctccctcccttggctgaggtcccccgccacagcctggacccttccctcagaagcctggccgatgggtgcttttggggagcctctcagcctctggcaggggaggaggactgacacggaggcacacaggcctctcactgccgaggccagccttccttcctgctctgctctctcagtgccatggagaggcaggaagaggggcctgagggcggaaggggtttggggctcccatttcgccggccagtccctcctcctcagcctggcagtggcgctgggctccttcccctgggctgtactgagccgagcccaggggtttgcagagggtgggggtccatctctccagcttggctgcagacctcctttaccctgactcacaagccccactgatgctctgggccatgcccggctgacggctgctgtggatgccgcgagggacggacacacgtccggggcacccacgaggagggcccccagcctgggagactggccctgcggcctccacgtcaaactctcttcccaaagccctaacagaccagtggccgaggtgtggctcttattgcatccatccctgaagatgtgtggctgttgctgtcacctggagtccttttggggccaagatgtgtgtgcacccggggtcgtggccattcactcccaggcaggggtgagggtggcctggcccaggaggccaggaaggagggccctgtctgcctccacctctgggtgcaccccctgcctaccaccctcccttctagagagcacatcgcctgaccggggagaagtggggccgtggttcgagggagggctggccaggggtgggacccttatgagactcagtctgtgagtaaaactgggggctcaaatgcccaggatgaggggatcagtgactgtctaggaggatcccttgccttgtaggtgccccaagaccgcagggtagaaatcagccgggatgcctgcatcccacccccggccccagggcccaccacataaaatctgggagcccagagctgctgaggtgtggtcagctcccctaaaatgggcacggcccagcctgtcccatgaggaataaaggcccctggcccccttgagagagggcttgttggtgagggctgactcctgggggcccccaaggctcccctcctgtggggaggccaccttttaaggcaccactagcagtcaggatatggtggcatcagccctggggcctcctgggtggcaggggggcagcagctctcctccccactcacaggccctgcagtgctcatttggaattcctcccaagacccctggccacccagaccccccattcttcctaacactggcaataaaccctcaactgtgacccac

SEQ ID NO: 121386 - DNA, 721 bp, Homo sapiens
  Payload ID: 3794
  Gene Symbol: CSDC2
  Gene Name: cold shock domain containing C2, RNA binding
  ENST ID: ENST00000460790
  CDS Start-End: 1-456
aagtccccagtctggcccaccttccccttccacagggagggcagcagggtctgggagcggggtggtgtcccacctcgggacctacccagccctctgcccaccaagcggaccaggacctattcagcgacagcccgggcctcagctggccccgtgttcaagggcgtctgtaagcagttctcacgctcacagggccatggcttcatcacccccgagaacgggtccgaggacatcttcgtacatgtgtctgagcctaggccaaactcttcagaagtcacgacacacagatgtgggccccggtcacgcctcatgagctgtctctgggaagaaaatctcccggcatcgctgcaccgtgtcctgaggagacaccacgctgtggccaacagtccgggggtcggcaaagatctcaaagtcgttcccaccctgcacacagaggatgggcagaggagggatatttaggtggagtccctctccacattggctgctacggacctgcccctcctcctgccccttcagaactgccaggaagcccaccttctcaccccttgtcagacctgccctgacttgctgtgtgatgtagaacaagtgcccagcctcttggggccccagctttccaatctgtgtaacggggctggtgagcaatggttgttctccaggagccccctaagaggtctgttgtgttgccccatgttctggccttgacctcaggtgatttgcattggag

SEQ ID NO: 121387 - DNA, 3228 bp, Homo sapiens
  Payload ID: 3795
  Gene Symbol: CSDE1
  Gene Name: cold shock domain containing E1, RNA-binding
  Uniprot ID: O75534
  ENST ID: ENST00000261443
  CDS Start-End: 51-2354
gggccgtgctgcttatggcggcgctggagagggggcgctgagctgttgggatgagctttgatccaaaccttctccacaacaatggacataatgggtaccctaatggtacttcagcagcactgcgtgaaactggggttattgaaaaactgttaacctcttacggatttattcagtgttcagaacgtcaagctagacttttcttccactgttcacagtataatggcaacctgcaagacttaaaagtaggagatgatgttgaatttgaagtatcatcggaccgacggactgggaaacccattgctgttaaactggtgaagataaaacaagaaatcctccctgaagaacgaatgaatggacaagaagtgttttatctgacttacacccctgaagatgtcgaagggaacgttcagctggaaactggagataaaataaactttgtaattgataacaataaacatactggtgctgtaagtgctcgcaacattatgctgttgaaaaagaaacaagcccgctgtcagggagtagtttgtgccatgaaggaggcatttggctttattgaaagaggtgatgttgtaaaagagatattctttcactatagtgaatttaagggtgacttagaaaccttacagcctggcgatgatgtggaattcacaatcaaggacagaaatggtaaagaagttgcaacagatgtcagactattgcctcaaggaacagtcatttttgaagatatcagcattgaacattttgaaggaactgtaaccaaagttatcccaaaagtacccagtaaaaaccagaatgacccattgccaggacgcatcaaagttgactttgtgatccctaaagaacttccctttggagacaaagatacgaaatccaaggtgaccctgctggaaggtgaccatgttaggtttaatatttcaacagaccgacgtgacaaattagagcgagcaaccaatatagaagttctgtcaaatacatttcagttcactaatgaagcccgagaaatgggtgtgattgctgccatgagagatggttttggtttcatcaagtgtgtggatcgtgatgttcgtatgttcttccacttcagtgaaattctggatgggaaccagctccatattgcagatgaagtagagtttactgtggttcctgatatgctctctgctcaaagaaatcatgctattaggattaaaaaacttcccaagggcacggtttcatttcattcccattcagatcaccgttttctgggcacggtagaaaaagaagccactttttccaatcctaaaaccactagcccaaataaaggcaaagagaaggaggctgaggatggcattattgcttatgatgactgtggggtgaaactgactattgcttttcaagccaaggatgtggaaggatctacttctcctcaaataggagataaggttgaatttagtattagtgacaaacagaggcctggacagcaggttgcaacttgtgtgcgacttttaggtcgtaattctaactccaagaggctcttgggttatgtggcaactctgaaggataattttggatttattgaaacagccaatcatgataaggaaatctttttccattacagtgagttctctggtgatgttgatagcctggaactgggggacatggtcgagtatagcttgtccaaaggcaaaggcaacaaagtcagtgcagaaaaagtgaacaaaacacactcagtgaatggcattactgaggaagctgatcccaccatttactctggcaaagtaattcgccccctgaggagtgttgatccaacacagactgagtaccaaggaatgattgagattgtggaggagggcgatatgaaaggtgaggtctatccatttggcatcgttgggatggccaacaaaggggattgcctgcagaaaggggagagcgtcaagttccaattgtgtgtcctgggccaaaatgcacaaactatggcttacaacatcacacccctgcgcagggccacagtggaatgtgtgaaagatcagtttggcttcattaactatgaagtaggagatagcaagaagctctttttccatgtgaaagaagttcaggatggcattgagctacaggcaggagatgaggtggagttctcagtgattcttaatcagcgcactggcaagtgcagcgcctgtaatgtttggcgagtctgtgagggccccaaggctgttgcagctcctcgacctgatcggttggtcaatcgcttgaagaatatcactctggatgatgccagtgctcctcgcctaatggttcttcgtcagccaaggggaccagataactcaatggggtttggtgcagaaagaaagatccgtcaagctggtgtcattgactaaccacatccacaaagcacaccattaatccactatgatcaagttggggggaatctggtgaagggttctgaatatctccctcttcatccctcccgaaatctggaatacttattctattgagctattacaccagttttaacaccttcctcgtgttatgtttaaaaaaataaataaatttaagaaaaccattttaaataatgcacagttgcagcctggaaaaacttaaggtggcgccttatagtatcaattttaggagctttatttggtgcatttaacgcaactggtaattgcagaatccactttgcctgtgtaagtgaaaaatatagactgttatcttgttggccctatgaaattctgcacttttcattatatactctaccttcattaattacttctggcaagatgttctgccttagcactcagttgcattcttttcctttttcttcctgttcattatgctttaattctgaggaccatatgagggtagaatatattatcttttaaaaattacaaaaatttgtataggcaaaccatttcttaaagttgatggccaaattttaaaatgttatttttcatatcatttataatcttgtcacaatccacttaaagaagtttggttatatttcagtgaaaattttcttccagagtaggttttttttcgtgggttggggggtaactttactacaattagtaagtatggtgcagaatttcatgcaaatgaggagtgccagcagtgtgataatttaaacatatttaaacaaaaacaaaaaaaatgaatgcacaaacttgctgctgcttagatcactgcagcttctaggacccggtttcttttactgatttaaaaacaaaacaaaaaaaaataaaaaagttgtgcctg

SEQ ID NO: 121388 - DNA, 4006 bp, Homo sapiens
  Payload ID: 3795
  Gene Symbol: CSDE1
  Gene Name: cold shock domain containing E1, RNA-binding
  Uniprot ID: O75534
  ENST ID: ENST00000339438
  CDS Start-End: 447-2750
ctacgtaccgggccgtgctgcttatggcggcgctggagagggggcgctgagctgttgggtatgaagtgtaacagaacagactttaccacctgaaactgctgcttcaagttcagatcaggcaaggaacaaacctcgtaacaactaacaagaccaaagaagagtacacttaagttgaagacacaacacttgatctgaaacaagaagtttgtgcctactcaacagctttgaaagagcacttcccaacgctgctagtagtctttgttttcttcagtgctgtactgtgagattgcccggtacagcagcagttgtattctttattagcttggtagatcattttctctcgctcttttttttaatactagcaactttcatcctttgaaacgtgtgctgaaaaagaagaatcagcaaatactactgaaagtgcaatatttgagtatcactgcgagatgagctttgatccaaaccttctccacaacaatggacataatgggtaccctaatggtacttcagcagcactgcgtgaaactggggttattgaaaaactgttaacctcttacggatttattcagtgttcagaacgtcaagctagacttttcttccactgttcacagtataatggcaacctgcaagacttaaaagtaggagatgatgttgaatttgaagtatcatcggaccgacggactgggaaacccattgctgttaaactggtgaagataaaacaagaaatcctccctgaagaacgaatgaatggacaagaagtgttttatctgacttacacccctgaagatgtcgaagggaacgttcagctggaaactggagataaaataaactttgtaattgataacaataaacatactggtgctgtaagtgctcgcaacattatgctgttgaaaaagaaacaagcccgctgtcagggagtagtttgtgccatgaaggaggcatttggctttattgaaagaggtgatgttgtaaaagagatattctttcactatagtgaatttaagggtgacttagaaaccttacagcctggcgatgatgtggaattcacaatcaaggacagaaatggtaaagaagttgcaacagatgtcagactattgcctcaaggaacagtcatttttgaagatatcagcattgaacattttgaaggaactgtaaccaaagttatcccaaaagtacccagtaaaaaccagaatgacccattgccaggacgcatcaaagttgactttgtgatccctaaagaacttccctttggagacaaagatacgaaatccaaggtgaccctgctggaaggtgaccatgttaggtttaatatttcaacagaccgacgtgacaaattagagcgagcaaccaatatagaagttctgtcaaatacatttcagttcactaatgaagcccgagaaatgggtgtgattgctgccatgagagatggttttggtttcatcaagtgtgtggatcgtgatgttcgtatgttcttccacttcagtgaaattctggatgggaaccagctccatattgcagatgaagtagagtttactgtggttcctgatatgctctctgctcaaagaaatcatgctattaggattaaaaaacttcccaagggcacggtttcatttcattcccattcagatcaccgttttctgggcacggtagaaaaagaagccactttttccaatcctaaaaccactagcccaaataaaggcaaagagaaggaggctgaggatggcattattgcttatgatgactgtggggtgaaactgactattgcttttcaagccaaggatgtggaaggatctacttctcctcaaataggagataaggttgaatttagtattagtgacaaacagaggcctggacagcaggttgcaacttgtgtgcgacttttaggtcgtaattctaactccaagaggctcttgggttatgtggcaactctgaaggataattttggatttattgaaacagccaatcatgataaggaaatctttttccattacagtgagttctctggtgatgttgatagcctggaactgggggacatggtcgagtatagcttgtccaaaggcaaaggcaacaaagtcagtgcagaaaaagtgaacaaaacacactcagtgaatggcattactgaggaagctgatcccaccatttactctggcaaagtaattcgccccctgaggagtgttgatccaacacagactgagtaccaaggaatgattgagattgtggaggagggcgatatgaaaggtgaggtctatccatttggcatcgttgggatggccaacaaaggggattgcctgcagaaaggggagagcgtcaagttccaattgtgtgtcctgggccaaaatgcacaaactatggcttacaacatcacacccctgcgcagggccacagtggaatgtgtgaaagatcagtttggcttcattaactatgaagtaggagatagcaagaagctctttttccatgtgaaagaagttcaggatggcattgagctacaggcaggagatgaggtggagttctcagtgattcttaatcagcgcactggcaagtgcagcgcctgtaatgtttggcgagtctgtgagggccccaaggctgttgcagctcctcgacctgatcggttggtcaatcgcttgaagaatatcactctggatgatgccagtgctcctcgcctaatggttcttcgtcagccaaggggaccagataactcaatggggtttggtgcagaaagaaagatccgtcaagctggtgtcattgactaaccacatccacaaagcacaccattaatccactatgatcaagttggggggaatctggtgaagggttctgaatatctccctcttcatccctcccgaaatctggaatacttattctattgagctattacaccagttttaacaccttcctcgtgttatgtttaaaaaaataaataaatttaagaaaaccattttaaataatgcacagttgcagcctggaaaaacttaaggtggcgccttatagtatcaattttaggagctttatttggtgcatttaacgcaactggtaattgcagaatccactttgcctgtgtaagtgaaaaatatagactgttatcttgttggccctatgaaattctgcacttttcattatatactctaccttcattaattacttctggcaagatgttctgccttagcactcagttgcattcttttcctttttcttcctgttcattatgctttaattctgaggaccatatgagggtagaatatattatcttttaaaaattacaaaaatttgtataggcaaaccatttcttaaagttgatggccaaattttaaaatgttatttttcatatcatttataatcttgtcacaatccacttaaagaagtttggttatatttcagtgaaaattttcttccagagtaggttttttttcgtgggttggggggtaactttactacaattagtaagtatggtgcagaatttcatgcaaatgaggagtgccagcagtgtgataatttaaacatatttaaacaaaaacaaaaaaaatgaatgcacaaacttgctgctgcttagatcactgcagcttctaggacccggtttcttttactgatttaaaaacaaaacaaaaaaaaataaaaaagttgtgcctgaaatgaatcttgtttttttttataagtagccgcctggttactgtgtcctgtaaaatacagacacttgacccttggtgtagcttctgttcaactttatatcacgggaatggatgggtctgatttcttggccctcttcttgaattggccatatacagggtccctggccagtggactgaaggctttgtctaagatgacaagggtcagctcaggggatgtgggggagggcggttttatcttcccccttgtcgtttgaggttttgatctctgggtaaagaggccgtttatctttgtaaacacgaaacatttttgctttctccagttttctgttaatggcgaaagaatggaagcgaataaagttttactgatttttgagacactagca

SEQ ID NO: 121389 - DNA, 4076 bp, Homo sapiens
  Payload ID: 3795
  Gene Symbol: CSDE1
  Gene Name: cold shock domain containing E1, RNA-binding
  Uniprot ID: O75534
  ENST ID: ENST00000358528
  CDS Start-End: 428-2824
gcttatggcggcgctggagagggggcgctgagctgttgggtatgaagtgtaacagaacagactttaccacctgaaactgctgcttcaagttcagatcaggcaaggaacaaacctcgtaacaactaacaagaccaaagaagagtacacttaagttgaagacacaacacttgatctgaaacaagaagtttgtgcctactcaacagctttgaaagagcacttcccaacgctgctagtagtctttgttttcttcagtgctgtactgtgagattgcccggtacagcagcagttgtattctttattagcttggtagatcattttctctcgctcttttttttaatactagcaactttcatcctttgaaacgtgtgctgaaaaagaagaatcagcaaatactactgaaagtgcaatatttgagtatcactgcgagatgagctttgatccaaaccttctccacaacaatggacataatgggtaccctaatggtacttcagcagcactgcgtgaaactggggttattgaaaaactgttaacctcttacggatttattcagtgttcagaacgtcaagctagacttttcttccactgttcacagtataatggcaacctgcaagacttaaaagtaggagatgatgttgaatttgaagtatcatcggaccgacggactgggaaacccattgctgttaaactggtgaagataaaacaagaaatcctccctgaagaacgaatgaatggacaagttgtgtgcgctgttcctcacaacttagagagtaaatctccagctgccccgggtcagagtccaacagggagtgtatgctacgaacgtaatggggaagtgttttatctgacttacacccctgaagatgtcgaagggaacgttcagctggaaactggagataaaataaactttgtaattgataacaataaacatactggtgctgtaagtgctcgcaacattatgctgttgaaaaagaaacaagcccgctgtcagggagtagtttgtgccatgaaggaggcatttggctttattgaaagaggtgatgttgtaaaagagatattctttcactatagtgaatttaagggtgacttagaaaccttacagcctggcgatgatgtggaattcacaatcaaggacagaaatggtaaagaagttgcaacagatgtcagactattgcctcaaggaacagtcatttttgaagatatcagcattgaacattttgaaggaactgtaaccaaagttatcccaaaagtacccagtaaaaaccagaatgacccattgccaggacgcatcaaagttgactttgtgatccctaaagaacttccctttggagacaaagatacgaaatccaaggtgaccctgctggaaggtgaccatgttaggtttaatatttcaacagaccgacgtgacaaattagagcgagcaaccaatatagaagttctgtcaaatacatttcagttcactaatgaagcccgagaaatgggtgtgattgctgccatgagagatggttttggtttcatcaagtgtgtggatcgtgatgttcgtatgttcttccacttcagtgaaattctggatgggaaccagctccatattgcagatgaagtagagtttactgtggttcctgatatgctctctgctcaaagaaatcatgctattaggattaaaaaacttcccaagggcacggtttcatttcattcccattcagatcaccgttttctgggcacggtagaaaaagaagccactttttccaatcctaaaaccactagcccaaataaaggcaaagagaaggaggctgaggatggcattattgcttatgatgactgtggggtgaaactgactattgcttttcaagccaaggatgtggaaggatctacttctcctcaaataggagataaggttgaatttagtattagtgacaaacagaggcctggacagcaggttgcaacttgtgtgcgacttttaggtcgtaattctaactccaagaggctcttgggttatgtggcaactctgaaggataattttggatttattgaaacagccaatcatgataaggaaatctttttccattacagtgagttctctggtgatgttgatagcctggaactgggggacatggtcgagtatagcttgtccaaaggcaaaggcaacaaagtcagtgcagaaaaagtgaacaaaacacactcagtgaatggcattactgaggaagctgatcccaccatttactctggcaaagtaattcgccccctgaggagtgttgatccaacacagactgagtaccaaggaatgattgagattgtggaggagggcgatatgaaaggtgaggtctatccatttggcatcgttgggatggccaacaaaggggattgcctgcagaaaggggagagcgtcaagttccaattgtgtgtcctgggccaaaatgcacaaactatggcttacaacatcacacccctgcgcagggccacagtggaatgtgtgaaagatcagtttggcttcattaactatgaagtaggagatagcaagaagctctttttccatgtgaaagaagttcaggatggcattgagctacaggcaggagatgaggtggagttctcagtgattcttaatcagcgcactggcaagtgcagcgcctgtaatgtttggcgagtctgtgagggccccaaggctgttgcagctcctcgacctgatcggttggtcaatcgcttgaagaatatcactctggatgatgccagtgctcctcgcctaatggttcttcgtcagccaaggggaccagataactcaatggggtttggtgcagaaagaaagatccgtcaagctggtgtcattgactaaccacatccacaaagcacaccattaatccactatgatcaagttggggggaatctggtgaagggttctgaatatctccctcttcatccctcccgaaatctggaatacttattctattgagctattacaccagttttaacaccttcctcgtgttatgtttaaaaaaataaataaatttaagaaaaccattttaaataatgcacagttgcagcctggaaaaacttaaggtggcgccttatagtatcaattttaggagctttatttggtgcatttaacgcaactggtaattgcagaatccactttgcctgtgtaagtgaaaaatatagactgttatcttgttggccctatgaaattctgcacttttcattatatactctaccttcattaattacttctggcaagatgttctgccttagcactcagttgcattcttttcctttttcttcctgttcattatgctttaattctgaggaccatatgagggtagaatatattatcttttaaaaattacaaaaatttgtataggcaaaccatttcttaaagttgatggccaaattttaaaatgttatttttcatatcatttataatcttgtcacaatccacttaaagaagtttggttatatttcagtgaaaattttcttccagagtaggttttttttcgtgggttggggggtaactttactacaattagtaagtatggtgcagaatttcatgcaaatgaggagtgccagcagtgtgataatttaaacatatttaaacaaaaacaaaaaaaatgaatgcacaaacttgctgctgcttagatcactgcagcttctaggacccggtttcttttactgatttaaaaacaaaacaaaaaaaaataaaaaagttgtgcctgaaatgaatcttgtttttttttataagtagccgcctggttactgtgtcctgtaaaatacagacacttgacccttggtgtagcttctgttcaactttatatcacgggaatggatgggtctgatttcttggccctcttcttgaattggccatatacagggtccctggccagtggactgaaggctttgtctaagatgacaagggtcagctcaggggatgtgggggagggcggttttatcttcccccttgtcgtttgaggttttgatctctgggtaaagaggccgtttatctttgtaaacacgaaacatttttgctttctccagttttctgttaatggcgaaagaatggaagcgaataaagttttactgatttttgagacact

SEQ ID NO: 121390 - DNA, 3774 bp, Homo sapiens
  Payload ID: 3795
  Gene Symbol: CSDE1
  Gene Name: cold shock domain containing E1, RNA-binding
  Uniprot ID: O75534
  ENST ID: ENST00000369530
  CDS Start-End: 476-2917
gagagaagcgagatttattcctacgtaccgggccgtgctgcttatggcggcgctggagagggggcgctgagctgttgggtatgaagtgtaacagaacagactttaccacctgaaactgctgcttcaagttcagatcaggcaaggaacaaacctcgtaacaactaacaagaccaaagaagagtacacttaagttgaagacacaacacttgatctgaaacaagaagtttgtgcctactcaacagctttgaaagagcacttcccaacgctgctagtagtctttgttttcttcagtgctgtactgtgagattgcccggtacagcagcagttgtattctttattagcttggtagatcattttctctcgctcttttttttaatactagcaactttcatcctttgaaacgtgtgctgaaaaagaagaatcagcaaatactactgaaagtgcaatatttgagtatcactgcgagctgtttgagatggagaacgtttttactgtgtcatcagatcctcatccctctcctgcagcccctccttcactttctttacccttatcttcatcttctacctcatctgggactaaaaaacaaaagaggaccccaacttatcagagatctatgagctttgatccaaaccttctccacaacaatggacataatgggtaccctaatggtacttcagcagcactgcgtgaaactggggttattgaaaaactgttaacctcttacggatttattcagtgttcagaacgtcaagctagacttttcttccactgttcacagtataatggcaacctgcaagacttaaaagtaggagatgatgttgaatttgaagtatcatcggaccgacggactgggaaacccattgctgttaaactggtgaagataaaacaagaaatcctccctgaagaacgaatgaatggacaagaagtgttttatctgacttacacccctgaagatgtcgaagggaacgttcagctggaaactggagataaaataaactttgtaattgataacaataaacatactggtgctgtaagtgctcgcaacattatgctgttgaaaaagaaacaagcccgctgtcagggagtagtttgtgccatgaaggaggcatttggctttattgaaagaggtgatgttgtaaaagagatattctttcactatagtgaatttaagggtgacttagaaaccttacagcctggcgatgatgtggaattcacaatcaaggacagaaatggtaaagaagttgcaacagatgtcagactattgcctcaaggaacagtcatttttgaagatatcagcattgaacattttgaaggaactgtaaccaaagttatcccaaaagtacccagtaaaaaccagaatgacccattgccaggacgcatcaaagttgactttgtgatccctaaagaacttccctttggagacaaagatacgaaatccaaggtgaccctgctggaaggtgaccatgttaggtttaatatttcaacagaccgacgtgacaaattagagcgagcaaccaatatagaagttctgtcaaatacatttcagttcactaatgaagcccgagaaatgggtgtgattgctgccatgagagatggttttggtttcatcaagtgtgtggatcgtgatgttcgtatgttcttccacttcagtgaaattctggatgggaaccagctccatattgcagatgaagtagagtttactgtggttcctgatatgctctctgctcaaagaaatcatgctattaggattaaaaaacttcccaagggcacggtttcatttcattcccattcagatcaccgttttctgggcacggtagaaaaagaagccactttttccaatcctaaaaccactagcccaaataaaggcaaagagaaggaggctgaggatggcattattgcttatgatgactgtggggtgaaactgactattgcttttcaagccaaggatgtggaaggatctacttctcctcaaataggagataaggttgaatttagtattagtgacaaacagaggcctggacagcaggttgcaacttgtgtgcgacttttaggtcgtaattctaactccaagaggctcttgggttatgtggcaactctgaaggataattttggatttattgaaacagccaatcatgataaggaaatctttttccattacagtgagttctctggtgatgttgatagcctggaactgggggacatggtcgagtatagcttgtccaaaggcaaaggcaacaaagtcagtgcagaaaaagtgaacaaaacacactcagtgaatggcattactgaggaagctgatcccaccatttactctggcaaagtaattcgccccctgaggagtgttgatccaacacagactgagtaccaaggaatgattgagattgtggaggagggcgatatgaaaggtgaggtctatccatttggcatcgttgggatggccaacaaaggggattgcctgcagaaaggggagagcgtcaagttccaattgtgtgtcctgggccaaaatgcacaaactatggcttacaacatcacacccctgcgcagggccacagtggaatgtgtgaaagatcagtttggcttcattaactatgaagtaggagatagcaagaagctctttttccatgtgaaagaagttcaggatggcattgagctacaggcaggagatgaggtggagttctcagtgattcttaatcagcgcactggcaagtgcagcgcctgtaatgtttggcgagtctgtgagggccccaaggctgttgcagctcctcgacctgatcggttggtcaatcgcttgaagaatatcactctggatgatgccagtgctcctcgcctaatggttcttcgtcagccaaggggaccagataactcaatggggtttggtgcagaaagaaagatccgtcaagctggtgtcattgactaaccacatccacaaagcacaccattaatccactatgatcaagttggggggaatctggtgaagggttctgaatatctccctcttcatccctcccgaaatctggaatacttattctattgagctattacaccagttttaacaccttcctcgtgttatgtttaaaaaaataaataaatttaagaaaaccattttaaataatgcacagttgcagcctggaaaaacttaaggtggcgccttatagtatcaattttaggagctttatttggtgcatttaacgcaactggtaattgcagaatccactttgcctgtgtaagtgaaaaatatagactgttatcttgttggccctatgaaattctgcacttttcattatatactctaccttcattaattacttctggcaagatgttctgccttagcactcagttgcattcttttcctttttcttcctgttcattatgctttaattctgaggaccatatgagggtagaatatattatcttttaaaaattacaaaaatttgtataggcaaaccatttcttaaagttgatggccaaattttaaaatgttatttttcatatcatttataatcttgtcacaatccacttaaagaagtttggttatatttcagtgaaaattttcttccagagtaggttttttttcgtgggttggggggtaactttactacaattagtaagtatggtgcagaatttcatgcaaatgaggagtgccagcagtgtgataatttaaacatatttaaacaaaaacaaaaaaaatgaatgcacaaacttgctgctgcttagatcactgcagcttctaggacccggtttcttttactgatttaaaaacaaaacaaaaaaaaa

SEQ ID NO: 121391 - DNA, 4167 bp, Homo sapiens
  Payload ID: 3795
  Gene Symbol: CSDE1
  Gene Name: cold shock domain containing E1, RNA-binding
  Uniprot ID: O75534
  ENST ID: ENST00000438362
  CDS Start-End: 380-2914
cagactttaccacctgaaactgctgcttcaagttcagatcaggcaaggaacaaacctcgtaacaactaacaagaccaaagaagagtacacttaagttgaagacacaacacttgatctgaaacaagaagtttgtgcctactcaacagctttgaaagagcacttcccaacgctgctagtagtctttgttttcttcagtgctgtactgtgagattgcccggtacagcagcagttgtattctttattagcttggtagatcattttctctcgctcttttttttaatactagcaactttcatcctttgaaacgtgtgctgaaaaagaagaatcagcaaatactactgaaagtgcaatatttgagtatcactgcgagctgtttgagatggagaacgtttttactgtgtcatcagatcctcatccctctcctgcagcccctccttcactttctttacccttatcttcatcttctacctcatctgggactaaaaaacaaaagaggaccccaacttatcagagatctatgagctttgatccaaaccttctccacaacaatggacataatgggtaccctaatggtacttcagcagcactgcgtgaaactggggttattgaaaaactgttaacctcttacggatttattcagtgttcagaacgtcaagctagacttttcttccactgttcacagtataatggcaacctgcaagacttaaaagtaggagatgatgttgaatttgaagtatcatcggaccgacggactgggaaacccattgctgttaaactggtgaagataaaacaagaaatcctccctgaagaacgaatgaatggacaagttgtgtgcgctgttcctcacaacttagagagtaaatctccagctgccccgggtcagagtccaacagggagtgtatgctacgaacgtaatggggaagtgttttatctgacttacacccctgaagatgtcgaagggaacgttcagctggaaactggagataaaataaactttgtaattgataacaataaacatactggtgctgtaagtgctcgcaacattatgctgttgaaaaagaaacaagcccgctgtcagggagtagtttgtgccatgaaggaggcatttggctttattgaaagaggtgatgttgtaaaagagatattctttcactatagtgaatttaagggtgacttagaaaccttacagcctggcgatgatgtggaattcacaatcaaggacagaaatggtaaagaagttgcaacagatgtcagactattgcctcaaggaacagtcatttttgaagatatcagcattgaacattttgaaggaactgtaaccaaagttatcccaaaagtacccagtaaaaaccagaatgacccattgccaggacgcatcaaagttgactttgtgatccctaaagaacttccctttggagacaaagatacgaaatccaaggtgaccctgctggaaggtgaccatgttaggtttaatatttcaacagaccgacgtgacaaattagagcgagcaaccaatatagaagttctgtcaaatacatttcagttcactaatgaagcccgagaaatgggtgtgattgctgccatgagagatggttttggtttcatcaagtgtgtggatcgtgatgttcgtatgttcttccacttcagtgaaattctggatgggaaccagctccatattgcagatgaagtagagtttactgtggttcctgatatgctctctgctcaaagaaatcatgctattaggattaaaaaacttcccaagggcacggtttcatttcattcccattcagatcaccgttttctgggcacggtagaaaaagaagccactttttccaatcctaaaaccactagcccaaataaaggcaaagagaaggaggctgaggatggcattattgcttatgatgactgtggggtgaaactgactattgcttttcaagccaaggatgtggaaggatctacttctcctcaaataggagataaggttgaatttagtattagtgacaaacagaggcctggacagcaggttgcaacttgtgtgcgacttttaggtcgtaattctaactccaagaggctcttgggttatgtggcaactctgaaggataattttggatttattgaaacagccaatcatgataaggaaatctttttccattacagtgagttctctggtgatgttgatagcctggaactgggggacatggtcgagtatagcttgtccaaaggcaaaggcaacaaagtcagtgcagaaaaagtgaacaaaacacactcagtgaatggcattactgaggaagctgatcccaccatttactctggcaaagtaattcgccccctgaggagtgttgatccaacacagactgagtaccaaggaatgattgagattgtggaggagggcgatatgaaaggtgaggtctatccatttggcatcgttgggatggccaacaaaggggattgcctgcagaaaggggagagcgtcaagttccaattgtgtgtcctgggccaaaatgcacaaactatggcttacaacatcacacccctgcgcagggccacagtggaatgtgtgaaagatcagtttggcttcattaactatgaagtaggagatagcaagaagctctttttccatgtgaaagaagttcaggatggcattgagctacaggcaggagatgaggtggagttctcagtgattcttaatcagcgcactggcaagtgcagcgcctgtaatgtttggcgagtctgtgagggccccaaggctgttgcagctcctcgacctgatcggttggtcaatcgcttgaagaatatcactctggatgatgccagtgctcctcgcctaatggttcttcgtcagccaaggggaccagataactcaatggggtttggtgcagaaagaaagatccgtcaagctggtgtcattgactaaccacatccacaaagcacaccattaatccactatgatcaagttggggggaatctggtgaagggttctgaatatctccctcttcatccctcccgaaatctggaatacttattctattgagctattacaccagttttaacaccttcctcgtgttatgtttaaaaaaataaataaatttaagaaaaccattttaaataatgcacagttgcagcctggaaaaacttaaggtggcgccttatagtatcaattttaggagctttatttggtgcatttaacgcaactggtaattgcagaatccactttgcctgtgtaagtgaaaaatatagactgttatcttgttggccctatgaaattctgcacttttcattatatactctaccttcattaattacttctggcaagatgttctgccttagcactcagttgcattcttttcctttttcttcctgttcattatgctttaattctgaggaccatatgagggtagaatatattatcttttaaaaattacaaaaatttgtataggcaaaccatttcttaaagttgatggccaaattttaaaatgttatttttcatatcatttataatcttgtcacaatccacttaaagaagtttggttatatttcagtgaaaattttcttccagagtaggttttttttcgtgggttggggggtaactttactacaattagtaagtatggtgcagaatttcatgcaaatgaggagtgccagcagtgtgataatttaaacatatttaaacaaaaacaaaaaaaatgaatgcacaaacttgctgctgcttagatcactgcagcttctaggacccggtttcttttactgatttaaaaacaaaacaaaaaaaaataaaaaagttgtgcctgaaatgaatcttgtttttttttataagtagccgcctggttactgtgtcctgtaaaatacagacacttgacccttggtgtagcttctgttcaactttatatcacgggaatggatgggtctgatttcttggccctcttcttgaattggccatatacagggtccctggccagtggactgaaggctttgtctaagatgacaagggtcagctcaggggatgtgggggagggcggttttatcttcccccttgtcgtttgaggttttgatctctgggtaaagaggccgtttatctttgtaaacacgaaacatttttgctttctccagttttctgttaatggcgaaagaatggaagcgaataaagttttactgatttttgagacacta

SEQ ID NO: 121392 - DNA, 3459 bp, Homo sapiens
  Payload ID: 3795
  Gene Symbol: CSDE1
  Gene Name: cold shock domain containing E1, RNA-binding
  ENST ID: ENST00000530886
  CDS Start-End: 589-2595
gcgcccggagcccgcaactctcgcgagagaagcgagatttattcctacgtaccgggccgtgctgcttatggcggcgctggagagggggcgctgagctgttgggtatgaagtgtaacagaacagactttaccacctgaaactgctgcttcaagttcagatcaggcaaggaacaaacctcgtaacaactaacaagaccaaagaagagtacacttaagttgaagacacaacacttgatctgaaacaagaagtttgtgcctactcaacagctttgaaagagcacttcccaacgctgctagtagtctttgttttcttcagtgctgtactgtgagattgcccggtacagcagcagttgtattctttattagcttggtagatcattttctctcgctcttttttttaatactagcaactttcatcctttgaaacgtgtgctgaaaaagaagaatcagcaaatactactgaaagtgcaatatttgagtatcactgcgagatgatgttgaatttgaagtatcatcggaccgacggactgggaaacccattgctgttaaactggtgaagataaaacaagaaatcctccctgaagaacgaatgaatggacaagaagtgttttatctgacttacacccctgaagatgtcgaagggaacgttcagctggaaactggagataaaataaactttgtaattgataacaataaacatactggtgctgtaagtgctcgcaacattatgctgttgaaaaagaaacaagcccgctgtcagggagtagtttgtgccatgaaggaggcatttggctttattgaaagaggtgatgttgtaaaagagatattctttcactatagtgaatttaagggtgacttagaaaccttacagcctggcgatgatgtggaattcacaatcaaggacagaaatggtaaagaagttgcaacagatgtcagactattgcctcaaggaacagtcatttttgaagatatcagcattgaacattttgaaggaactgtaaccaaagttatcccaaaagtacccagtaaaaaccagaatgacccattgccaggacgcatcaaagttgactttgtgatccctaaagaacttccctttggagacaaagatacgaaatccaaggtgaccctgctggaaggtgaccatgttaggtttaatatttcaacagaccgacgtgacaaattagagcgagcaaccaatatagaagttctgtcaaatacatttcagttcactaatgaagcccgagaaatgggtgtgattgctgccatgagagatggttttggtttcatcaagtgtgtggatcgtgatgttcgtatgttcttccacttcagtgaaattctggatgggaaccagctccatattgcagatgaagtagagtttactgtggttcctgatatgctctctgctcaaagaaatcatgctattaggattaaaaaacttcccaagggcacggtttcatttcattcccattcagatcaccgttttctgggcacggtagaaaaagaagccactttttccaatcctaaaaccactagcccaaataaaggcaaagagaaggaggctgaggatggcattattgcttatgatgactgtggggtgaaactgactattgcttttcaagccaaggatgtggaaggatctacttctcctcaaataggagataaggttgaatttagtattagtgacaaacagaggcctggacagcaggttgcaacttgtgtgcgacttttaggtcgtaattctaactccaagaggctcttgggttatgtggcaactctgaaggataattttggatttattgaaacagccaatcatgataaggaaatctttttccattacagtgagttctctggtgatgttgatagcctggaactgggggacatggtcgagtatagcttgtccaaaggcaaaggcaacaaagtcagtgcagaaaaagtgaacaaaacacactcagtgaatggcattactgaggaagctgatcccaccatttactctggcaaagtaattcgccccctgaggagtgttgatccaacacagactgagtaccaaggaatgattgagattgtggaggagggcgatatgaaaggtgaggtctatccatttggcatcgttgggatggccaacaaaggggattgcctgcagaaaggggagagcgtcaagttccaattgtgtgtcctgggccaaaatgcacaaactatggcttacaacatcacacccctgcgcagggccacagtggaatgtgtgaaagatcagtttggcttcattaactatgaagtaggagatagcaagaagctctttttccatgtgaaagaagttcaggatggcattgagctacaggcaggagatgaggtggagttctcagtgattcttaatcagcgcactggcaagtgcagcgcctgtaatgtttggcgagtctgtgagggccccaaggctgttgcagctcctcgacctgatcggttggtcaatcgcttgaagaatatcactctggatgatgccagtgctcctcgcctaatggttcttcgtcagccaaggggaccagataactcaatggggtttggtgcagaaagaaagatccgtcaagctggtgtcattgactaaccacatccacaaagcacaccattaatccactatgatcaagttggggggaatctggtgaagggttctgaatatctccctcttcatccctcccgaaatctggaatacttattctattgagctattacaccagttttaacaccttcctcgtgttatgtttaaaaaaataaataaatttaagaaaaccattttaaataatgcacagttgcagcctggaaaaacttaaggtggcgccttatagtatcaattttaggagctttatttggtgcatttaacgcaactggtaattgcagaatccactttgcctgtgtaagtgaaaaatatagactgttatcttgttggccctatgaaattctgcacttttcattatatactctaccttcattaattacttctggcaagatgttctgccttagcactcagttgcattcttttcctttttcttcctgttcattatgctttaattctgaggaccatatgagggtagaatatattatcttttaaaaattacaaaaatttgtataggcaaaccatttcttaaagttgatggccaaattttaaaatgttatttttcatatcatttataatcttgtcacaatccacttaaagaagtttggttatatttcagtgaaaattttcttccagagtaggttttttttcgtgggttggggggtaactttactacaattagtaagtatggtgcagaatttcatgcaaatgaggagtgccagcagtgtgataatttaaacatatttaaacaaaaacaaaaaaaatgaatgcacaaacttgctgctgcttagatcactgcagcttctaggacccggtttcttttactgatttaaaaacaaaacaaaaaaaaataaaaaa

SEQ ID NO: 121393 - DNA, 626 bp, Homo sapiens
  Payload ID: 3795
  Gene Symbol: CSDE1
  Gene Name: cold shock domain containing E1, RNA-binding
  ENST ID: ENST00000525878
  CDS Start-End: 489-626
attggatgaatcatctctttgctcttatttcaaccttttaattactgatccaccctctttgattacctgacacaacaggaatatctttcgtaacttgaaagtatgaagtgtaacagaacagactttaccacctgaaactgctgcttcaagttcagatcaggcaaggaacaaacctcgtaacaactaacaagaccaaagaagagtacacttaagttgaagacacaacacttgatctgaaacaagaagtttgtgcctactcaacagctttgaaagagcacttcccaacgctgctagtagtctttgttttcttcagtgctgtactgtgagattgcccggtacagcagcagttgtattctttattagcttggtagatcattttctctcgctcttttttttaatactagcaactttcatcctttgaaacgtgtgctgaaaaagaagaatcagcaaatactactgaaagtgcaatatttgagtatcactgcgagatgagctttgatccaaaccttctccacaacaatggacataatgggtaccctaatggtacttcagcagcactgcgtgaaactggggttattgaaaaactgttaacctcttacggatttattcagtgttcagaacgtcaa

SEQ ID NO: 121394 - DNA, 521 bp, Homo sapiens
  Payload ID: 3795
  Gene Symbol: CSDE1
  Gene Name: cold shock domain containing E1, RNA-binding
  ENST ID: ENST00000525132
  CDS Start-End: 412-521
gtgctgcttatggcggcgctggagagggggcgctgagctgttgggtatgaagtgtaacagaacagactttaccacctgaaactgctgcttcaagttcagatcaggcaaggaacaaacctcgtaacaactaacaagaccaaagaagagtacacttaagttgaagacacaacacttgatctgaaacaagaagtttgtgcctactcaacagctttgaaagagcacttcccaacgctgctagtagtctttgttttcttcagtgctgtactgtgagattgcccgtataatggcaacctgcaagacttaaaagtaggagatgatgttgaatttgaagtatcatcggaccgacggactgggaaacccattgctgttaaactggtgaagataaaacaagaaatcctccctgaagaacgaatgaatggacaagaagtgttttatctgacttacacccctgaagatgtcgaagggaacgttcagctggaaactggagataaaataaactttgtaattgataacaataaaca

SEQ ID NO: 121395 - DNA, 503 bp, Homo sapiens
  Payload ID: 3795
  Gene Symbol: CSDE1
  Gene Name: cold shock domain containing E1, RNA-binding
  ENST ID: ENST00000525970
  CDS Start-End: 483-503
attcctacgtaccgggccgtgctgcttatggcggcgctggagagggggcgctgagctgttgggtatgaagtgtaacagaacagactttaccacctgaaactgctgcttcaagttcagatcaggcaaggaacaaacctcgtaacaactaacaagaccaaagaagagtacacttaagttgaagacacaacacttgatctgaaacaagaagtttgtgcctactcaacagctttgaaagagcacttcccaacgctgctagtagtctttgttttcttcagtgctgtactgtgagattgcccggtacagcagcagttgtattctttattagcttggtagatcattttctctcgctcttttttttaatactagcaactttcatcctttgaaacgtgtgctgaaaaagaagaatcagcaaatactactgaaagtgcaatatttgagtatcactgcgagatatgtatatattctttttctttttaaaacagatgagctttgatccaaacctt

SEQ ID NO: 121396 - DNA, 2667 bp, Homo sapiens
  Payload ID: 3795
  Gene Symbol: CSDE1
  Gene Name: cold shock domain containing E1, RNA-binding
  Uniprot ID: O75534
  ENST ID: ENST00000534699
  CDS Start-End: 59-2455
tacgtaccgggccgtgctgcttatggcggcgctggagagggggcgctgagctgttgggatgagctttgatccaaaccttctccacaacaatggacataatgggtaccctaatggtacttcagcagcactgcgtgaaactggggttattgaaaaactgttaacctcttacggatttattcagtgttcagaacgtcaagctagacttttcttccactgttcacagtataatggcaacctgcaagacttaaaagtaggagatgatgttgaatttgaagtatcatcggaccgacggactgggaaacccattgctgttaaactggtgaagataaaacaagaaatcctccctgaagaacgaatgaatggacaagttgtgtgcgctgttcctcacaacttagagagtaaatctccagctgccccgggtcagagtccaacagggagtgtatgctacgaacgtaatggggaagtgttttatctgacttacacccctgaagatgtcgaagggaacgttcagctggaaactggagataaaataaactttgtaattgataacaataaacatactggtgctgtaagtgctcgcaacattatgctgttgaaaaagaaacaagcccgctgtcagggagtagtttgtgccatgaaggaggcatttggctttattgaaagaggtgatgttgtaaaagagatattctttcactatagtgaatttaagggtgacttagaaaccttacagcctggcgatgatgtggaattcacaatcaaggacagaaatggtaaagaagttgcaacagatgtcagactattgcctcaaggaacagtcatttttgaagatatcagcattgaacattttgaaggaactgtaaccaaagttatcccaaaagtacccagtaaaaaccagaatgacccattgccaggacgcatcaaagttgactttgtgatccctaaagaacttccctttggagacaaagatacgaaatccaaggtgaccctgctggaaggtgaccatgttaggtttaatatttcaacagaccgacgtgacaaattagagcgagcaaccaatatagaagttctgtcaaatacatttcagttcactaatgaagcccgagaaatgggtgtgattgctgccatgagagatggttttggtttcatcaagtgtgtggatcgtgatgttcgtatgttcttccacttcagtgaaattctggatgggaaccagctccatattgcagatgaagtagagtttactgtggttcctgatatgctctctgctcaaagaaatcatgctattaggattaaaaaacttcccaagggcacggtttcatttcattcccattcagatcaccgttttctgggcacggtagaaaaagaagccactttttccaatcctaaaaccactagcccaaataaaggcaaagagaaggaggctgaggatggcattattgcttatgatgactgtggggtgaaactgactattgcttttcaagccaaggatgtggaaggatctacttctcctcaaataggagataaggttgaatttagtattagtgacaaacagaggcctggacagcaggttgcaacttgtgtgcgacttttaggtcgtaattctaactccaagaggctcttgggttatgtggcaactctgaaggataattttggatttattgaaacagccaatcatgataaggaaatctttttccattacagtgagttctctggtgatgttgatagcctggaactgggggacatggtcgagtatagcttgtccaaaggcaaaggcaacaaagtcagtgcagaaaaagtgaacaaaacacactcagtgaatggcattactgaggaagctgatcccaccatttactctggcaaagtaattcgccccctgaggagtgttgatccaacacagactgagtaccaaggaatgattgagattgtggaggagggcgatatgaaaggtgaggtctatccatttggcatcgttgggatggccaacaaaggggattgcctgcagaaaggggagagcgtcaagttccaattgtgtgtcctgggccaaaatgcacaaactatggcttacaacatcacacccctgcgcagggccacagtggaatgtgtgaaagatcagtttggcttcattaactatgaagtaggagatagcaagaagctctttttccatgtgaaagaagttcaggatggcattgagctacaggcaggagatgaggtggagttctcagtgattcttaatcagcgcactggcaagtgcagcgcctgtaatgtttggcgagtctgtgagggccccaaggctgttgcagctcctcgacctgatcggttggtcaatcgcttgaagaatatcactctggatgatgccagtgctcctcgcctaatggttcttcgtcagccaaggggaccagataactcaatggggtttggtgcagaaagaaagatccgtcaagctggtgtcattgactaaccacatccacaaagcacaccattaatccactatgatcaagttggggggaatctggtgaagggttctgaatatctccctcttcatccctcccgaaatctggaatacttattctattgagctattacaccagttttaacaccttcctcgtgttatgtttaaaaaaataaataaatttaagaaaaccattttaaataatgcacagttgcagcctg

SEQ ID NO: 121397 - DNA, 601 bp, Homo sapiens
  Payload ID: 3795
  Gene Symbol: CSDE1
  Gene Name: cold shock domain containing E1, RNA-binding
  ENST ID: ENST00000534389
  CDS Start-End: 318-601
agatgtgggaactattgagcttacttttcatccctagcaaaaaccccagagccagtgaataaataacttggcagactagctcatgatagcataatggtcaatatggagaaatgttggatggatagcagttagtaagagactgattttagagaagtctccaggtgtatgctgccagatgctatcctcgccctgcttttttcagagacctaatgagtagttctgtgagtacctatgtgctacgtaagcacttattttaggctttttacgtgcagcaactcatttaaccatctcaacaactctgtgagacaggtgttaagatgagctttgatccaaaccttctccacaacaatggacataatgggtaccctaatggtacttcagcagcactgcgtgaaactggggttattgaaaaactgttaacctcttacggatttattcagtgttcagaacgtcaagctagacttttcttccactgttcacagtataatggcaacctgcaagacttaaaagtaggagatgatgttgaatttgaagtatcatcggaccgacggactgggaaacccattgctgttaaactggtgaagataaaacaagaaatcct

SEQ ID NO: 121398 - DNA, 571 bp, Homo sapiens
  Payload ID: 3795
  Gene Symbol: CSDE1
  Gene Name: cold shock domain containing E1, RNA-binding
  ENST ID: ENST00000529046
  CDS Start-End: 162-571
attcctacgtaccgggccgtgctgcttatggcggcgctggagagggggcgctgagctgttgggatgatgttgaatttgaagtatcatcggaccgacggactgggaaacccattgctgttaaactggtgaagataaaacaagaaatcctccctgaagaacgaatgaatggacaagaagtgttttatctgacttacacccctgaagatgtcgaagggaacgttcagctggaaactggagataaaataaactttgtaattgataacaataaacatactggtgctgtaagtgctcgcaacattatgctgttgaaaaagaaacaagcccgctgtcagggagtagtttgtgccatgaaggaggcatttggctttattgaaagaggtgatgttgtaaaagagatattctttcactatagtgaatttaagggtgacttagaaaccttacagcctggcgatgatgtggaattcacaatcaaggacagaaatggtaaagaagttgcaacagatgtcagactattgcctcaaggaacagtcatttttgaagatatcagcattgaacattttgaaggaactgt

SEQ ID NO: 121399 - DNA, 4312 bp, Homo sapiens
  Payload ID: 3795
  Gene Symbol: CSDE1
  Gene Name: cold shock domain containing E1, RNA-binding
  Uniprot ID: O75534
  ENST ID: ENST00000610726
  CDS Start-End: 523-3057
tcactccgccccttctcgtgcacgcgcccggagcccgcaactctcgcgagagaagcgagatttattcctacgtaccgggccgtgctgcttatggcggcgctggagagggggcgctgagctgttgggtatgaagtgtaacagaacagactttaccacctgaaactgctgcttcaagttcagatcaggcaaggaacaaacctcgtaacaactaacaagaccaaagaagagtacacttaagttgaagacacaacacttgatctgaaacaagaagtttgtgcctactcaacagctttgaaagagcacttcccaacgctgctagtagtctttgttttcttcagtgctgtactgtgagattgcccggtacagcagcagttgtattctttattagcttggtagatcattttctctcgctcttttttttaatactagcaactttcatcctttgaaacgtgtgctgaaaaagaagaatcagcaaatactactgaaagtgcaatatttgagtatcactgcgagctgtttgagatggagaacgtttttactgtgtcatcagatcctcatccctctcctgcagcccctccttcactttctttacccttatcttcatcttctacctcatctgggactaaaaaacaaaagaggaccccaacttatcagagatctatgagctttgatccaaaccttctccacaacaatggacataatgggtaccctaatggtacttcagcagcactgcgtgaaactggggttattgaaaaactgttaacctcttacggatttattcagtgttcagaacgtcaagctagacttttcttccactgttcacagtataatggcaacctgcaagacttaaaagtaggagatgatgttgaatttgaagtatcatcggaccgacggactgggaaacccattgctgttaaactggtgaagataaaacaagaaatcctccctgaagaacgaatgaatggacaagttgtgtgcgctgttcctcacaacttagagagtaaatctccagctgccccgggtcagagtccaacagggagtgtatgctacgaacgtaatggggaagtgttttatctgacttacacccctgaagatgtcgaagggaacgttcagctggaaactggagataaaataaactttgtaattgataacaataaacatactggtgctgtaagtgctcgcaacattatgctgttgaaaaagaaacaagcccgctgtcagggagtagtttgtgccatgaaggaggcatttggctttattgaaagaggtgatgttgtaaaagagatattctttcactatagtgaatttaagggtgacttagaaaccttacagcctggcgatgatgtggaattcacaatcaaggacagaaatggtaaagaagttgcaacagatgtcagactattgcctcaaggaacagtcatttttgaagatatcagcattgaacattttgaaggaactgtaaccaaagttatcccaaaagtacccagtaaaaaccagaatgacccattgccaggacgcatcaaagttgactttgtgatccctaaagaacttccctttggagacaaagatacgaaatccaaggtgaccctgctggaaggtgaccatgttaggtttaatatttcaacagaccgacgtgacaaattagagcgagcaaccaatatagaagttctgtcaaatacatttcagttcactaatgaagcccgagaaatgggtgtgattgctgccatgagagatggttttggtttcatcaagtgtgtggatcgtgatgttcgtatgttcttccacttcagtgaaattctggatgggaaccagctccatattgcagatgaagtagagtttactgtggttcctgatatgctctctgctcaaagaaatcatgctattaggattaaaaaacttcccaagggcacggtttcatttcattcccattcagatcaccgttttctgggcacggtagaaaaagaagccactttttccaatcctaaaaccactagcccaaataaaggcaaagagaaggaggctgaggatggcattattgcttatgatgactgtggggtgaaactgactattgcttttcaagccaaggatgtggaaggatctacttctcctcaaataggagataaggttgaatttagtattagtgacaaacagaggcctggacagcaggttgcaacttgtgtgcgacttttaggtcgtaattctaactccaagaggctcttgggttatgtggcaactctgaaggataattttggatttattgaaacagccaatcatgataaggaaatctttttccattacagtgagttctctggtgatgttgatagcctggaactgggggacatggtcgagtatagcttgtccaaaggcaaaggcaacaaagtcagtgcagaaaaagtgaacaaaacacactcagtgaatggcattactgaggaagctgatcccaccatttactctggcaaagtaattcgccccctgaggagtgttgatccaacacagactgagtaccaaggaatgattgagattgtggaggagggcgatatgaaaggtgaggtctatccatttggcatcgttgggatggccaacaaaggggattgcctgcagaaaggggagagcgtcaagttccaattgtgtgtcctgggccaaaatgcacaaactatggcttacaacatcacacccctgcgcagggccacagtggaatgtgtgaaagatcagtttggcttcattaactatgaagtaggagatagcaagaagctctttttccatgtgaaagaagttcaggatggcattgagctacaggcaggagatgaggtggagttctcagtgattcttaatcagcgcactggcaagtgcagcgcctgtaatgtttggcgagtctgtgagggccccaaggctgttgcagctcctcgacctgatcggttggtcaatcgcttgaagaatatcactctggatgatgccagtgctcctcgcctaatggttcttcgtcagccaaggggaccagataactcaatggggtttggtgcagaaagaaagatccgtcaagctggtgtcattgactaaccacatccacaaagcacaccattaatccactatgatcaagttggggggaatctggtgaagggttctgaatatctccctcttcatccctcccgaaatctggaatacttattctattgagctattacaccagttttaacaccttcctcgtgttatgtttaaaaaaataaataaatttaagaaaaccattttaaataatgcacagttgcagcctggaaaaacttaaggtggcgccttatagtatcaattttaggagctttatttggtgcatttaacgcaactggtaattgcagaatccactttgcctgtgtaagtgaaaaatatagactgttatcttgttggccctatgaaattctgcacttttcattatatactctaccttcattaattacttctggcaagatgttctgccttagcactcagttgcattcttttcctttttcttcctgttcattatgctttaattctgaggaccatatgagggtagaatatattatcttttaaaaattacaaaaatttgtataggcaaaccatttcttaaagttgatggccaaattttaaaatgttatttttcatatcatttataatcttgtcacaatccacttaaagaagtttggttatatttcagtgaaaattttcttccagagtaggttttttttcgtgggttggggggtaactttactacaattagtaagtatggtgcagaatttcatgcaaatgaggagtgccagcagtgtgataatttaaacatatttaaacaaaaacaaaaaaaatgaatgcacaaacttgctgctgcttagatcactgcagcttctaggacccggtttcttttactgatttaaaaacaaaacaaaaaaaaataaaaaagttgtgcctgaaatgaatcttgtttttttttataagtagccgcctggttactgtgtcctgtaaaatacagacacttgacccttggtgtagcttctgttcaactttatatcacgggaatggatgggtctgatttcttggccctcttcttgaattggccatatacagggtccctggccagtggactgaaggctttgtctaagatgacaagggtcagctcaggggatgtgggggagggcggttttatcttcccccttgtcgtttgaggttttgatctctgggtaaagaggccgtttatctttgtaaacacgaaacatttttgctttctccagttttctgttaatggcgaaagaatggaagcgaataaagttttactgatttttgagacactagc

SEQ ID NO: 121400 - DNA, 526 bp, Homo sapiens
  Payload ID: 3796
  Gene Symbol: CLPS
  Gene Name: colipase, pancreatic
  Uniprot ID: P04118
  ENST ID: ENST00000259938
  CDS Start-End: 24-362
ccacaccagctgtcccactcaccatggagaagatcctgatcctcctgcttgtcgccctctctgtggcctatgcagctcctggcccccgggggatcattatcaacctggagaacggtgagctctgcatgaatagtgcccagtgtaagagcaattgctgccagcattcaagtgcgctgggcctggcccgctgcacatccatggccagcgagaacagcgagtgctctgtcaagacgctctatgggatttactacaagtgtccctgtgagcgtggcctgacctgtgagggagacaagaccatcgtgggctccatcaccaacaccaactttggcatctgccatgacgctggacgctccaagcagtgagactgcccacccactcccacacctagcccagaatgctgtaggccactaggcgcaggggcatctctcccctgctccagcgcatctcccgggctggccacctccttgaccagcatatctgttttctgattgcgctcttcacaattaaaggcctcctgcaaaccttt

SEQ ID NO: 121401 - DNA, 461 bp, Homo sapiens
  Payload ID: 3796
  Gene Symbol: CLPS
  Gene Name: colipase, pancreatic
  ENST ID: ENST00000622413
  CDS Start-End: 1-297
atgattctcctgcctcagcctcccaagaagctgggattacaggagaacggtgagctctgcatgaatagtgcccagtgtaagagcaattgctgccagcattcaagtgcgctgggcctggcccgctgcacatccatggccagcgagaacagcgagtgctctgtcaagacgctctatgggatttactacaagtgtccctgtgagcgtggcctgacctgtgagggagacaagaccatcgtgggctccatcaccaacaccaactttggcatctgccatgacgctggacgctccaagcagtgagactgcccacccactcccacacctagcccagaatgctgtaggccactaggcgcaggggcatctctcccctgctccagcgcatctcccgggctggccacctccttgaccagcatatctgttttctgattgcgctcttcacaattaaaggcctcctgcaaaccttt

SEQ ID NO: 121402 - DNA, 436 bp, Homo sapiens
  Payload ID: 3796
  Gene Symbol: CLPS
  Gene Name: colipase, pancreatic
  ENST ID: ENST00000616014
  CDS Start-End: 57-272
cccatcaccacagctggctctgtctcccgccacccacaccagctgtcccactcaccatggagaagatcctgatcctcctgcttgtcgccctctctgtggcctatgcagctcctggcccccgggggatcattatcaacctgacgctctatgggatttactacaagtgtccctgtgagcgtggcctgacctgtgagggagacaagaccatcgtgggctccatcaccaacaccaactttggcatctgccatgacgctggacgctccaagcagtgagactgcccacccactcccacacctagcccagaatgctgtaggccactaggcgcaggggcatctctcccctgctccagcgcatctcccgggctggccacctccttgaccagcatatctgttttctgattgcgctcttcacaattaaaggcctcctgcaaaccttt

SEQ ID NO: 121403 - DNA, 602 bp, Homo sapiens
  Payload ID: 3797
  Gene Symbol: CLPSL1
  Gene Name: colipase-like 1
  Uniprot ID: A2RUU4
  ENST ID: ENST00000373861
  CDS Start-End: 95-460
ttacatggtgttcccacagctgggaggacacccacatggtcggcgtgcaggatatttcgctggaccctagaaaagccaccacgacctgtgggccatgatgctaccccaatggctgctgctgctgttccttctcttcttctttctcttcctcctcaccaggggctcactttctccaacaaaatacaaccttttggagctcaaggagtcttgcatccggaaccaggactgcgagactggctgctgccaacgtgctccagacaattgcgagtcgcactgcgcggagaaggggtccgagggcagtctgtgtcaaacgcaggtgttctttggccaatatagagcgtgtccctgcctgcggaacctgacttgtatatattcaaagaatgagaaatggcttagcatcgcctatggccgttgtcagaaaattggaaggcagaagttggctaagaaaatgttcttctagtgctccctccttcttgctgcctcctcctcctccacctgctctcctccctacccagagctctgtgttcaccctgttccccagagcctccaccatgagtggagggaagtggggagtgattgaaataaagagctttttcaatgtt

SEQ ID NO: 121404 - DNA, 269 bp, Homo sapiens
  Payload ID: 3797
  Gene Symbol: CLPSL1
  Gene Name: colipase-like 1
  ENST ID: ENST00000428710
  CDS Start-End: 1-129
ggctgctgccaacgtgctccagacaattgcgagtcgcactgcgcggagaaggggtccgagggcagtctgtgtcaaacgcagctgccagctactccatgcttcctgccttcgaatacggtgagaacgtgaagtcatgagctgctgctaaggcatgtggcaaccttgaagagaaggtcaagagctaccagccaccaaaagaatgccagcacttcctgtgtctttgctttggattcatgagaaatatacgttcctatttgcttcagccataa

SEQ ID NO: 121405 - DNA, 488 bp, Homo sapiens
  Payload ID: 3798
  Gene Symbol: CLPSL2
  Gene Name: colipase-like 2
  Uniprot ID: Q6UWE3
  ENST ID: ENST00000360454
  CDS Start-End: 5-466
gcccatggccgcagccctggcgctcgtggcgggggtcctgtcgggggcggtgctgcccctctggagcgcgcttccgcaatataaaaagaaaatcacagacaggtgcttccaccactctgagtgctacagtggctgctgcctcatggacttggactccggtggagccttctgtgcccccagggccagaataaccatgatctgcttgccccagtggttggaactcttcaagggcagggatcgcatcatattcatctatgaagcacctacccccagcttagtatctgcacataaccaagggagctaccaacatcatctgcccttgccggatgggcttgacgtgcatatccaaggacttgatgtgttcccgccggtgccatatgatttagaggaagatgcaggctggtcactgctcccttggggccataggccctggttgccaccaacttgctccaaatccagctcctgagacattaaagtcacttcctgtc

SEQ ID NO: 121406 - DNA, 405 bp, Homo sapiens
  Payload ID: 3798
  Gene Symbol: CLPSL2
  Gene Name: colipase-like 2
  Uniprot ID: Q6UWE3
  ENST ID: ENST00000403376
  CDS Start-End: 1-303
atggccgcagccctggcgctcgtggcgggggtcctgtcgggggcggtgctgcccctctggagcgcgcttccgcaatataaaaagaaaatcacagacaggtgcttccaccactctgagtgctacagtggctgctgcctcatggacttggactccggtggagccttctgtgcccccagggccagaataaccatgatctgcttgccccagaccaagggagctaccaacatcatctgcccttgccggatgggcttgacgtgcatatccaaggacttgatgtgttcccgccggtgccatatgatttagaggaagatgcaggctggtcactgctcccttggggccataggccctggttgccaccaacttgctccaaatccagctcctgagacattaaagtcacttcctgtc

SEQ ID NO: 121407 - DNA, 5979 bp, Homo sapiens
  Payload ID: 3799
  Gene Symbol: CCBE1
  Gene Name: collagen and calcium binding EGF domains 1
  ENST ID: ENST00000398179
  CDS Start-End: 1-1011
aggaaaaagtgctgcaaaggatataaatttgttcttggacaatgcatcccagaagattacgacgtttgtgccgaggctccctgtgaacagcagtgcacggacaactttggccgagtgctgtgtacttgttatccgggataccgatatgaccgggagagacaccggaagcgggagaagccatactgtctggatattgatgagtgtgccagcagcaatgggacgctgtgtgcccacatctgcatcaataccttgggcagctaccgctgcgagtgccgggaaggctacatccgggaagatgatgggaagacatgtaccaggggagacaaatatcccaatgacactggccatgagaagtctgagaacatggtgaaagccggaacttgctgtgccacatgcaaggagttctaccagatgaagcagaccgtgctgcagctgaagcaaaagattgctctgctccccaacaatgcagctgacctgggcaagtatatcactggtgacaaggtgctggcctcaaacacctaccttccaggacctcctggcctgcctgggggccagggccctcccggctcaccaggaccaaagggaagcccaggcttccccggtatgccaggccctcctgggcagcccggcccacggggctcaatgggacccatgggaccatctcctgatctgtcccacattaagcaaggccggaggggccctgtgggtccaccaggggcaccaggaagagatggttctaagggggagagaggagcgcctgggcccagagggtctccaggaccccctggttctttcgacttcctgctacttatgctggctgacatccgcaatgacatcactgagctgcaggaaaaggtgttcgggcaccggactcactcttcagcagaggagttccctttacctcaggaatttcccagctacccagaagccatggacctgggctctggagatgaccatccaagaagaactgagacaagagacttgagagcccccagagacttctacccatagcacatcccaacaccgtcacgccaaaggaagagaaagatcaactcacctgcagttaaaccatctaaagagaagaaagaccactggagacctagaaaacatacatttttctcttctcttctcctgacgtctctccactcctcttcttccaaatacgatgctattttcagagtcccctcctaggcctgcagacatgagggagtgaatgattgatttacctgcttctcactaagagtccattggggtggtttgcattgtaacttttcttttacatcctatttttccaggaactttggatttaagtactctcacagtgtcttaaatcataaattcttgaagttaaatttggcagagtatcaaaagggggaaaatgacaaagtgagctctaagaaaatgtgaggctacttctaagatgtgtgttcacaatagaccataactcctctagtatcaaaattggggctcttcagttaaaaaggggtggggaggacaaacgtgtcgatgtgctttggtggagaattttttccttgtgcttctagtagactttaaatattgtatccctttgtcaaaccttgtttcccaaattcaattaaagagaggagagaattgaatggcgtttagagaagatagaaaagaatcacagtcatatatttactgttatatagattgccacattctaaaattcaaatacggtgcttaaggtttcatgccatgcttatctgtaagtatcctatttagggaagaagattaaactctcttttcaaaaaaacaaagtgaaatgcctggattcacattaaaacaatgggctctcgtttgctataatattttaaagctgtttaatcaacagtggagtctgctctataaatatagattatttgttcaataaactggctgagcttagagagaggtgcagaattcctggttctgagcaggtgcccagaaggtaccattaggtgccatgatccaggctgaaccaatatacagtggggctgaagtctgcaaggaggttgctggcttgggctgacctcactaatgccatcagcagcggtaggtaaattttttctccttgggtattacaagtttttgtctggagccaaccaagcttgccaccaacatattgagagtaatacactattgaaagttatcttggatggggagaaaaaaaaatagtggttttccttgtttgcaaaaacttccttcctattctcattttttcttaattttctttaatttagtccaagttccagttcttttaggccttctctttgatttattttcccctgcatgtgagaagcagttcagaaaaaggtctatatctccacctcctagtgagttagagtgttttctcagagcacctctgggtggcaaagggaagcatgttcctgccaaggtttgctgtggattcagaagcaccaggagcaagagaccagaaggatgatctgctcctttgtaacgttgttgagggccctcttgtttccaatgagcagcttataggttactcacagtccactttctcactggacacacaaagtggctctttatctacctttgcgggagattttcactctcctgcaaatgatcgttctcacactcatattagctcatgttggaatttcccatcctgccatgtcctttcccatttctttttggcttttttgcctccaccttttagcccacatcatttaactccactactgtgaaagcttgcttaaagaaaatccctcttggccgggtgtggtagcccacgcctctaatcccagcactttgggaggctgaggcggggagatcacaaggtcaggagatcgagaccagcctgaccaacatggtgaaaccctgtctctactaaaaatacaaaaattagctgggcgtgttggcacacacctgtaatcccagctactcaggaggctgaggcaggagaattactttaacctgcggggggagcctagattgcgctactgcactccagcctaggcaacagagggagactctgtctcattaaaaaaaaaaaaaaaaaaaaaaaaaggccgggcttggtggctcatgcctgtaatcccagcactttgggaggccgaggcgggcggatcacgaggtcaggagatcgagaccacagtgaaaccctgtctctactaaaaacacaaaaaattagtcgggcgtggtggtgggcgcctgtggtcccagctgctcgggaggctgaggcaggagaatggcgtgaacctgggaggcggagcttgcgctgagccgagatcgtgccactgcactccagcctgggcgacagagcgagactctgtctcaaaaaaaaaaaaatatcccttttgttgtgtttgaatgccacctttcagtcttcttccttaagaatgttaggaaggggctttgcaaacctctagtggcaacagtcttccttcccttcttcctaccacgttggaaatgcaggactcatgtcagtcagcatgtgaccgagtctttcatgaacactttgctcctctatgtctcatttatgcaaaattcctggtgactctccactaacatttttaaagtgaaagcaaactttcactttaaaaaaagtgagcgagaggatcccttgagcccaggagttcaaggccagtctgggcaacatagcaagaccccatccctaaaaaaaaaaaaataagttttattaaatgtggcactttcccctagaagggcagtaaccccaggaaccagtctgcctcttttcgaataaaggagactttttaaaaagaaaaaatttctttttagggtggggtgctctttatctagcatctttccttcctccttctctctgcaaaattcaacattcatgacagagggccacaccaaccacgggtttatagagagaggaactgaacagctgttgattcccatctggaatatatttaatgtttgcctgcttgtggagcatggtatttaaagggtgtggatggatgaatgtttaaaaaaaaacacacaaaactatgcacaagctgtatgagagatggctaggtccatctatgattttttttaaaagaagaattttaataccttttctttgacagtgaactgtatttagaaatatgatctttattgtgaaatgctcataaaatgcaaccaaactgcatgtttggccataggctagaataatatattaaaagaattaatggaaagtagtattgtctgggtttcatgaaactattccagataatattctccagcaaaacttatggtaacctgtattttataatgtcaatctgctggaccaagttaatttagaaaataatttttaatcctcagattttcaaaacttggactactgcaagactgatatgtactttttatgcccaaatcatatttttcaaagataggacatcataaggcatcattatttctaatgtatcttttaactagatagaaaaagctttactgtctaaacaggacttctgctcaaaacctaatgggaaagctatttctggggtaagatttgtaacagtgcttctaggtcatttcatgttttatagggaaaaagatctttgtacacctcctcaacctgttagtagaaatgttgacttcgattttttgcaccctcttcacaggacctcataagttgcctctgttcttggaaagcaatgggaataaaaatatgctgttgaaaatagtgcatggggccaggcacagtggttatgcctgtaatcccaacactttgggaggctgaggcgggcgcatcatgaggtcaggagatcaagaccatcctgaccaacacgtggtgaaaccccatctctactaaaataaataaaaaaaaaaattagccaggcgtggtggtgcacgcctgtagtctcagctactcgggaagctgagacacaagaattgcttgaacccgggaggtggaggttgcagtgagccaagattgcgccactgcactccagcctggctacagagtgagactccgtctcgaaaaaagaaaatagtacatggagggcatgcattttagtttaggaaacccccctcccttcccagttccagagggagaaattataagctatactgtgccaaaagtgagtggggctgcagagagaatggtgccttttctcaccttctgagttaatgcccgacatctgccattggattcattgaccaaaggaagtcatttctactgtataaactcaggagtatcatagcccaacaagtaaataataaatgttcattggttttggaaggaaggaaaggtgagtattaccccaccaaataccagcgaagagcaccctggctttggccatctttccaaggttcataattgctgtgggcctggtgagccctgttcccaggtatgcaagggagggcttctccaggccagacatttctgtaggttttcaggtagcaactcccccatcatattttgggtgtcattccccactctctctccccacttctcagcctgtgccccagaaacaaccacagcagcctcattctgcagacttaacatctgtcaaataaccttcctgaaaaggaaagttattggaggaatccaggccaaacaacaagtagaatagagccatctaaagttattaataatgagttcagggaaatagatgaattttttcctggcatagtcaatatttatatctcacaacaagtcaaaaataattttccatttggaaaacaaaacacaccatgactgtaattgttaaggcatataatcatgaacttcacatgctccctcaacaaacgttactgctctagggaaatcatagaaaaggaccctcttactccccaggggatcaaagcaagtccccttaggaatttcatgtgtgccgtgggtctgtttttatttcacagtgactagtcatatactggagtagctctgttgttcattatttgtaacaggtccatgtaacagtcaagttagcattcaagcaattatggatgtgatactatgatgtacttttgttatgattgtatatgcttaataacaaagttatttttctt

SEQ ID NO: 121408 - DNA, 6227 bp, Homo sapiens
  Payload ID: 3799
  Gene Symbol: CCBE1
  Gene Name: collagen and calcium binding EGF domains 1
  Uniprot ID: Q6UXH8
  ENST ID: ENST00000439986
  CDS Start-End: 39-1259
cggagctcggcgctgggaagaagccgggagcttccctgatggtgccgccgcctccgagccggggaggagctgccaggggccagctgggcaggagcctgggtccgctgctgctgctcctggcgttgggacacacgtggacctacagagaggagccggaggacggcgacagagaaatctgctcagagagcaaaatcgcgacgactaaatacccgtgtctgaagtcttcaggcgagctcaccacatgctacaggaaaaagtgctgcaaaggatataaatttgttcttggacaatgcatcccagaagattacgacgtttgtgccgaggctccctgtgaacagcagtgcacggacaactttggccgagtgctgtgtacttgttatccgggataccgatatgaccgggagagacaccggaagcgggagaagccatactgtctggatattgatgagtgtgccagcagcaatgggacgctgtgtgcccacatctgcatcaataccttgggcagctaccgctgcgagtgccgggaaggctacatccgggaagatgatgggaagacatgtaccaggggagacaaatatcccaatgacactggccatgagaagtctgagaacatggtgaaagccggaacttgctgtgccacatgcaaggagttctaccagatgaagcagaccgtgctgcagctgaagcaaaagattgctctgctccccaacaatgcagctgacctgggcaagtatatcactggtgacaaggtgctggcctcaaacacctaccttccaggacctcctggcctgcctgggggccagggccctcccggctcaccaggaccaaagggaagcccaggcttccccggtatgccaggccctcctgggcagcccggcccacggggctcaatgggacccatgggaccatctcctgatctgtcccacattaagcaaggccggaggggccctgtgggtccaccaggggcaccaggaagagatggttctaagggggagagaggagcgcctgggcccagagggtctccaggaccccctggttctttcgacttcctgctacttatgctggctgacatccgcaatgacatcactgagctgcaggaaaaggtgttcgggcaccggactcactcttcagcagaggagttccctttacctcaggaatttcccagctacccagaagccatggacctgggctctggagatgaccatccaagaagaactgagacaagagacttgagagcccccagagacttctacccatagcacatcccaacaccgtcacgccaaaggaagagaaagatcaactcacctgcagttaaaccatctaaagagaagaaagaccactggagacctagaaaacatacatttttctcttctcttctcctgacgtctctccactcctcttcttccaaatacgatgctattttcagagtcccctcctaggcctgcagacatgagggagtgaatgattgatttacctgcttctcactaagagtccattggggtggtttgcattgtaacttttcttttacatcctatttttccaggaactttggatttaagtactctcacagtgtcttaaatcataaattcttgaagttaaatttggcagagtatcaaaagggggaaaatgacaaagtgagctctaagaaaatgtgaggctacttctaagatgtgtgttcacaatagaccataactcctctagtatcaaaattggggctcttcagttaaaaaggggtggggaggacaaacgtgtcgatgtgctttggtggagaattttttccttgtgcttctagtagactttaaatattgtatccctttgtcaaaccttgtttcccaaattcaattaaagagaggagagaattgaatggcgtttagagaagatagaaaagaatcacagtcatatatttactgttatatagattgccacattctaaaattcaaatacggtgcttaaggtttcatgccatgcttatctgtaagtatcctatttagggaagaagattaaactctcttttcaaaaaaacaaagtgaaatgcctggattcacattaaaacaatgggctctcgtttgctataatattttaaagctgtttaatcaacagtggagtctgctctataaatatagattatttgttcaataaactggctgagcttagagagaggtgcagaattcctggttctgagcaggtgcccagaaggtaccattaggtgccatgatccaggctgaaccaatatacagtggggctgaagtctgcaaggaggttgctggcttgggctgacctcactaatgccatcagcagcggtaggtaaattttttctccttgggtattacaagtttttgtctggagccaaccaagcttgccaccaacatattgagagtaatacactattgaaagttatcttggatggggagaaaaaaaaatagtggttttccttgtttgcaaaaacttccttcctattctcattttttcttaattttctttaatttagtccaagttccagttcttttaggccttctctttgatttattttcccctgcatgtgagaagcagttcagaaaaaggtctatatctccacctcctagtgagttagagtgttttctcagagcacctctgggtggcaaagggaagcatgttcctgccaaggtttgctgtggattcagaagcaccaggagcaagagaccagaaggatgatctgctcctttgtaacgttgttgagggccctcttgtttccaatgagcagcttataggttactcacagtccactttctcactggacacacaaagtggctctttatctacctttgcgggagattttcactctcctgcaaatgatcgttctcacactcatattagctcatgttggaatttcccatcctgccatgtcctttcccatttctttttggcttttttgcctccaccttttagcccacatcatttaactccactactgtgaaagcttgcttaaagaaaatccctcttggccgggtgtggtagcccacgcctctaatcccagcactttgggaggctgaggcggggagatcacaaggtcaggagatcgagaccagcctgaccaacatggtgaaaccctgtctctactaaaaatacaaaaattagctgggcgtgttggcacacacctgtaatcccagctactcaggaggctgaggcaggagaattactttaacctgcggggggagcctagattgcgctactgcactccagcctaggcaacagagggagactctgtctcattaaaaaaaaaaaaaaaaaaaaaaaaaggccgggcttggtggctcatgcctgtaatcccagcactttgggaggccgaggcgggcggatcacgaggtcaggagatcgagaccacagtgaaaccctgtctctactaaaaacacaaaaaattagtcgggcgtggtggtgggcgcctgtggtcccagctgctcgggaggctgaggcaggagaatggcgtgaacctgggaggcggagcttgcgctgagccgagatcgtgccactgcactccagcctgggcgacagagcgagactctgtctcaaaaaaaaaaaaatatcccttttgttgtgtttgaatgccacctttcagtcttcttccttaagaatgttaggaaggggctttgcaaacctctagtggcaacagtcttccttcccttcttcctaccacgttggaaatgcaggactcatgtcagtcagcatgtgaccgagtctttcatgaacactttgctcctctatgtctcatttatgcaaaattcctggtgactctccactaacatttttaaagtgaaagcaaactttcactttaaaaaaagtgagcgagaggatcccttgagcccaggagttcaaggccagtctgggcaacatagcaagaccccatccctaaaaaaaaaaaaataagttttattaaatgtggcactttcccctagaagggcagtaaccccaggaaccagtctgcctcttttcgaataaaggagactttttaaaaagaaaaaatttctttttagggtggggtgctctttatctagcatctttccttcctccttctctctgcaaaattcaacattcatgacagagggccacaccaaccacgggtttatagagagaggaactgaacagctgttgattcccatctggaatatatttaatgtttgcctgcttgtggagcatggtatttaaagggtgtggatggatgaatgtttaaaaaaaaacacacaaaactatgcacaagctgtatgagagatggctaggtccatctatgattttttttaaaagaagaattttaataccttttctttgacagtgaactgtatttagaaatatgatctttattgtgaaatgctcataaaatgcaaccaaactgcatgtttggccataggctagaataatatattaaaagaattaatggaaagtagtattgtctgggtttcatgaaactattccagataatattctccagcaaaacttatggtaacctgtattttataatgtcaatctgctggaccaagttaatttagaaaataatttttaatcctcagattttcaaaacttggactactgcaagactgatatgtactttttatgcccaaatcatatttttcaaagataggacatcataaggcatcattatttctaatgtatcttttaactagatagaaaaagctttactgtctaaacaggacttctgctcaaaacctaatgggaaagctatttctggggtaagatttgtaacagtgcttctaggtcatttcatgttttatagggaaaaagatctttgtacacctcctcaacctgttagtagaaatgttgacttcgattttttgcaccctcttcacaggacctcataagttgcctctgttcttggaaagcaatgggaataaaaatatgctgttgaaaatagtgcatggggccaggcacagtggttatgcctgtaatcccaacactttgggaggctgaggcgggcgcatcatgaggtcaggagatcaagaccatcctgaccaacacgtggtgaaaccccatctctactaaaataaataaaaaaaaaaattagccaggcgtggtggtgcacgcctgtagtctcagctactcgggaagctgagacacaagaattgcttgaacccgggaggtggaggttgcagtgagccaagattgcgccactgcactccagcctggctacagagtgagactccgtctcgaaaaaagaaaatagtacatggagggcatgcattttagtttaggaaacccccctcccttcccagttccagagggagaaattataagctatactgtgccaaaagtgagtggggctgcagagagaatggtgccttttctcaccttctgagttaatgcccgacatctgccattggattcattgaccaaaggaagtcatttctactgtataaactcaggagtatcatagcccaacaagtaaataataaatgttcattggttttggaaggaaggaaaggtgagtattaccccaccaaataccagcgaagagcaccctggctttggccatctttccaaggttcataattgctgtgggcctggtgagccctgttcccaggtatgcaagggagggcttctccaggccagacatttctgtaggttttcaggtagcaactcccccatcatattttgggtgtcattccccactctctctccccacttctcagcctgtgccccagaaacaaccacagcagcctcattctgcagacttaacatctgtcaaataaccttcctgaaaaggaaagttattggaggaatccaggccaaacaacaagtagaatagagccatctaaagttattaataatgagttcagggaaatagatgaattttttcctggcatagtcaatatttatatctcacaacaagtcaaaaataattttccatttggaaaacaaaacacaccatgactgtaattgttaaggcatataatcatgaacttcacatgctccctcaacaaacgttactgctctagggaaatcatagaaaaggaccctcttactccccaggggatcaaagcaagtccccttaggaatttcatgtgtgccgtgggtctgtttttatttcacagtgactagtcatatactggagtagctctgttgttcattatttgtaacaggtccatgtaacagtcaagttagcattcaagcaattatggatgtgatactatgatgtacttttgttatgattgtatatgcttaataacaaagttatttttctt

SEQ ID NO: 121409 - DNA, 587 bp, Homo sapiens
  Payload ID: 3799
  Gene Symbol: CCBE1
  Gene Name: collagen and calcium binding EGF domains 1
  ENST ID: ENST00000589419
  CDS Start-End: 449-587
ctttgcctgctgccatctatgtaagacgtgacttgttcctcctcgccttttgccgtgattatgaagcctccccagccatgtggaactgaaaaagtgctgcaaaggatataaatttgttcttggacaatgcatcccagaagattacgacgtttgtgccgaggctccctgtgaacagcagtgcacggacaactttggccgagtgctgtgtacttgttatccgggataccgatatgaccgggagagacaccggaagcgggagaagccatactgtctggatattgatgagtgtgccagcagcaatgggacgctgtgtgcccacatctgcatcaataccttgggcagctaccgctgcgagtgccgggaaggctacatccgggaagatgatgggaagacatgtaccaggggagacaaatatcccaatgacactggccatgagaagtctgagaacatggtgaaagccggaacttgctgtgccacatgcaaggagttctaccagatgaagcagaccgtgctgcagctgaagcaaaagattgctctgctccccaacaatgcagctgacctgggcaagtatatcactggtgacaagg

SEQ ID NO: 121410 - DNA, 3704 bp, Homo sapiens
  Payload ID: 3800
  Gene Symbol: COLGALT1
  Gene Name: collagen beta(1-O)galactosyltransferase 1
  Uniprot ID: Q8NBJ5
  ENST ID: ENST00000252599
  CDS Start-End: 121-1989
ttcacgcccggcgcgctcctcccctttaaggcgcgcggccgggcggggcccctatgacccctttaaggcgcggccagagtcctcccgcagaaaaacgacttaaaggagacgcgtggcgcgatggcggcggccccacgcgcgggccggcggcgcgggcagccgctcctggcgctgctgcttctgctgctggcgccactgccgccgggggccccgccgggcgccgacgcctacttccccgaggagcgctggagcccggagtcgcccctgcaggcgccgcgcgtgctcatcgcgctgttggcgcgaaacgcggcccacgcgttgcccaccacgctgggcgcactcgagcggctgcggcacccgcgggagcgcacggcgctatgggtggctacggaccacaacatggataacacgtcaactgtgctgcgggagtggctggtggccgtgaagagtttgtaccattccgtggagtggcggccagcagaggagcccaggtcctacccggacgaggaaggcccgaaacactggtctgactcacgctacgagcatgtcatgaagttgcgccaggcagccctgaaatcagctcgagacatgtgggctgattacatcctgtttgtagatgcggacaacctgatcctcaaccctgacacactgagcctgctcatcgctgagaacaagacggtggtcgcccccatgctggattcccgggctgcgtactccaacttctggtgtggaatgacttcccagggctactacaagcgcacacctgcctacatccctatccgcaagcgagaccgccggggctgctttgcagttcccatggtgcactcgaccttcctgatcgacctgcggaaggcggcgtccaggaacctggccttctacccacctcaccctgactacacctggtcctttgacgacatcatcgtctttgccttctcctgcaagcaggcagaggttcagatgtatgtgtgcaacaaggaggagtacggattcttgccagtgccattgcgcgcccacagcaccctccaggatgaggccgagagcttcatgcatgtgcagctggaggtcatggtgaagcacccgcccgcagagccctcccgcttcatctcggctcccaccaagacaccggacaagatgggcttcgacgaggtcttcatgatcaacctgaggcggcggcaggaccggcgggagcgcatgctgcgggcgctgcaggcacaggagatcgagtgccggctggtggaggccgtggacggcaaagccatgaacaccagccaggtggaggcgctggggatccagatgctgcctggctaccgggacccctaccacggccggcccctcaccaagggtgagctgggctgcttcctgagccactacaacatctggaaggaggtggtggaccgggggctgcagaaatcgcttgtgtttgaggatgacctgcgttttgagatcttcttcaagagacgtctgatgaacctcatgcgggatgtggagcgggagggcctggactgggacctcatctatgtgggccggaagcggatgcaggtggagcaccccgagaaggctgtgcctcgcgtgaggaacctggtggaggccgactattcctactggaccctggcctacgtgatctccctgcaaggcgcccgcaaactgctggctgctgagccgctctccaagatgctgcctgtggacgagttcctgcccgtcatgttcgacaaacacccagtgtccgagtacaaggcccacttctccctccgcaacctgcatgccttctctgtggagccgctgctcatctaccccacacactacacaggagacgatggctatgtgagtgacaccgagacctcagtcgtatggaacaatgagcacgtcaagaccgactgggaccgcgccaagtcccagaagatgcgggagcagcaggcactgagccgtgaggccaagaactcggacgtgctccagtccccactggacagtgctgcccgggatgaactctgaggggtagcagccagaaagccaaagcagccatcggtggcccaggctccacgtgcttactgaggacatcaggtccacctctggaccccttggcaggccacagagggctctcgtgtggggtggtgtccagccagctcttgctaagcaatcacgtgcacacaggcagcattaatggagtgcctactgcatgccagcaacagggcttggccctggggaattgggaggaaccaagccctcttcatctgttcatgtgcccagcatttattaagcacctgctgtatgcaaggttcccatgttacggcagtgaatgaggcataattgttccctccatcagcgattgattcagtcatcaagcagttactgatcagattaagaatcaggcactagtgatacacattcatttttaaaattcattcaaggatttattgagtgcctactgtgtgttgggtgccattccaggctctgggatttttttttttttttttttaagagtagagtctgtctctgtcacccaggctggagtgcagtggtgtgacggctcactgcagcctgcgcctcccagcgtccagcaattcttgtttctcggcctcccaagtagctgggactataggtgcgtgccatcacatctggctagtttttgtatttttagtagagacggggtttcaccatgttggccaggctggtctcgaactcctgacctcaagtgatctgcccgccttggccacccaaagtgctagggttacaggcatgagccactgtgcccagcccaggctctgggaatattgagataaataagatgcttctatccatttattcaagcacatattggtcacctactgtgtgcctggcactcatgtcacaaagataagttcctgattcggtacacttactgagcacctgctgtgtgcagggagctgagctatgggatgggaatgggagtaaacaaggtactttttacttttttctttttttcctcactgctagacggtgtgggaacttctcactcattggcttctttcccacacacctgaagagcactgactgtgtgccgggcactagtgatacaaaagagtgtgacagttgttcagtctgcattttcgatcatgggctacatgccgagtgctggggcacagagatgaacaagatcggttccttcacttcttcatgccacaagtgtttattgagcacctgtgtgccaggcctcacagactcccagttgggttgaagaatggttgactgagtttgattcttcctgtaccctcggtcgtctgagctgtgtgcagacaacatccccccaccacccaagagggagggtagctcttccgccaccaggggcaagcacaggtcctggtggccccacgccacatgttagcccccctggagggggcgccagttggagacgggggctgggtgtccctggcccactcccggtcccctgtgctttacctccttgcccttgtgtctcaggtgtggtccctgcctgcttgatgaagttgctctgttcaagcctttggtgggatcatgtgtttgggggcttttaggggacccagctgcactggggcactgcccgtggcctgggtaggacatttcccagcaagggctggaggagttgccgtgccttcagcctgaatcgaatgtcagaaccagccagcggtgcttcaccctcttggggataacttgcttagttttttaataaatgttcctggttggttttcaca

SEQ ID NO: 121411 - DNA, 654 bp, Homo sapiens
  Payload ID: 3800
  Gene Symbol: COLGALT1
  Gene Name: collagen beta(1-O)galactosyltransferase 1
  ENST ID: ENST00000597147
  CDS Start-End: 1-654
gaaggcggcgtccaggaacctggccttctacccacctcaccctgactacacctggtcctttgacgacatcatcgtctttgccttctcctgcaagcaggcagtgaagcacccgcccgcagagccctcccgcttcatctcggctcccaccaagacaccggacaagatgggcttcgacgaggtcttcatgatcaacctgaggcggcggcaggaccggcgggagcgcatgctgcgggcgctgcaggcacaggagatcgagtgccggctggtggaggccgtggacggcaaagccatgaacaccagccaggtggaggcgctggggatccagatgctgcctggctaccgggacccctaccacggccggcccctcaccaagggtgagctgggctgcttcctgagccactacaacatctggaaggaggtggtggaccgggggctgcagaaatcgcttgtgtttgaggatgacctgcgttttgagatcttcttcaagagacgtctgatgaacctcatgcgggatgtggagcgggagggcctggactgggacctcatctatgtgggccggaagcggatgcaggtggagcaccccgagaaggctgtgcctcgcgtgaggaacctggtggaggccgactattcctactggaccctggcctacgtgat

SEQ ID NO: 121412 - DNA, 552 bp, Homo sapiens
  Payload ID: 3800
  Gene Symbol: COLGALT1
  Gene Name: collagen beta(1-O)galactosyltransferase 1
  ENST ID: ENST00000600474
  CDS Start-End: 139-552
agagctctgaagaaacctttgactggtgacttctcactccctgcctcagttttctcaaatggaaaatgggtccgggtgcagtggctcacgcagtaatcctagcaatttgggaggccaagggtggctacggaccacaacatggataacacgtcaactgtgctgcgggagtggctggtggccgtgaagagtttgtaccattccgtggagtggcggccagcagaggagcccaggtcctacccggacgaggaaggcccgaaacactggtctgactcacgctacgagcatgtcatgaagttgcgccaggcagccctgaaatcagctcgagacatgtgggctgattacatcctgtttgtagatgcggacaacctgatcctcaaccctgacacactgagcctgctcatcgctgagaacaagacggtggtcgcccccatgctggattcccgggctgcgtactccaacttctggtgtggaatgacttcccagggctactacaagcgcacacctgcctacatccctatccgcaagcgagaccgccggggctgctttgcagtt

SEQ ID NO: 121413 - DNA, 5177 bp, Homo sapiens
  Payload ID: 3801
  Gene Symbol: COLGALT2
  Gene Name: collagen beta(1-O)galactosyltransferase 2
  Uniprot ID: Q8IYK4
  ENST ID: ENST00000361927
  CDS Start-End: 373-2253
cacaactcgcggctctagggaaggccacagacctcagctgtacgagcggaacctggactagaggaactttcctcaggactcagggcacacagcccctcggccactactgtctgcgagcccgaggcgcaggggagcgccagcggctgcaggtacgctgcgcacccgcactggggcctgggcggtgcagcggcggcgggagggtcctgggaaccgcagccgccgaggccagtgtgtgagccggccggccgcggcaagccgcatcccccggccgcccctcgcagccccttgctccccggcagccgccgccgccctcaggcagcccagccgggcgctcgcgccaggacttccccgccgcccgcctcggcccggaacatggctgcgcgccctgctgccaccctcgcctggtcgctactgctcctctcctcagccctgctccgcgaaggctgccgagcgcgcttcgtcgccgagcgggactcggaggacgacggagaggagccggtggttttcccggagtcgcccctgcagagccccacggtgctcgtggcggtcctcgcccgcaacgcggcgcacacgctgccgcacttcctcggctgcctggagcggctggactaccccaagagcaggatggccatctgggcagccactgatcacaatgtggataatacaacagaaatattcagggagtggttgaaaaatgtacagagactctatcactatgtggagtggaggcctatggatgaaccagagtcttaccctgatgaaattggaccaaagcactggccaacctcccggtttgcccatgtgatgaaactacgacaggcagcccttcgaactgcgagggaaaaatggtcagactacattctgttcatagatgttgacaatttcctgactaatccacagaccctcaatctactgattgcagaaaacaaaactattgtggcccccatgctggagtctcggggcctgtattctaatttctggtgcggaatcacccctaagggcttctataagaggaccccagactacgttcagattcgagaatggaagaggacaggctgcttccccgtccccatggtccactccaccttcctaattgacctcaggaaggaggcctcggacaagctgactttctaccccccacaccaggactacacctggacctttgatgacatcattgtctttgccttctccagcaggcaagcaggcatccagatgtacctctgcaacagagagcactatggctacctgcccatccccctgaagccccatcagacactgcaggaagacatcgagaacctcatccatgtgcagattgaagcaatgattgaccgtcctccaatggaaccctcccagtatgtctcagttgtccctaaatatccagacaagatgggatttgatgagattttcatgataaacctcaaacgcagaaaggacaggcgggaccggatgctgcgcacactgtatgaacaggagattgaggtcaagattgtcgaggctgtggatggaaaggcactcaacacaagccagctgaaggcactgaatattgaaatgctgcctggctatcgagatccctattcctccaggcctctaacaaggggtgaaatcggctgctttctcagccactactcagtctggaaagaggtaattgatcgagagctagagaagactcttgtaattgaagacgatgtgcgttttgagcatcagtttaagaagaagctgatgaagctgatggataacattgaccaggctcagctggactgggaactgatttatattggtaggaagaggatgcaagtaaaggagccagagaaagcagtgcccaatgtggcaaacctggtcgaagccgactattcctactggaccctgggctacgtcatctctctggaaggagcacagaagctggttggagccaatccttttgggaagatgctgccagtggatgagtttctgccagtcatgtacaacaagcatcccgtagccgagtacaaggagtattatgaatccagggacctgaaagccttctctgcagaacccttgctcatctaccctacgcactacacaggccagccggggtacctgagtgacacggagacctccaccatctgggacaatgagacagtggccaccgactgggataggacacatgcctggaagtcccggaagcaaagccgcatctacagcaatgccaagaacacagaggccctgccaccgccaacctccctggacactgtgccttcaagggatgagctatgaaggctccctgggagtgtggcccacatcagttcaacatcctctggtttttctaaagggctattcatctgtttgctccagttttctgttttgttttgttcttagtggtcacagtcatctaaccaaagtgatctagtgtgatagatcgaaattaacatatttttgaccatggaaggaaataaggaaattcaacccaaatttcccaagacggctgaaagacaggttttttggaaactgttaagataaactgtaatccagacacctaattcttcagttcactactcatgtgatactgattcccacattaaggttgaacaacatggctcagagtcttgttcaagagaaagtgatcaccgagctgtcacatcagcaaatatgtagtcaaggcagccaggccaactagaccacacttattggtctagtttgtccgttttatatgacattgaaaacttgtgtgtgcaacttttgggggacaggaatcacttaaaatcatatttatttggctttttatttaaaggattctgtcacaagtcttattgaaaagtagattttttaaaaaaaaaaaatcttagtccctgttatccagtaggggtgggtatttgggtccgactgagacttggcctgtgaccatcatggcagttggagttctcatatagaggtgaccagtttgccatgtggatataatttagtagatatttgacagtttgtgtaggtatttgagggaaaaaactcaatgtttggcttttttattatggccactcgagtcaggatgctctatttataaagataaatgtaatatataaagggtgaggactggctgtgcatcctgccctgtcccgggtttgcgcgctgctacagagcttcacgctctccgctccaccccttagcctgggaacccaccgcaggtgtgagttctgtgagtcactgctaagagacagagcacattttcaggccagcaactatccttgccagagttttttcattatattttgaattatttattttacaaaatgggcgaagatattgtctttaggataaggcagagaaacagatgttgcagacttccacggcacccgggggagtggtgggtgtggacacattggttcggcaatctgattctcctgaatttcccagccaggctcttgtggggaggcctgtggatggggggatttgaactatttggaaacaaatgattctctatctcaggtgagaaacctggtcagaaacaaagggctggtcacctgatttaggccagcaaccagggaagctcttagaatcccaggcggacaccctttctcaaaagatatcccctaagagtcctttctgctttcttcacagattgattttatgtaaaatgcagagttggactacacgatttcttcccactccacaatctgtcatcctagtatagatcatggtggtttccctcaagtttatgttctcatgccctcaatctgtaaatttttgtctccagaaaaaccctcccaggcatcccataccagcaccgttcctcatcactgtccatgcaccatgcagccatatggggggccgtgcacaccccaaaccctgagcttcacacttaaactcatggggagggcccttcagagcagagtccacaggcgggtggtgctacatacacaagcttagtgtacgagtgtaagatacactttaagccagacacctaattcttcagttcactgcccatgtgatactgattgccacattaaggttgaacagcatggctcagagtctagagaaagtgatcaccaagctgtctcatcaccaaataggtagtcaaggcagcctcatctccccaggtgaggggcgggtccccactttaggacaagaggcagcttgccttccaccagacgccagcctcggccttccttcccgactcactgtgggtacccttctacactgaccagcaagctaggccgctggaggaaagggaactcacccaactctaaattgtgccgcttagacttagctgtcagtgtgacttcctttcccacccacccccagaaaaacagaaagagcatctggggagcgagtgaaaattccttaggtgattcctaagatttccttgggtatctggtttttgttttcatatttgagtgtgtgcatgtgtgcatgactttaatgacttttttaatggggtgggaggtggctggggtgctggggttgaaggaagtttgggttgatttttgtggtgttttgtttaatagagaattttttttttcctgttcccctgtcagctggtctgacagatttaagaactctcattcttaaaagactttggacttaaattctagcattttagactaggactgttctactgtgaagaaagttctgtctcctttagcccggtttgtttctccctgctcaggtctagaatcccaagcagtgttcttttctggtgaacactgtgagccgcagatgtgactttttttttaaagtcatctcttcagcaatccagaggttccttgacctcattatttgtcctatctctcccttatagtcctaagccaagacatttgacctttgacatttgacctttgcagtgtcatgtgagggcgtcagtatagaggcctttgcatctgggcctggcacccgctctctgcctctggaggctaaaccctgtctggatttctcttgggatctaacgtgggatcttctggacagacaaccgtgacatcagcagtgctggtgctgctgtgtgtggactgaacacctgcactttgcagaggacacgctgcatgggccccgcttgcggttcattcaggcctgctgcaggagctctgagaacaagaaagagtggacacccgttcccctgcatcatctgtcttgcgtgctatttcagagtggggaagtgataaactatttgccttctggagctctttgtgaaaaattaaaaaaaaacttagctc

SEQ ID NO: 121414 - DNA, 2325 bp, Homo sapiens
  Payload ID: 3801
  Gene Symbol: COLGALT2
  Gene Name: collagen beta(1-O)galactosyltransferase 2
  ENST ID: ENST00000367520
  CDS Start-End: 438-1529
ttttcgtttttttgttctatgtatgcctagatttagctttaataatctgtcagcgttacagaattttcctgtttgctttcatatcaaatgtggatttcattcctcattttcttgttatttcctgtaggtggattacagtgttccattctgctctccagaatgggaattccttgcctcccttttgatcctttcatgccttttttgttcattccaggccatgagtttgctttttcttcagagggaaaaaatcaatttcctctgggctgaagaatagccgagtgtttttattagtccccaatgctgtgttttacttttttaataaaggagcattttttaggtctatagacatacctgaaacaaccacttatttaattgcagtgtcaaactcagcatcagacacagttcaggttccttctcctcgcttgtcactcagcagtatgttttctgattgttggctttgtccctctcttggatcctcaggcatccagatgtacctctgcaacagagagcactatggctacctgcccatccccctgaagccccatcagacactgcaggaagacatcgagaacctcatccatgtgcagattgaagcaatgattgaccgtcctccaatggaaccctcccagtatgtctcagttgtccctaaatatccagacaagatgggatttgatgagattttcatgataaacctcaaacgcagaaaggacaggcgggaccggatgctgcgcacactgtatgaacaggagattgaggtcaagattgtcgaggctgtggatggaaaggcactcaacacaagccagctgaaggcactgaatattgaaatgctgcctggctatcgagatccctattcctccaggcctctaacaaggggtgaaatcggctgctttctcagccactactcagtctggaaagaggtaattgatcgagagctagagaagactcttgtaattgaagacgatgtgcgttttgagcatcagtttaagaagaagctgatgaagctgatggataacattgaccaggctcagctggactgggaactgatttatattggtaggaagaggatgcaagtaaaggagccagagaaagcagtgcccaatgtggcaaacctggtcgaagccgactattcctactggaccctgggctacgtcatctctctggaaggagcacagaagctggttggagccaatccttttgggaagatgctgccagtggatgagtttctgccagtcatgtacaacaagcatcccgtagccgagtacaaggagtattatgaatccagggacctgaaagccttctctgcagaacccttgctcatctaccctacgcactacacaggccagccggggtacctgagtgacacggagacctccaccatctgggacaatgagacagtggccaccgactgggataggacacatgcctggaagtcccggaagcaaagccgcatctacagcaatgccaagaacacagaggccctgccaccgccaacctccctggacactgtgccttcaagggatgagctatgaaggctccctgggagtgtggcccacatcagttcaacatcctctggtttttctaaagggctattcatctgtttgctccagttttctgttttgttttgttcttagtggtcacagtcatctaaccaaagtgatctagtgtgatagatcgaaattaacatatttttgaccatggaaggaaataaggaaattcaacccaaatttcccaagacggctgaaagacaggttttttggaaactgttaagataaactgtaatccagacacctaattcttcagttcactactcatgtgatactgattcccacattaaggttgaacaacatggctcagagtcttgttcaagagaaagtgatcaccgagctgtcacatcagcaaatatgtagtcaaggcagccaggccaactagaccacacttattggtctagtttgtccgttttatatgacattgaaaacttgtgtgtgcaacttttgggggacaggaatcacttaaaatcatatttatttggctttttatttaaaggattctgtcacaagtcttattgaaaagtagattttttaaaaaaaaaaaatcttagtccctgttatccagtaggggtgggtatttgggtccgactgagacttggcctgtgaccatcatggcagttggagttctcatatagaggtgaccagtttgccatgtggatataatttagtagatatttgacagtttgtgtaggtatttgagggaaaaaactcaatgtttggcttttttattatggccactcgagtcaggatgctctatttataaagataaatgtaatat

SEQ ID NO: 121415 - DNA, 4723 bp, Homo sapiens
  Payload ID: 3801
  Gene Symbol: COLGALT2
  Gene Name: collagen beta(1-O)galactosyltransferase 2
  ENST ID: ENST00000367521
  CDS Start-End: 1095-1799
ttttctattcttttactttcaacctatttttgtcttttaatctaaaggctgcctcttatagataccacatggttgtattaatttttaaaacttactatgccaaattcttccttcattgcagtgttttattcatttgccttcactacatttttttccagatccttaaggtcagccagaggtgagagactagggacttctcaagtttttcctgggcgtgtggacagccctgaatatgcctggggccttctagattctcagggatattttggagcaaatcaaactccctatggacctcttattccttggtttttccttttaagttttttggtgggcttcttgttagcatcagctgataatgcttctcaaacagctgtaatgttaaacagttgttgctcatgggttttgacaaatgacctgcagatagtgctgttcacagaaaatgaactctgagtcaggtcaaatcaagacaagctctgagaatgtagcttttcaaggagctactagacaggttgaatagagattattttctgggggcaggtctttaagggagtctcagtccattttgtccctgccagtggcttctgggttggtggggtttgccgctctcttagttgtgaggctactggttttcaaggcttttgtagggctggggtgaacaggttaggattagggcagctgtgaacttcacaaagctcactgtgttaacagagattcagcagtaggtcttgatcaaacactccttggattattgcagtactttaactaatttccataggagtgtacttattaaatcttgtcaaaaaactgatgatgcttagaactatgttgggcactatgagggatacacaaaaatatgataccctcttgtcttcccagacctcataatactagtgtgacacattagcctggaggaacttctaaggaataaagggaagcctctctgtctttgtctgtgtgggggaggggtgtttgcagaactaactctctctttctctggcctttgtggtggggacctttgacttgttaatctccagacgtgttttatgtgatgcagggcactcaacacaagccagctgaaggcactgaatattgaaatgctgcctggctatcgagatccctattcctccaggcctctaacaaggggtgaaatcggctgctttctcagccactactcagtctggaaagaggtaattgatcgagagctagagaagactcttgtaattgaagacgatgtgcgttttgagcatcagtttaagaagaagctgatgaagctgatggataacattgaccaggctcagctggactgggaactgatttatattggtaggaagaggatgcaagtaaaggagccagagaaagcagtgcccaatgtggcaaacctggtcgaagccgactattcctactggaccctgggctacgtcatctctctggaaggagcacagaagctggttggagccaatccttttgggaagatgctgccagtggatgagtttctgccagtcatgtacaacaagcatcccgtagccgagtacaaggagtattatgaatccagggacctgaaagccttctctgcagaacccttgctcatctaccctacgcactacacaggccagccggggtacctgagtgacacggagacctccaccatctgggacaatgagacagtggccaccgactgggataggacacatgcctggaagtcccggaagcaaagccgcatctacagcaatgccaagaacacagaggccctgccaccgccaacctccctggacactgtgccttcaagggatgagctatgaaggctccctgggagtgtggcccacatcagttcaacatcctctggtttttctaaagggctattcatctgtttgctccagttttctgttttgttttgttcttagtggtcacagtcatctaaccaaagtgatctagtgtgatagatcgaaattaacatatttttgaccatggaaggaaataaggaaattcaacccaaatttcccaagacggctgaaagacaggttttttggaaactgttaagataaactgtaatccagacacctaattcttcagttcactactcatgtgatactgattcccacattaaggttgaacaacatggctcagagtcttgttcaagagaaagtgatcaccgagctgtcacatcagcaaatatgtagtcaaggcagccaggccaactagaccacacttattggtctagtttgtccgttttatatgacattgaaaacttgtgtgtgcaacttttgggggacaggaatcacttaaaatcatatttatttggctttttatttaaaggattctgtcacaagtcttattgaaaagtagattttttaaaaaaaaaaaatcttagtccctgttatccagtaggggtgggtatttgggtccgactgagacttggcctgtgaccatcatggcagttggagttctcatatagaggtgaccagtttgccatgtggatataatttagtagatatttgacagtttgtgtaggtatttgagggaaaaaactcaatgtttggcttttttattatggccactcgagtcaggatgctctatttataaagataaatgtaatatataaagggtgaggactggctgtgcatcctgccctgtcccgggtttgcgcgctgctacagagcttcacgctctccgctccaccccttagcctgggaacccaccgcaggtgtgagttctgtgagtcactgctaagagacagagcacattttcaggccagcaactatccttgccagagttttttcattatattttgaattatttattttacaaaatgggcgaagatattgtctttaggataaggcagagaaacagatgttgcagacttccacggcacccgggggagtggtgggtgtggacacattggttcggcaatctgattctcctgaatttcccagccaggctcttgtggggaggcctgtggatggggggatttgaactatttggaaacaaatgattctctatctcaggtgagaaacctggtcagaaacaaagggctggtcacctgatttaggccagcaaccagggaagctcttagaatcccaggcggacaccctttctcaaaagatatcccctaagagtcctttctgctttcttcacagattgattttatgtaaaatgcagagttggactacacgatttcttcccactccacaatctgtcatcctagtatagatcatggtggtttccctcaagtttatgttctcatgccctcaatctgtaaatttttgtctccagaaaaaccctcccaggcatcccataccagcaccgttcctcatcactgtccatgcaccatgcagccatatggggggccgtgcacaccccaaaccctgagcttcacacttaaactcatggggagggcccttcagagcagagtccacaggcgggtggtgctacatacacaagcttagtgtacgagtgtaagatacactttaagccagacacctaattcttcagttcactgcccatgtgatactgattgccacattaaggttgaacagcatggctcagagtctagagaaagtgatcaccaagctgtctcatcaccaaataggtagtcaaggcagcctcatctccccaggtgaggggcgggtccccactttaggacaagaggcagcttgccttccaccagacgccagcctcggccttccttcccgactcactgtgggtacccttctacactgaccagcaagctaggccgctggaggaaagggaactcacccaactctaaattgtgccgcttagacttagctgtcagtgtgacttcctttcccacccacccccagaaaaacagaaagagcatctggggagcgagtgaaaattccttaggtgattcctaagatttccttgggtatctggtttttgttttcatatttgagtgtgtgcatgtgtgcatgactttaatgacttttttaatggggtgggaggtggctggggtgctggggttgaaggaagtttgggttgatttttgtggtgttttgtttaatagagaattttttttttcctgttcccctgtcagctggtctgacagatttaagaactctcattcttaaaagactttggacttaaattctagcattttagactaggactgttctactgtgaagaaagttctgtctcctttagcccggtttgtttctccctgctcaggtctagaatcccaagcagtgttcttttctggtgaacactgtgagccgcagatgtgactttttttttaaagtcatctcttcagcaatccagaggttccttgacctcattatttgtcctatctctcccttatagtcctaagccaagacatttgacctttgacatttgacctttgcagtgtcatgtgagggcgtcagtatagaggcctttgcatctgggcctggcacccgctctctgcctctggaggctaaaccctgtctggatttctcttgggatctaacgtgggatcttctggacagacaaccgtgacatcagcagtgctggtgctgctgtgtgtggactgaacacctgcactttgcagaggacacgctgcatgggccccgcttgcggttcattcaggcctgctgcaggagctctgagaacaagaaagagtggacacccgttcccctgcatcatctgtcttgcgtgctatttcagagtggggaagtgataaactatttgccttctggagctctttgtgaaaaattaaaaaaaaacttagctc

SEQ ID NO: 121416 - DNA, 1271 bp, Homo sapiens
  Payload ID: 3802
  Gene Symbol: CTHRC1
  Gene Name: collagen triple helix repeat containing 1
  Uniprot ID: Q96CG8
  ENST ID: ENST00000330295
  CDS Start-End: 143-874
gggagggagagaggcgcgcgggtgaaaggcgcattgatgcagcctgcggcggcctcggagcgcggcggagccagacgctgaccacgttcctctcctcggtctcctccgcctccagctccgcgctgcccggcagccgggagccatgcgaccccagggccccgccgcctccccgcagcggctccgcggcctcctgctgctcctgctgctgcagctgcccgcgccgtcgagcgcctctgagatccccaaggggaagcaaaaggcgcagctccggcagagggaggtggtggacctgtataatggaatgtgcttacaagggccagcaggagtgcctggtcgagacgggagccctggggccaatggcattccgggtacacctgggatcccaggtcgggatggattcaaaggagaaaagggggaatgtctgagggaaagctttgaggagtcctggacacccaactacaagcagtgttcatggagttcattgaattatggcatagatcttgggaaaattgcggagtgtacatttacaaagatgcgttcaaatagtgctctaagagttttgttcagtggctcacttcggctaaaatgcagaaatgcatgctgtcagcgttggtatttcacattcaatggagctgaatgttcaggacctcttcccattgaagctataatttatttggaccaaggaagccctgaaatgaattcaacaattaatattcatcgcacttcttctgtggaaggactttgtgaaggaattggtgctggattagtggatgttgctatctgggttggtacttgttcagattacccaaaaggagatgcttctactggatggaattcagtttctcgcatcattattgaagaactaccaaaataaatgctttaattttcatttgctacctctttttttattatgccttggaatggttcacttaaatgacattttaaataagtttatgtatacatctgaatgaaaagcaaagctaaatatgtttacagaccaaagtgtgatttcacactgtttttaaatctagcattattcattttgcttcaatcaaaagtggtttcaatattttttttagttggttagaatactttcttcatagtcacattctctcaacctataatttggaatattgttgtggtcttttgttttttctcttagtatagcatttttaaaaaaatataaaagctaccaatctttgtacaatttgtaaatgttaagaattttttttatatctgttaaataaaaattatttccaacaaccttaata

SEQ ID NO: 121417 - DNA, 571 bp, Homo sapiens
  Payload ID: 3802
  Gene Symbol: CTHRC1
  Gene Name: collagen triple helix repeat containing 1
  ENST ID: ENST00000415886
  CDS Start-End: 108-551
gatgcagcctgcggcggcctcggagcgcggcggagccagacgctgaccacgttcctctcctcggtctcctccgcctccagctccgcgctgcccggcagccgggagccatgcgaccccagggccccgccgcctccccgcagcggctccgcggcctcctgctgctcctgctgctgcagctgcccgcgccgtcgagcgcctctgagatccccaaggggaagcaaaaggcgcagctccggcagagggaggtggtggacctgtataatggaatgtgcttacaagggccagcaggagtgcctggtcgagacgggagccctggggccaatggcattccgggtacacctgggatcccaggtcgggatggattcaaaggagaaaagggggaatgtctgagggaaagctttgaggagtcctggacacccaactacaagcagtgttcatggagttcattgaattatggcatagatcttgggaaaattgcggtaagtttgaattattttaaaattgaagcaagatttaagggttttcatattttagtgttaatttttaggtgacattttatttttttttaact

SEQ ID NO: 121418 - DNA, 560 bp, Homo sapiens
  Payload ID: 3802
  Gene Symbol: CTHRC1
  Gene Name: collagen triple helix repeat containing 1
  ENST ID: ENST00000520880
  CDS Start-End: 205-546
tttgcatagaccaatgagaaaataagcaaacaagaaacctgggccttatcattgcatcatatagataaagactaaaaaccctgcctatcctttactccctcatactgtttgctgttgctcgaaaagaaacacgtcaagagtcaatacgaatggacagaactagtctagaatgtaagttccatgaaggagtgtacatttacaaagatgcgttcaaatagtgctctaagagttttgttcagtggctcacttcggctaaaatgcagaaatgcatgctgtcagcgttggtatttcacattcaatggagctgaatgttcaggacctcttcccattgaagctataatttatttggaccaaggaagccctgaaatgaattcaacaattaatattcatcgcacttcttctgtggaaggactttgtgaaggaattggtgctggattagtggatgttgctatctgggttggtacttgttcagattacccaaaaggagatgcttctactggatggaattcagtttctcgcatcattattgaagaactaccaaaataaatgctttaattttc

SEQ ID NO: 121419 - DNA, 1198 bp, Homo sapiens
  Payload ID: 3802
  Gene Symbol: CTHRC1
  Gene Name: collagen triple helix repeat containing 1
  Uniprot ID: Q96CG8
  ENST ID: ENST00000520337
  CDS Start-End: 120-809
agaaggtttaaggccggaaagggaaatgaaggggcccggcgctaaccctctaaggacctgttttgcttctgtttaaaccaaatgggcagtctgtcattacacacaccctgggtcttcatatgtggccgccaggtaggagcatcacagtcaagctacgggagaaaacagtttccaggaaactggaaatgaacggcccgagtgctttccaggggctcatctgtgggaagtataatggaatgtgcttacaagggccagcaggagtgcctggtcgagacgggagccctggggccaatggcattccgggtacacctgggatcccaggtcgggatggattcaaaggagaaaagggggaatgtctgagggaaagctttgaggagtcctggacacccaactacaagcagtgttcatggagttcattgaattatggcatagatcttgggaaaattgcggagtgtacatttacaaagatgcgttcaaatagtgctctaagagttttgttcagtggctcacttcggctaaaatgcagaaatgcatgctgtcagcgttggtatttcacattcaatggagctgaatgttcaggacctcttcccattgaagctataatttatttggaccaaggaagccctgaaatgaattcaacaattaatattcatcgcacttcttctgtggaaggactttgtgaaggaattggtgctggattagtggatgttgctatctgggttggtacttgttcagattacccaaaaggagatgcttctactggatggaattcagtttctcgcatcattattgaagaactaccaaaataaatgctttaattttcatttgctacctctttttttattatgccttggaatggttcacttaaatgacattttaaataagtttatgtatacatctgaatgaaaagcaaagctaaatatgtttacagaccaaagtgtgatttcacactgtttttaaatctagcattattcattttgcttcaatcaaaagtggtttcaatattttttttagttggttagaatactttcttcatagtcacattctctcaacctataatttggaatattgttgtggtcttttgttttttctcttagtatagcatttttaaaaaaatataaaagctaccaatctttgtacaatttgtaaatgttaagaattttttttatatctgttaaataaaaattatttccaacaa

SEQ ID NO: 121420 - DNA, 6727 bp, Homo sapiens
  Payload ID: 3803
  Gene Symbol: COL1A1
  Gene Name: collagen, type I, alpha 1
  Uniprot ID: P02452
  ENST ID: ENST00000225964
  CDS Start-End: 120-4514
agcagacgggagtttctcctcggggtcggagcaggaggcacgcggagtgtgaggccacgcatgagcggacgctaaccccctccccagccacaaagagtctacatgtctagggtctagacatgttcagctttgtggacctccggctcctgctcctcttagcggccaccgccctcctgacgcacggccaagaggaaggccaagtcgagggccaagacgaagacatcccaccaatcacctgcgtacagaacggcctcaggtaccatgaccgagacgtgtggaaacccgagccctgccggatctgcgtctgcgacaacggcaaggtgttgtgcgatgacgtgatctgtgacgagaccaagaactgccccggcgccgaagtccccgagggcgagtgctgtcccgtctgccccgacggctcagagtcacccaccgaccaagaaaccaccggcgtcgagggacccaagggagacactggcccccgaggcccaaggggacccgcaggcccccctggccgagatggcatccctggacagcctggacttcccggaccccccggaccccccggacctcccggaccccctggcctcggaggaaactttgctccccagctgtcttatggctatgatgagaaatcaaccggaggaatttccgtgcctggccccatgggtccctctggtcctcgtggtctccctggcccccctggtgcacctggtccccaaggcttccaaggtccccctggtgagcctggcgagcctggagcttcaggtcccatgggtccccgaggtcccccaggtccccctggaaagaatggagatgatggggaagctggaaaacctggtcgtcctggtgagcgtgggcctcctgggcctcagggtgctcgaggattgcccggaacagctggcctccctggaatgaagggacacagaggtttcagtggtttggatggtgccaagggagatgctggtcctgctggtcctaagggtgagcctggcagccctggtgaaaatggagctcctggtcagatgggcccccgtggcctgcctggtgagagaggtcgccctggagcccctggccctgctggtgctcgtggaaatgatggtgctactggtgctgccgggccccctggtcccaccggccccgctggtcctcctggcttccctggtgctgttggtgctaagggtgaagctggtccccaagggccccgaggctctgaaggtccccagggtgtgcgtggtgagcctggcccccctggccctgctggtgctgctggccctgctggaaaccctggtgctgatggacagcctggtgctaaaggtgccaatggtgctcctggtattgctggtgctcctggcttccctggtgcccgaggcccctctggaccccagggccccggcggccctcctggtcccaagggtaacagcggtgaacctggtgctcctggcagcaaaggagacactggtgctaagggagagcctggccctgttggtgttcaaggaccccctggccctgctggagaggaaggaaagcgaggagctcgaggtgaacccggacccactggcctgcccggaccccctggcgagcgtggtggacctggtagccgtggtttccctggcgcagatggtgttgctggtcccaagggtcccgctggtgaacgtggttctcctggccctgctggccccaaaggatctcctggtgaagctggtcgtcccggtgaagctggtctgcctggtgccaagggtctgactggaagccctggcagccctggtcctgatggcaaaactggcccccctggtcccgccggtcaagatggtcgccccggacccccaggcccacctggtgcccgtggtcaggctggtgtgatgggattccctggacctaaaggtgctgctggagagcccggcaaggctggagagcgaggtgttcccggaccccctggcgctgtcggtcctgctggcaaagatggagaggctggagctcagggaccccctggccctgctggtcccgctggcgagagaggtgaacaaggccctgctggctcccccggattccagggtctccctggtcctgctggtcctccaggtgaagcaggcaaacctggtgaacagggtgttcctggagaccttggcgcccctggcccctctggagcaagaggcgagagaggtttccctggcgagcgtggtgtgcaaggtccccctggtcctgctggtccccgaggggccaacggtgctcccggcaacgatggtgctaagggtgatgctggtgcccctggagctcccggtagccagggcgcccctggccttcagggaatgcctggtgaacgtggtgcagctggtcttccagggcctaagggtgacagaggtgatgctggtcccaaaggtgctgatggctctcctggcaaagatggcgtccgtggtctgactggccccattggtcctcctggccctgctggtgcccctggtgacaagggtgaaagtggtcccagcggccctgctggtcccactggagctcgtggtgcccccggagaccgtggtgagcctggtccccccggccctgctggctttgctggcccccctggtgctgacggccaacctggtgctaaaggcgaacctggtgatgctggtgctaaaggcgatgctggtccccctggccctgccggacccgctggaccccctggccccattggtaatgttggtgctcctggagccaaaggtgctcgcggcagcgctggtccccctggtgctactggtttccctggtgctgctggccgagtcggtcctcctggcccctctggaaatgctggaccccctggccctcctggtcctgctggcaaagaaggcggcaaaggtccccgtggtgagactggccctgctggacgtcctggtgaagttggtccccctggtccccctggccctgctggcgagaaaggatcccctggtgctgatggtcctgctggtgctcctggtactcccgggcctcaaggtattgctggacagcgtggtgtggtcggcctgcctggtcagagaggagagagaggcttccctggtcttcctggcccctctggtgaacctggcaaacaaggtccctctggagcaagtggtgaacgtggtccccctggtcccatgggcccccctggattggctggaccccctggtgaatctggacgtgagggggctcctggtgccgaaggttcccctggacgagacggttctcctggcgccaagggtgaccgtggtgagaccggccccgctggaccccctggtgctcctggtgctcctggtgcccctggccccgttggccctgctggcaagagtggtgatcgtggtgagactggtcctgctggtcccgccggtcctgtcggccctgttggcgcccgtggccccgccggaccccaaggcccccgtggtgacaagggtgagacaggcgaacagggcgacagaggcataaagggtcaccgtggcttctctggcctccagggtccccctggccctcctggctctcctggtgaacaaggtccctctggagcctctggtcctgctggtccccgaggtccccctggctctgctggtgctcctggcaaagatggactcaacggtctccctggccccattgggccccctggtcctcgcggtcgcactggtgatgctggtcctgttggtccccccggccctcctggacctcctggtccccctggtcctcccagcgctggtttcgacttcagcttcctgccccagccacctcaagagaaggctcacgatggtggccgctactaccgggctgatgatgccaatgtggttcgtgaccgtgacctcgaggtggacaccaccctcaagagcctgagccagcagatcgagaacatccggagcccagagggcagccgcaagaaccccgcccgcacctgccgtgacctcaagatgtgccactctgactggaagagtggagagtactggattgaccccaaccaaggctgcaacctggatgccatcaaagtcttctgcaacatggagactggtgagacctgcgtgtaccccactcagcccagtgtggcccagaagaactggtacatcagcaagaaccccaaggacaagaggcatgtctggttcggcgagagcatgaccgatggattccagttcgagtatggcggccagggctccgaccctgccgatgtggccatccagctgaccttcctgcgcctgatgtccaccgaggcctcccagaacatcacctaccactgcaagaacagcgtggcctacatggaccagcagactggcaacctcaagaaggccctgctcctccagggctccaacgagatcgagatccgcgccgagggcaacagccgcttcacctacagcgtcactgtcgatggctgcacgagtcacaccggagcctggggcaagacagtgattgaatacaaaaccaccaagacctcccgcctgcccatcatcgatgtggcccccttggacgttggtgccccagaccaggaattcggcttcgacgttggccctgtctgcttcctgtaaactccctccatcccaacctggctccctcccacccaaccaactttccccccaacccggaaacagacaagcaacccaaactgaaccccctcaaaagccaaaaaatgggagacaatttcacatggactttggaaaatatttttttcctttgcattcatctctcaaacttagtttttatctttgaccaaccgaacatgaccaaaaaccaaaagtgcattcaaccttaccaaaaaaaaaaaaaaaaaaagaataaataaataactttttaaaaaaggaagcttggtccacttgcttgaagacccatgcgggggtaagtccctttctgcccgttgggcttatgaaaccccaatgctgccctttctgctcctttctccacaccccccttggggcctcccctccactccttcccaaatctgtctccccagaagacacaggaaacaatgtattgtctgcccagcaatcaaaggcaatgctcaaacacccaagtggcccccaccctcagcccgctcctgcccgcccagcacccccaggccctgggggacctggggttctcagactgccaaagaagccttgccatctggcgctcccatggctcttgcaacatctccccttcgtttttgagggggtcatgccgggggagccaccagcccctcactgggttcggaggagagtcaggaagggccacgacaaagcagaaacatcggatttggggaacgcgtgtcaatcccttgtgccgcagggctgggcgggagagactgttctgttccttgtgtaactgtgttgctgaaagactacctcgttcttgtcttgatgtgtcaccggggcaactgcctgggggcggggatgggggcagggtggaagcggctccccattttataccaaaggtgctacatctatgtgatgggtggggtggggagggaatcactggtgctatagaaattgagatgcccccccaggccagcaaatgttcctttttgttcaaagtctatttttattccttgatatttttctttttttttttttttttttgtggatggggacttgtgaatttttctaaaggtgctatttaacatgggaggagagcgtgtgcggctccagcccagcccgctgctcactttccaccctctctccacctgcctctggcttctcaggcctctgctctccgacctctctcctctgaaaccctcctccacagctgcagcccatcctcccggctccctcctagtctgtcctgcgtcctctgtccccgggtttcagagacaacttcccaaagcacaaagcagtttttccccctaggggtgggaggaagcaaaagactctgtacctattttgtatgtgtataataatttgagatgtttttaattattttgattgctggaataaagcatgtggaaatgacccaaacataatccgcagtggcctcctaatttccttctttggagttgggggaggggtagacatggggaaggggctttggggtgatgggcttgccttccattcctgccctttccctccccactattctcttctagatccctccataaccccactcccctttctctcacccttcttataccgcaaacctttctacttcctctttcattttctattcttgcaatttccttgcaccttttccaaatcctcttctcccctgcaataccatacaggcaatccacgtgcacaacacacacacacactcttcacatctggggttgtccaaacctcatacccactccccttcaagcccatccactctccaccccctggatgccctgcacttggtggcggtgggatgctcatggatactgggagggtgaggggagtggaacccgtgaggaggacctgggggcctctccttgaactgacatgaagggtcatctggcctctgctcccttctcacccacgctgacctcctgccgaaggagcaacgcaacaggagaggggtctgctgagcctggcgagggtctgggagggaccaggaggaaggcgtgctccctgctcgctgtcctggccctgggggagtgagggagacagacacctgggagagctgtggggaaggcactcgcaccgtgctcttgggaaggaaggagacctggccctgctcaccacggactgggtgcctcgacctcctgaatccccagaacacaacccccctgggctggggtggtctggggaaccatcgtgcccccgcctcccgcctactcctttttaagctt

SEQ ID NO: 121421 - DNA, 549 bp, Homo sapiens
  Payload ID: 3803
  Gene Symbol: COL1A1
  Gene Name: collagen, type I, alpha 1
  ENST ID: ENST00000507689
  CDS Start-End: 88-549
gcggactaaagctttgtttaaattcctgagaactggaaagagttacagcctccctggccaggcgcctcggcgctgtcacccgcgctgatgaggagcaggcgagcttttaaggatttgaggaaagaagaacggggggaggggcgggaagtgaaaaatccaagtgtgcctcttagacccgggggaaaggtggttaagctgggggttgcagtcactactgacaacgcccctcttccgcctgtcccagtcccaccaatcacctgcgtacagaacggcctcaggtaccatgaccgagacgtgtggaaacccgagccctgccggatctgcgtctgcgacaacggcaaggtgttgtgcgatgacgtgatctgtgacgagaccaagaactgccccggcgccgaagtccccgagggcgagtgctgtcccgtctgccccgacggctcagagtcacccaccgaccaagaaaccaccggcgtcgagggacccaagggagacactggcccccgaggcccaaggggacccgcaggcccccctggccgagatggcatccctgga

SEQ ID NO: 121422 - DNA, 5411 bp, Homo sapiens
  Payload ID: 3804
  Gene Symbol: COL1A2
  Gene Name: collagen, type I, alpha 2
  Uniprot ID: P08123
  ENST ID: ENST00000297268
  CDS Start-End: 472-4572
gtgtcccatagtgtttccaaacttggaaagggcgggggagggcgggaggatgcggagggcggaggtatgcagacaacgagtcagagtttccccttgaaagcctcaaaagtgtccacgtcctcaaaaagaatggaaccaatttaagaagccagccccgtggccacgtcccttcccccattcgctccctcctctgcgcccccgcaggctcctcccagctgtggctgcccgggcccccagccccagccctcccattggtggaggcccttttggaggcaccctagggccagggaaacttttgccgtataaatagggcagatccgggctttattattttagcaccacggcagcaggaggtttcggctaagttggaggtactggccacgactgcatgcccgcgcccgccaggtgatacctccgccggtgacccaggggctctgcgacacaaggagtctgcatgtctaagtgctagacatgctcagctttgtggatacgcggactttgttgctgcttgcagtaaccttatgcctagcaacatgccaatctttacaagaggaaactgtaagaaagggcccagccggagatagaggaccacgtggagaaaggggtccaccaggccccccaggcagagatggtgaagatggtcccacaggccctcctggtccacctggtcctcctggcccccctggtctcggtgggaactttgctgctcagtatgatggaaaaggagttggacttggccctggaccaatgggcttaatgggacctagaggcccacctggtgcagctggagccccaggccctcaaggtttccaaggacctgctggtgagcctggtgaacctggtcaaactggtcctgcaggtgctcgtggtccagctggccctcctggcaaggctggtgaagatggtcaccctggaaaacccggacgacctggtgagagaggagttgttggaccacagggtgctcgtggtttccctggaactcctggacttcctggcttcaaaggcattaggggacacaatggtctggatggattgaagggacagcccggtgctcctggtgtgaagggtgaacctggtgcccctggtgaaaatggaactccaggtcaaacaggagcccgtgggcttcctggtgagagaggacgtgttggtgcccctggcccagctggtgcccgtggcagtgatggaagtgtgggtcccgtgggtcctgctggtcccattgggtctgctggccctccaggcttcccaggtgcccctggccccaagggtgaaattggagctgttggtaacgctggtcctgctggtcccgccggtccccgtggtgaagtgggtcttccaggcctctccggccccgttggacctcctggtaatcctggagcaaacggccttactggtgccaagggtgctgctggccttcccggcgttgctggggctcccggcctccctggaccccgcggtattcctggccctgttggtgctgccggtgctactggtgccagaggacttgttggtgagcctggtccagctggctccaaaggagagagcggtaacaagggtgagcccggctctgctgggccccaaggtcctcctggtcccagtggtgaagaaggaaagagaggccctaatggggaagctggatctgccggccctccaggacctcctgggctgagaggtagtcctggttctcgtggtcttcctggagctgatggcagagctggcgtcatgggccctcctggtagtcgtggtgcaagtggccctgctggagtccgaggacctaatggagatgctggtcgccctggggagcctggtctcatgggacccagaggtcttcctggttcccctggaaatatcggccccgctggaaaagaaggtcctgtcggcctccctggcatcgacggcaggcctggcccaattggcccagctggagcaagaggagagcctggcaacattggattccctggacccaaaggccccactggtgatcctggcaaaaacggtgataaaggtcatgctggtcttgctggtgctcggggtgctccaggtcctgatggaaacaatggtgctcagggacctcctggaccacagggtgttcaaggtggaaaaggtgaacagggtccccctggtcctccaggcttccagggtctgcctggcccctcaggtcccgctggtgaagttggcaaaccaggagaaaggggtctccatggtgagtttggtctccctggtcctgctggtccaagaggggaacgcggtcccccaggtgagagtggtgctgccggtcctactggtcctattggaagccgaggtccttctggacccccagggcctgatggaaacaagggtgaacctggtgtggttggtgctgtgggcactgctggtccatctggtcctagtggactcccaggagagaggggtgctgctggcatacctggaggcaagggagaaaagggtgaacctggtctcagaggtgaaattggtaaccctggcagagatggtgctcgtggtgctcctggtgctgtaggtgcccctggtcctgctggagccacaggtgaccggggcgaagctggggctgctggtcctgctggtcctgctggtcctcggggaagccctggtgaacgtggtgaggtcggtcctgctggccccaatggatttgctggtcctgctggtgctgctggtcaacctggtgctaaaggagaaagaggagccaaagggcctaagggtgaaaacggtgttgttggtcccacaggccccgttggagctgctggcccagctggtccaaatggtccccccggtcctgctggaagtcgtggtgatggaggcccccctggtatgactggtttccctggtgctgctggacggactggtcccccaggaccctctggtatttctggccctcctggtccccctggtcctgctgggaaagaagggcttcgtggtcctcgtggtgaccaaggtccagttggccgaactggagaagtaggtgcagttggtccccctggcttcgctggtgagaagggtccctctggagaggctggtactgctggacctcctggcactccaggtcctcagggtcttcttggtgctcctggtattctgggtctccctggctcgagaggtgaacgtggtctaccaggtgttgctggtgctgtgggtgaacctggtcctcttggcattgccggccctcctggggcccgtggtcctcctggtgctgtgggtagtcctggagtcaacggtgctcctggtgaagctggtcgtgatggcaaccctgggaacgatggtcccccaggtcgcgatggtcaacccggacacaagggagagcgcggttaccctggcaatattggtcccgttggtgctgcaggtgcacctggtcctcatggccccgtgggtcctgctggcaaacatggaaaccgtggtgaaactggtccttctggtcctgttggtcctgctggtgctgttggcccaagaggtcctagtggcccacaaggcattcgtggcgataagggagagcccggtgaaaaggggcccagaggtcttcctggcttaaagggacacaatggattgcaaggtctgcctggtatcgctggtcaccatggtgatcaaggtgctcctggctccgtgggtcctgctggtcctaggggccctgctggtccttctggccctgctggaaaagatggtcgcactggacatcctggtacagttggacctgctggcattcgaggccctcagggtcaccaaggccctgctggcccccctggtccccctggccctcctggacctccaggtgtaagcggtggtggttatgactttggttacgatggagacttctacagggctgaccagcctcgctcagcaccttctctcagacccaaggactatgaagttgatgctactctgaagtctctcaacaaccagattgagacccttcttactcctgaaggctctagaaagaacccagctcgcacatgccgtgacttgagactcagccacccagagtggagcagtggttactactggattgaccctaaccaaggatgcactatggatgctatcaaagtatactgtgatttctctactggcgaaacctgtatccgggcccaacctgaaaacatcccagccaagaactggtataggagctccaaggacaagaaacacgtctggctaggagaaactatcaatgctggcagccagtttgaatataatgtagaaggagtgacttccaaggaaatggctacccaacttgccttcatgcgcctgctggccaactatgcctctcagaacatcacctaccactgcaagaacagcattgcatacatggatgaggagactggcaacctgaaaaaggctgtcattctacagggctctaatgatgttgaacttgttgctgagggcaacagcaggttcacttacactgttcttgtagatggctgctctaaaaagacaaatgaatggggaaagacaatcattgaatacaaaacaaataagccatcacgcctgcccttccttgatattgcacctttggacatcggtggtgctgaccaggaattctttgtggacattggcccagtctgtttcaaataaatgaactcaatctaaattaaaaaagaaagaaatttgaaaaaactttctctttgccatttcttcttcttcttttttaactgaaagctgaatccttccatttcttctgcacatctacttgcttaaattgtgggcaaaagagaaaaagaaggattgatcagagcattgtgcaatacagtttcattaactccttcccccgctcccccaaaaatttgaatttttttttcaacactcttacacctgttatggaaaatgtcaacctttgtaagaaaaccaaaataaaaattgaaaaataaaaaccataaacatttgcaccacttgtggcttttgaatatcttccacagagggaagtttaaaacccaaacttccaaaggtttaaactacctcaaaacactttcccatgagtgtgatccacattgttaggtgctgacctagacagagatgaactgaggtccttgttttgttttgttcataatacaaaggtgctaattaatagtatttcagatacttgaagaatgttgatggtgctagaagaatttgagaagaaatactcctgtattgagttgtatcgtgtggtgtattttttaaaaaatttgatttagcattcatattttccatcttattcccaattaaaagtatgcagattatttgcccaaatcttcttcagattcagcatttgttctttgccagtctcattttcatcttcttccatggttccacagaagctttgtttcttgggcaagcagaaaaattaaattgtacctattttgtatatgtgagatgtttaaataaattgtgaaaaaaatgaaataaagcatgtttggttttccaaaagaacatat

SEQ ID NO: 121423 - DNA, 4523 bp, Homo sapiens
  Payload ID: 3804
  Gene Symbol: COL1A2
  Gene Name: collagen, type I, alpha 2
  ENST ID: ENST00000620463
  CDS Start-End: 119-4213
gtttcggctaagttggaggtactggccacgactgcatgcccgcgcccgccaggtgatacctccgccggtgacccaggggctctgcgacacaaggagtctgcatgtctaagtgctagacatgctcagctttgtggatacgcggactttgttgctgcttgcagtaaccttatgcctagcaacatgccaatttttcgaaactgtaagaaagggcccagccggagatagaggaccacgtggagaaaggggtccaccaggccccccaggcagagatggtgaagatggtcccacaggccctcctggtccacctggtcctcctggcccccctggtctcggtgggaactttgctgctcagtatgatggaaaaggagttggacttggccctggaccaatgggcttaatgggacctagaggcccacctggtgcagctggagccccaggccctcaaggtttccaaggacctgctggtgagcctggtgaacctggtcaaactggtcctgcaggtgctcgtggtccagctggccctcctggcaaggctggtgaagatggtcaccctggaaaacccggacgacctggtgagagaggagttgttggaccacagggtgctcgtggtttccctggaactcctggacttcctggcttcaaaggcattaggggacacaatggtctggatggattgaagggacagcccggtgctcctggtgtgaagggtgaacctggtgcccctggtgaaaatggaactccaggtcaaacaggagcccgtgggcttcctggtgagagaggacgtgttggtgcccctggcccagctggtgcccgtggcagtgatggaagtgtgggtcccgtgggtcctgctggtcccattgggtctgctggccctccaggcttcccaggtgcccctggccccaagggtgaaattggagctgttggtaacgctggtcctgctggtcccgccggtccccgtggtgaagtgggtcttccaggcctctccggccccgttggacctcctggtaatcctggagcaaacggccttactggtgccaagggtgctgctggccttcccggcgttgctggggctcccggcctccctggaccccgcggtattcctggccctgttggtgctgccggtgctactggtgccagaggacttgttggtgagcctggtccagctggctccaaaggagagagcggtaacaagggtgagcccggctctgctgggccccaaggtcctcctggtcccagtggtgaagaaggaaagagaggccctaatggggaagctggatctgccggccctccaggacctcctgggctgagaggtagtcctggttctcgtggtcttcctggagctgatggcagagctggcgtcatgggccctcctggtagtcgtggtgcaagtggccctgctggagtccgaggacctaatggagatgctggtcgccctggggagcctggtctcatgggacccagaggtcttcctggttcccctggaaatatcggccccgctggaaaagaaggtcctgtcggcctccctggcatcgacggcaggcctggcccaattggcccagctggagcaagaggagagcctggcaacattggattccctggacccaaaggccccactggtgatcctggcaaaaacggtgataaaggtcatgctggtcttgctggtgctcggggtgctccaggtcctgatggaaacaatggtgctcagggacctcctggaccacagggtgttcaaggtggaaaaggtgaacagggtccccctggtcctccaggcttccagggtctgcctggcccctcaggtcccgctggtgaagttggcaaaccaggagaaaggggtctccatggtgagtttggtctccctggtcctgctggtccaagaggggaacgcggtcccccaggtgagagtggtgctgccggtcctactggtcctattggaagccgaggtccttctggacccccagggcctgatggaaacaagggtgaacctggtgtggttggtgctgtgggcactgctggtccatctggtcctagtggactcccaggagagaggggtgctgctggcatacctggaggcaagggagaaaagggtgaacctggtctcagaggtgaaattggtaaccctggcagagatggtgctcgtggtgctcctggtgctgtaggtgcccctggtcctgctggagccacaggtgaccggggcgaagctggggctgctggtcctgctggtcctgctggtcctcggggaagccctggtgaacgtggtgaggtcggtcctgctggccccaatggatttgctggtcctgctggtgctgctggtcaacctggtgctaaaggagaaagaggagccaaagggcctaagggtgaaaacggtgttgttggtcccacaggccccgttggagctgctggcccagctggtccaaatggtccccccggtcctgctggaagtcgtggtgatggaggcccccctggtatgactggtttccctggtgctgctggacggactggtcccccaggaccctctggtatttctggccctcctggtccccctggtcctgctgggaaagaagggcttcgtggtcctcgtggtgaccaaggtccagttggccgaactggagaagtaggtgcagttggtccccctggcttcgctggtgagaagggtccctctggagaggctggtactgctggacctcctggcactccaggtcctcagggtcttcttggtgctcctggtattctgggtctccctggctcgagaggtgaacgtggtctaccaggtgttgctggtgctgtgggtgaacctggtcctcttggcattgccggccctcctggggcccgtggtcctcctggtgctgtgggtagtcctggagtcaacggtgctcctggtgaagctggtcgtgatggcaaccctgggaacgatggtcccccaggtcgcgatggtcaacccggacacaagggagagcgcggttaccctggcaatattggtcccgttggtgctgcaggtgcacctggtcctcatggccccgtgggtcctgctggcaaacatggaaaccgtggtgaaactggtccttctggtcctgttggtcctgctggtgctgttggcccaagaggtcctagtggcccacaaggcattcgtggcgataagggagagcccggtgaaaaggggcccagaggtcttcctggcttaaagggacacaatggattgcaaggtctgcctggtatcgctggtcaccatggtgatcaaggtgctcctggctccgtgggtcctgctggtcctaggggccctgctggtccttctggccctgctggaaaagatggtcgcactggacatcctggtacagttggacctgctggcattcgaggccctcagggtcaccaaggccctgctggcccccctggtccccctggccctcctggacctccaggtgtaagcggtggtggttatgactttggttacgatggagacttctacagggctgaccagcctcgctcagcaccttctctcagacccaaggactatgaagttgatgctactctgaagtctctcaacaaccagattgagacccttcttactcctgaaggctctagaaagaacccagctcgcacatgccgtgacttgagactcagccacccagagtggagcagtggttactactggattgaccctaaccaaggatgcactatggatgctatcaaagtatactgtgatttctctactggcgaaacctgtatccgggcccaacctgaaaacatcccagccaagaactggtataggagctccaaggacaagaaacacgtctggctaggagaaactatcaatgctggcagccagtttgaatataatgtagaaggagtgacttccaaggaaatggctacccaacttgccttcatgcgcctgctggccaactatgcctctcagaacatcacctaccactgcaagaacagcattgcatacatggatgaggagactggcaacctgaaaaaggctgtcattctacagggctctaatgatgttgaacttgttgctgagggcaacagcaggttcacttacactgttcttgtagatggctgctctaaaaagacaaatgaatggggaaagacaatcattgaatacaaaacaaataagccatcacgcctgcccttccttgatattgcacctttggacatcggtggtgctgaccaggaattctttgtggacattggcccagtctgtttcaaataaatgaactcaatctaaattaaaaaagaaagaaatttgaaaaaactttctctttgccatttcttcttcttcttttttaactgaaagctgaatccttccatttcttctgcacatctacttgcttaaattgtgggcaaaagagaaaaagaaggattgatcagagcattgtgcaatacagtttcattaactccttcccccgctcccccaaaaatttgaatttttttttcaacactcttacacctgttatggaaaatgtcaacctttgtaagaaaaccaaaataaaaattgaaaaataaaaaccataaacatttgc

SEQ ID NO: 121424 - DNA, 4257 bp, Homo sapiens
  Payload ID: 3805
  Gene Symbol: COL2A1
  Gene Name: collagen, type II, alpha 1
  Uniprot ID: P02458
  ENST ID: ENST00000337299
  CDS Start-End: 1-4257
atgattcgcctcggggctccccagacgctggtgctgctgacgctgctcgtcgccgctgtccttcggtgtcagggccaggatgtccggcaaccaggaccaaagggacagaaaggagaacctggagacatcaaggatattgtaggacccaaaggacctcctgggcctcagggacctgcaggggaacaaggacccagaggggatcgtggtgacaaaggtgaaaaaggtgcccctggacctcgtggcagagatggagaacctgggacccctggaaatcctggcccccctggtcctcccggcccccctggtccccctggtcttggtggaaactttgctgcccagatggctggaggatttgatgaaaaggctggtggcgcccagttgggagtaatgcaaggaccaatgggccccatgggacctcgaggacctccaggccctgcaggtgctcctgggcctcaaggatttcaaggcaatcctggtgaacctggtgaacctggtgtctctggtcccatgggtccccgtggtcctcctggtccccctggaaagcctggtgatgatggtgaagctggaaaacctggaaaagctggtgaaaggggtccgcctggtcctcagggtgctcgtggtttcccaggaaccccaggccttcctggtgtcaaaggtcacagaggttatccaggcctggacggtgctaagggagaggcgggtgctcctggtgtgaagggtgagagtggttccccgggtgagaacggatctccgggcccaatgggtcctcgtggcctgcctggtgaaagaggacggactggccctgctggcgctgcgggtgcccgaggcaacgatggtcagccaggccccgcagggcctccgggtcctgtcggtcctgctggtggtcctggcttccctggtgctcctggagccaagggtgaagccggccccactggtgcccgtggtcctgaaggtgctcaaggtcctcgcggtgaacctggtactcctgggtcccctgggcctgctggtgcctccggtaaccctggaacagatggaattcctggagccaaaggatctgctggtgctcctggcattgctggtgctcctggcttccctgggccacggggccctcctggccctcaaggtgcaactggtcctctgggcccgaaaggtcagacgggtgaacctggtattgctggcttcaaaggtgaacaaggccccaagggagaacctggccctgctggcccccagggagcccctggacccgctggtgaagaaggcaagagaggtgcccgtggagagcctggtggcgttgggcccatcggtccccctggagaaagaggtgctcccggcaaccgcggtttcccaggtcaagatggtctggcaggtcccaagggagcccctggagagcgagggcccagtggtcttgctggccccaagggagccaacggtgaccctggccgtcctggagaacctggccttcctggagcccggggtctcactggccgccctggtgatgctggtcctcaaggcaaagttggcccttctggagcccctggtgaagatggtcgtcctggacctccaggtcctcagggggctcgtgggcagcctggtgtcatgggtttccctggccccaaaggtgccaacggtgagcctggcaaagctggtgagaagggactgcctggtgctcctggtctgaggggtcttcctggcaaagatggtgagacaggtgctgcaggaccccctggccctgctggacctgctggtgaacgaggcgagcagggtgctcctgggccatctgggttccagggacttcctggccctcctggtcccccaggtgaaggtggaaaaccaggtgaccagggtgttcccggtgaagctggagcccctggcctcgtgggtcccaggggtgaacgaggtttcccaggtgaacgtggctctcccggtgcccagggcctccagggtccccgtggcctccccggcactcctggcactgatggtcccaaaggtgcatctggcccagcaggcccccctggggctcagggccctccaggtcttcagggaatgcctggcgagaggggagcagctggtatcgctgggcccaaaggcgacaggggtgacgttggtgagaaaggccctgagggagcccctggaaaggatggtggacgaggcctgacaggtcccattggcccccctggcccagctggtgctaatggcgagaagggagaagttggacctcctggtcctgcaggaagtgctggtgctcgtggcgctccgggtgaacgtggagagactgggccccccggaccagcgggatttgctgggcctcctggtgctgatggccagcctggggccaagggtgagcaaggagaggccggccagaaaggcgatgctggtgcccctggtcctcagggcccctctggagcacctgggcctcagggtcctactggagtgactggtcctaaaggagcccgaggtgcccaaggccccccgggagccactggattccctggagctgctggccgcgttggacccccaggctccaatggcaaccctggaccccctggtccccctggtccttctggaaaagatggtcccaaaggtgctcgaggagacagcggcccccctggccgagctggtgaacccggcctccaaggtcctgctggaccccctggcgagaagggagagcctggagatgacggtccctctggtgccgaaggtccaccaggtccccagggtctggctggtcagagaggcatcgtcggtctgcctgggcaacgtggtgagagaggattccctggcttgcctggcccgtcgggtgagcccggcaagcagggtgctcctggagcatctggagacagaggtcctcctggccccgtgggtcctcctggcctgacgggtcctgcaggtgaacctggacgagagggaagccccggtgctgatggcccccctggcagagatggcgctgctggagtcaagggtgatcgtggtgagactggtgctgtgggagctcctggagcccctgggccccctggctcccctggccccgctggtccaactggcaagcaaggagacagaggagaagctggtgcacaaggccccatgggaccctcaggaccagctggagcccggggaatccagggtcctcaaggccccagaggtgacaaaggagaggctggagagcctggcgagagaggcctgaagggacaccgtggcttcactggtctgcagggtctgcccggccctcctggtccttctggagaccaaggtgcttctggtcctgctggtccttctggccctagaggtcctcctggccccgtcggtccctctggcaaagatggtgctaatggaatccctggccccattgggcctcctggtccccgtggacgatcaggcgaaaccggccctgctggtcctcctggaaatcctggaccccctggtcctccaggtccccctggccctggcatcgacatgtccgcctttgctggcttaggcccgagagagaagggccccgaccccctgcagtacatgcgggccgaccaggcagccggtggcctgagacagcatgacgccgaggtggatgccacactcaagtccctcaacaaccagattgagagcatccgcagccccgagggctcccgcaagaaccctgctcgcacctgcagagacctgaaactctgccaccctgagtggaagagtggagactactggattgaccccaaccaaggctgcaccttggacgccatgaaggttttctgcaacatggagactggcgagacttgcgtctaccccaatccagcaaacgttcccaagaagaactggtggagcagcaagagcaaggagaagaaacacatctggtttggagaaaccatcaatggtggcttccatttcagctatggagatgacaatctggctcccaacactgccaacgtccagatgaccttcctacgcctgctgtccacggaaggctcccagaacatcacctaccactgcaagaacagcattgcctatctggacgaagcagctggcaacctcaagaaggccctgctcatccagggctccaatgacgtggagatccgggcagagggcaatagcaggttcacgtacactgccctgaaggatggctgcacgaaacataccggtaagtggggcaagactgttatcgagtaccggtcacagaagacctcacgcctccccatcattgacattgcacccatggacataggagggcccgagcaggaattcggtgtggacatagggccggtctgcttcttgtaa

SEQ ID NO: 121425 - DNA, 5071 bp, Homo sapiens
  Payload ID: 3805
  Gene Symbol: COL2A1
  Gene Name: collagen, type II, alpha 1
  Uniprot ID: P02458
  ENST ID: ENST00000380518
  CDS Start-End: 166-4629
gggagaagacgcagagcgctgctgggctgccgggtctcccgcttccccctcctgctccaagggcctcctgcatgagggcgcggtagagacccggacccgcgccgtgctcctgccgtttcgctgcgctccgcccgggcccggctcagccaggccccgcggtgagccatgattcgcctcggggctccccagacgctggtgctgctgacgctgctcgtcgccgctgtccttcggtgtcagggccaggatgtccaggaggctggcagctgtgtgcaggatgggcagaggtataatgataaggatgtgtggaagccggagccctgccggatctgtgtctgtgacactgggactgtcctctgcgacgacataatctgtgaagacgtgaaagactgcctcagccctgagatccccttcggagagtgctgccccatctgcccaactgacctcgccactgccagtgggcaaccaggaccaaagggacagaaaggagaacctggagacatcaaggatattgtaggacccaaaggacctcctgggcctcagggacctgcaggggaacaaggacccagaggggatcgtggtgacaaaggtgaaaaaggtgcccctggacctcgtggcagagatggagaacctgggacccctggaaatcctggcccccctggtcctcccggcccccctggtccccctggtcttggtggaaactttgctgcccagatggctggaggatttgatgaaaaggctggtggcgcccagttgggagtaatgcaaggaccaatgggccccatgggacctcgaggacctccaggccctgcaggtgctcctgggcctcaaggatttcaaggcaatcctggtgaacctggtgaacctggtgtctctggtcccatgggtccccgtggtcctcctggtccccctggaaagcctggtgatgatggtgaagctggaaaacctggaaaagctggtgaaaggggtccgcctggtcctcagggtgctcgtggtttcccaggaaccccaggccttcctggtgtcaaaggtcacagaggttatccaggcctggacggtgctaagggagaggcgggtgctcctggtgtgaagggtgagagtggttccccgggtgagaacggatctccgggcccaatgggtcctcgtggcctgcctggtgaaagaggacggactggccctgctggcgctgcgggtgcccgaggcaacgatggtcagccaggccccgcagggcctccgggtcctgtcggtcctgctggtggtcctggcttccctggtgctcctggagccaagggtgaagccggccccactggtgcccgtggtcctgaaggtgctcaaggtcctcgcggtgaacctggtactcctgggtcccctgggcctgctggtgcctccggtaaccctggaacagatggaattcctggagccaaaggatctgctggtgctcctggcattgctggtgctcctggcttccctgggccacggggccctcctggccctcaaggtgcaactggtcctctgggcccgaaaggtcagacgggtgaacctggtattgctggcttcaaaggtgaacaaggccccaagggagaacctggccctgctggcccccagggagcccctggacccgctggtgaagaaggcaagagaggtgcccgtggagagcctggtggcgttgggcccatcggtccccctggagaaagaggtgctcccggcaaccgcggtttcccaggtcaagatggtctggcaggtcccaagggagcccctggagagcgagggcccagtggtcttgctggccccaagggagccaacggtgaccctggccgtcctggagaacctggccttcctggagcccggggtctcactggccgccctggtgatgctggtcctcaaggcaaagttggcccttctggagcccctggtgaagatggtcgtcctggacctccaggtcctcagggggctcgtgggcagcctggtgtcatgggtttccctggccccaaaggtgccaacggtgagcctggcaaagctggtgagaagggactgcctggtgctcctggtctgaggggtcttcctggcaaagatggtgagacaggtgctgcaggaccccctggccctgctggacctgctggtgaacgaggcgagcagggtgctcctgggccatctgggttccagggacttcctggccctcctggtcccccaggtgaaggtggaaaaccaggtgaccagggtgttcccggtgaagctggagcccctggcctcgtgggtcccaggggtgaacgaggtttcccaggtgaacgtggctctcccggtgcccagggcctccagggtccccgtggcctccccggcactcctggcactgatggtcccaaaggtgcatctggcccagcaggcccccctggggctcagggccctccaggtcttcagggaatgcctggcgagaggggagcagctggtatcgctgggcccaaaggcgacaggggtgacgttggtgagaaaggccctgagggagcccctggaaaggatggtggacgaggcctgacaggtcccattggcccccctggcccagctggtgctaatggcgagaagggagaagttggacctcctggtcctgcaggaagtgctggtgctcgtggcgctccgggtgaacgtggagagactgggccccccggaccagcgggatttgctgggcctcctggtgctgatggccagcctggggccaagggtgagcaaggagaggccggccagaaaggcgatgctggtgcccctggtcctcagggcccctctggagcacctgggcctcagggtcctactggagtgactggtcctaaaggagcccgaggtgcccaaggccccccgggagccactggattccctggagctgctggccgcgttggacccccaggctccaatggcaaccctggaccccctggtccccctggtccttctggaaaagatggtcccaaaggtgctcgaggagacagcggcccccctggccgagctggtgaacccggcctccaaggtcctgctggaccccctggcgagaagggagagcctggagatgacggtccctctggtgccgaaggtccaccaggtccccagggtctggctggtcagagaggcatcgtcggtctgcctgggcaacgtggtgagagaggattccctggcttgcctggcccgtcgggtgagcccggcaagcagggtgctcctggagcatctggagacagaggtcctcctggccccgtgggtcctcctggcctgacgggtcctgcaggtgaacctggacgagagggaagccccggtgctgatggcccccctggcagagatggcgctgctggagtcaagggtgatcgtggtgagactggtgctgtgggagctcctggagcccctgggccccctggctcccctggccccgctggtccaactggcaagcaaggagacagaggagaagctggtgcacaaggccccatgggaccctcaggaccagctggagcccggggaatccagggtcctcaaggccccagaggtgacaaaggagaggctggagagcctggcgagagaggcctgaagggacaccgtggcttcactggtctgcagggtctgcccggccctcctggtccttctggagaccaaggtgcttctggtcctgctggtccttctggccctagaggtcctcctggccccgtcggtccctctggcaaagatggtgctaatggaatccctggccccattgggcctcctggtccccgtggacgatcaggcgaaaccggccctgctggtcctcctggaaatcctggaccccctggtcctccaggtccccctggccctggcatcgacatgtccgcctttgctggcttaggcccgagagagaagggccccgaccccctgcagtacatgcgggccgaccaggcagccggtggcctgagacagcatgacgccgaggtggatgccacactcaagtccctcaacaaccagattgagagcatccgcagccccgagggctcccgcaagaaccctgctcgcacctgcagagacctgaaactctgccaccctgagtggaagagtggagactactggattgaccccaaccaaggctgcaccttggacgccatgaaggttttctgcaacatggagactggcgagacttgcgtctaccccaatccagcaaacgttcccaagaagaactggtggagcagcaagagcaaggagaagaaacacatctggtttggagaaaccatcaatggtggcttccatttcagctatggagatgacaatctggctcccaacactgccaacgtccagatgaccttcctacgcctgctgtccacggaaggctcccagaacatcacctaccactgcaagaacagcattgcctatctggacgaagcagctggcaacctcaagaaggccctgctcatccagggctccaatgacgtggagatccgggcagagggcaatagcaggttcacgtacactgccctgaaggatggctgcacgaaacataccggtaagtggggcaagactgttatcgagtaccggtcacagaagacctcacgcctccccatcattgacattgcacccatggacataggagggcccgagcaggaattcggtgtggacatagggccggtctgcttcttgtaaaaacctgaacccagaaacaacacaatccgttgcaaacccaaaggacccaagtactttccaatctcagtcactctaggactctgcactgaatggctgacctgacctgatgtccattcatcccaccctctcacagttcggacttttctcccctctctttctaagagacctgaactgggcagactgcaaaataaaatctcggtgttctatttatttattgtcttcctgtaagaccttcgggtcaaggcagaggcaggaaactaactggtgtgagtcaaatgccccctgagtgactgcccccagcccaggccagaagacctcccttcaggtgccgggcgcaggaactgtgtgtgtcctacacaatggtgctattctgtgtcaaacacctctgtattttttaaaacatcaattgatattaaaaatgaaaagattattggaaagtaca

SEQ ID NO: 121426 - DNA, 5543 bp, Homo sapiens
  Payload ID: 3806
  Gene Symbol: COL3A1
  Gene Name: collagen, type III, alpha 1
  Uniprot ID: P02461
  ENST ID: ENST00000304636
  CDS Start-End: 171-4571
gtgagggaagccaaactttttcctatttaaggccaaagcaaaggaatctcagtggctgagttttatgacgggcccggtgctgaagggcagggaacaacttgatggtgctactttgaactgcttttcttttctcctttttgcacaaagagtctcatgtctgatatttagacatgatgagctttgtgcaaaaggggagctggctacttctcgctctgcttcatcccactattattttggcacaacaggaagctgttgaaggaggatgttcccatcttggtcagtcctatgcggatagagatgtctggaagccagaaccatgccaaatatgtgtctgtgactcaggatccgttctctgcgatgacataatatgtgacgatcaagaattagactgccccaacccagaaattccatttggagaatgttgtgcagtttgcccacagcctccaactgctcctactcgccctcctaatggtcaaggacctcaaggccccaagggagatccaggccctcctggtattcctgggagaaatggtgaccctggtattccaggacaaccagggtcccctggttctcctggcccccctggaatctgtgaatcatgccctactggtcctcagaactattctccccagtatgattcatatgatgtcaagtctggagtagcagtaggaggactcgcaggctatcctggaccagctggccccccaggccctcccggtccccctggtacatctggtcatcctggttcccctggatctccaggataccaaggaccccctggtgaacctgggcaagctggtccttcaggccctccaggacctcctggtgctataggtccatctggtcctgctggaaaagatggagaatcaggtagacccggacgacctggagagcgaggattgcctggacctccaggtatcaaaggtccagctgggatacctggattccctggtatgaaaggacacagaggcttcgatggacgaaatggagaaaagggtgaaacaggtgctcctggattaaagggtgaaaatggtcttccaggcgaaaatggagctcctggacccatgggtccaagaggggctcctggtgagcgaggacggccaggacttcctggggctgcaggtgctcggggtaatgacggtgctcgaggcagtgatggtcaaccaggccctcctggtcctcctggaactgccggattccctggatcccctggtgctaagggtgaagttggacctgcagggtctcctggttcaaatggtgcccctggacaaagaggagaacctggacctcagggacacgctggtgctcaaggtcctcctggccctcctgggattaatggtagtcctggtggtaaaggcgaaatgggtcccgctggcattcctggagctcctggactgatgggagcccggggtcctccaggaccagccggtgctaatggtgctcctggactgcgaggtggtgcaggtgagcctggtaagaatggtgccaaaggagagcccggaccacgtggtgaacgcggtgaggctggtattccaggtgttccaggagctaaaggcgaagatggcaaggatggatcacctggagaacctggtgcaaatgggcttccaggagctgcaggagaaaggggtgcccctgggttccgaggacctgctggaccaaatggcatcccaggagaaaagggtcctgctggagagcgtggtgctccaggccctgcagggcccagaggagctgctggagaacctggcagagatggcgtccctggaggtccaggaatgaggggcatgcccggaagtccaggaggaccaggaagtgatgggaaaccagggcctcccggaagtcaaggagaaagtggtcgaccaggtcctcctgggccatctggtccccgaggtcagcctggtgtcatgggcttccccggtcctaaaggaaatgatggtgctcctggtaagaatggagaacgaggtggccctggaggacctggccctcagggtcctcctggaaagaatggtgaaactggacctcagggacccccagggcctactgggcctggtggtgacaaaggagacacaggaccccctggtccacaaggattacaaggcttgcctggtacaggtggtcctccaggagaaaatggaaaacctggggaaccaggtccaaagggtgatgccggtgcacctggagctccaggaggcaagggtgatgctggtgcccctggtgaacgtggacctcctggattggcaggggccccaggacttagaggtggagctggtccccctggtcccgaaggaggaaagggtgctgctggtcctcctgggccacctggtgctgctggtactcctggtctgcaaggaatgcctggagaaagaggaggtcttggaagtcctggtccaaagggtgacaagggtgaaccaggcggtccaggtgctgatggtgtcccagggaaagatggcccaaggggtcctactggtcctattggtcctcctggcccagctggccagcctggagataagggtgaaggtggtgcccccggacttccaggtatagctggacctcgtggtagccctggtgagagaggtgaaactggccctccaggacctgctggtttccctggtgctcctggacagaatggtgaacctggtggtaaaggagaaagaggggctccgggtgagaaaggtgaaggaggccctcctggagttgcaggaccccctggaggttctggacctgctggtcctcctggtccccaaggtgtcaaaggtgaacgtggcagtcctggtggacctggtgctgctggcttccctggtgctcgtggtcttcctggtcctcctggtagtaatggtaacccaggacccccaggtcccagcggttctccaggcaaggatgggcccccaggtcctgcgggtaacactggtgctcctggcagccctggagtgtctggaccaaaaggtgatgctggccaaccaggagagaagggatcgcctggtgcccagggcccaccaggagctccaggcccacttgggattgctgggatcactggagcacggggtcttgcaggaccaccaggcatgccaggtcctaggggaagccctggccctcagggtgtcaagggtgaaagtgggaaaccaggagctaacggtctcagtggagaacgtggtccccctggaccccagggtcttcctggtctggctggtacagctggtgaacctggaagagatggaaaccctggatcagatggtcttccaggccgagatggatctcctggtggcaagggtgatcgtggtgaaaatggctctcctggtgcccctggcgctcctggtcatccaggcccacctggtcctgtcggtccagctggaaagagtggtgacagaggagaaagtggccctgctggccctgctggtgctcccggtcctgctggttcccgaggtgctcctggtcctcaaggcccacgtggtgacaaaggtgaaacaggtgaacgtggagctgctggcatcaaaggacatcgaggattccctggtaatccaggtgccccaggttctccaggccctgctggtcagcagggtgcaatcggcagtccaggacctgcaggccccagaggacctgttggacccagtggacctcctggcaaagatggaaccagtggacatccaggtcccattggaccaccagggcctcgaggtaacagaggtgaaagaggatctgagggctccccaggccacccagggcaaccaggccctcctggacctcctggtgcccctggtccttgctgtggtggtgttggagccgctgccattgctgggattggaggtgaaaaagctggcggttttgccccgtattatggagatgaaccaatggatttcaaaatcaacaccgatgagattatgacttcactcaagtctgttaatggacaaatagaaagcctcattagtcctgatggttctcgtaaaaaccccgctagaaactgcagagacctgaaattctgccatcctgaactcaagagtggagaatactgggttgaccctaaccaaggatgcaaattggatgctatcaaggtattctgtaatatggaaactggggaaacatgcataagtgccaatcctttgaatgttccacggaaacactggtggacagattctagtgctgagaagaaacacgtttggtttggagagtccatggatggtggttttcagtttagctacggcaatcctgaacttcctgaagatgtccttgatgtgcatctggcattccttcgacttctctccagccgagcttcccagaacatcacatatcactgcaaaaatagcattgcatacatggatcaggccagtggaaatgtaaagaaggccctgaagctgatggggtcaaatgaaggtgaattcaaggctgaaggaaatagcaaattcacctacacagttctggaggatggttgcacgaaacacactggggaatggagcaaaacagtctttgaatatcgaacacgcaaggctgtgagactacctattgtagatattgcaccctatgacattggtggtcctgatcaagaatttggtgtggacgttggccctgtttgctttttataaaccaaactctatctgaaatcccaacaaaaaaaatttaactccatatgtgttcctcttgttctaatcttgtcaaccagtgcaagtgaccgacaaaattccagttatttatttccaaaatgtttggaaacagtataatttgacaaagaaaaatgatacttctctttttttgctgttccaccaaatacaattcaaatgctttttgttttatttttttaccaattccaatttcaaaatgtctcaatggtgctataataaataaacttcaacactctttatgataacaacactgtgttatattctttgaatcctagcccatctgcagagcaatgactgtgctcaccagtaaaagataacctttctttctgaaatagtcaaatacgaaattagaaaagccctccctattttaactacctcaactggtcagaaacacagattgtattctatgagtcccagaagatgaaaaaaattttatacgttgataaaacttataaatttcattgattaatctcctggaagattggtttaaaaagaaaagtgtaatgcaagaatttaaagaaatatttttaaagccacaattattttaatattggatatcaactgcttgtaaaggtgctcctcttttttcttgtcattgctggtcaagattactaatatttgggaaggctttaaagacgcatgttatggtgctaatgtactttcacttttaaactctagatcagaattgttgacttgcattcagaacataaatgcacaaaatctgtacatgtctcccatcagaaagattcattggcatgccacaggggattctcctccttcatcctgtaaaggtcaacaataaaaaccaaattatggggctgcttttgtcacactagcatagagaatgtgttgaaatttaactttgtaagcttgtatgtggttgttgatcttttttttccttacagacacccataataaaatatcatattaaaattc
